United States Patent Application Publication US 2025/0122569 A1 - sequence listing, part 2

SEQ ID NO: 145 - DNA, 12493 bp, unidentified
  source 1..12493: mol_type = unassigned DNA
ttatttgttgtcccgtaagtcttttaccctgacggcttttccttcgctctgcggcaaggaacctttctttaccaaccgtaacttcggagttaccagaatctcgtctttcagctggcgggtaatggctttgctaatcttttgcagctcgatataattgtcagtagagaggtcgctaagttcaacttccacaatcatctcatcctggttattgaccgtttcgagcgtgatgaggtaattgctgcccaattcggggaattgtaccagcaccttttccacctgcatggggaagatattgactcccttgatgatgaacatatcgtcgctacggcctttgatgcggtctatacggatgtgggtacgtccgcaagggcacttgccgggcaggatgcgggtaaggtcgcgtgtacggtagcggatgaggggcatcatctctctgtccagcgttgtcagtaccagttcgccgatttcaccttccggtacgggttcgccggtttccgggttaatgatttcgaccaggtagcaatcttcccagaagtgcatgccgtcttgttcggtgcactcgaaggctacgccgggaccgttcatttcagtcataccaaagctgttataggctttgacgccaagcatgcgttcaatctttctgcgttgctcgtctgtgtggggttcggcaccgataacaagcgttttcagacttgtgccggcggggtccatcccttcttcctggaatacctctgccaagcggatggcatagctgggaatggcatgcagggcagtggtcttgaagtcggtgatgaactttatctgacgcttgctgtttccggcagcggcaggaacagtcagcgcacccaggcgttcggctccatactgaaagcccagtcctccggtgaacatgccgtaaccggagctgttttggaaaacatccgtcttacggatacctaccatatagaggcagcgtgccactaagttagcccaagagtccaaatcgtgttgggagtgtacgatgaccgtcggcgtgcccgtagtgccactggaagaatggatacgtactccgtcctcacgcatatcgcctgctactaatccaaaaggataattggcgcgcatatcggccttggtagtaaacggtatcttacgtatgtcttctatagaccggatgctgtcggcagtgatgccatgctcttggaatacctttttataataaggagagttggcggcaatgctgacagtcttttttaaccgttgcagttgcagttcgcgcaactgctcacggggcatcgtttcaatctcttcttcccagtatttgttattcatggtatgttgaaatttagagtcaattatagtttacatcagtttttcagcaatctctttgccggcagccaacgctttgaggttcagctctacaatggcgtcgcccttgcgttggaagatttcgcggatgctgtcttgcacctttgcgtagtcgatgccgaggaaggggatggtggcgcccagcagtacgatgttcgctacgcggggagagccgacttcttttgccacttcgtttacgttcagcatgattttatgcggcagcttgttgatttcggtcttgatgtcttcttctgccggatagttgggaatgttgatgaagggggcttcattggtcaccagccaaccttcggggctgaggtaggggaggtagcgcagtgcttccatcggttccagggagatgatgaggtcgcattttcctgtgggaatgaggtccgaagcgataggttggtcgctgatgcgcaggttggactgcacgtcgccgcctcgctggctcatgccgtgtacttctgcctgcttcatgtagagtccgtccttgagggctgctttgccgattacggtggcgatggagaggataccttgtcctcctacgccggaaagtatgatgtcttttttcatggctttacttgtttctttttttgcgtgctaatgtttggatacattctctgcgggggatgatgacggatacgccgtggtgctcgatttcttcccggatgatttgcttcatctcttcgtagtttttcttcaagggcactacgacgcggatgtgttcgggagctacaccgatgccggcgcagatggcttccagacgtccggtgccggcagaatcttgtcctccggtcatggcggtggtttcgttgtcggagatgacgatggtgacgtcggcgttttcgttgacgcaatccagcagtcccgtcatgcccgagtgggtgaaggtggagtcgccgatgacggctacggcaggatgcaggccggcatctgaagcacccttcgccatggtgatggaggcgcccatatccacacaagagttaatggcgttgaatggggcattggctcccagcgtgtagcaaccaatgtcgctgaacaccttataagtgggatattcttctttcaatacttgggtcagcaccgtgtacatgtcgcgatggccgcaaccctcgcacaaagcgggcgggcgcatctctaccagagaaggaacgctgaattcagccttgttctccttgcctacggcacgtgccacgctgtccgggttcagctctccgtcttgtgaaagagtgccgtccaaacggccttttactttgatgccgatgcccagatagcctttcagttgtttttctacgaacggttgtccgtcttccagtaccagaatctcgtcacatgcttctaccagctgcatcagctgtttcttgggcaacgggtattgtccgattttcagtaccggatattcgcaaccttcgggatagttttccattaggtagttgtagccgatgccgcatgccacgatacccagctttttgttggggccgtcggtatatttgttgtaagcggagttttcagaagctttgataaattcgtcctggcgttgcagcaatgctttgtagcgtttgcgtgcattacccggcaggaggatgaactgacgcgggtcttcgctgaaggaaatctcattctgcggttgttgctccttgcgctctacgccggaacgggagtgtgccaggcgcgtaaccatgcgcatcaggatgggttcgccggtctgttcggagaagttgaatccgttgtacaccatgtcgtatgcttcctgctggttgcttggttcgtacatcgggatgagggagaagtcgccatagaaacggctgtcctgctcgttctgagaggaatgcatgctggggtcgtcggcagcaatgattataagaccaccttttacgccggtaatggcagagttgatgaaacagtcggcagccacgttcatacccacgtgcttcatgcacaccagtgaacgcttgcctgcaaaggacatgcccagggcagcttccattgcagttttctcgttggagcaccagcggttatggatgttcttttcggcagtaatcggtgccatctgaatatattcggtgatttccgtagaaggagtgccgggataggcatatacacccgaaagtccggcgtctaatgcagcttgtgcaatggcttcatcgccaagtaagagttgcttgctcatatctgaatatttaagtgttagtcatggattaatatttgacgcaaatataggattttgcttttattttatcagcagattacttgaaaatctttctttcgtttaatgcattccaatattttcttgcatttttcatgtgctcggcataattggatgcaaagttatgggtgcccgagaagtcctctttggcacacatgtagaggtagttgtgtttcgtatggttcagcacagcatccagcccgatgggtgaggggatgcgtatgggaccgggaggtagtccggtgttgagataggtattgtagggggattctactgccagatgggcattcgtaattctccgcaagccgaagtcctgcaaggcaaatttgatggtagggtcggcttgcaggggcatgccggtgtgcaggcggttgatgtagagccctgccaccattggtttttcgggattgttgtttgtctcttcctcgacgatggcggcgagggtgcagacttccgtcggggtcattccgatggcggtggctttgtctaagcgttcctggttccagaacttctggtgctctttttgcattctttcgaagaactcttctgcactcatgtcccaatagacttggtaggtttcggggatgaagaggcagggcagggtctctttgttgtatcccagtttttgttggaatgcggagtcgttcatcaatccggctatttcggcggagtctatcatgagctgtttgcctacgctgcgtgccagccggtccagtgtgcgtacgctgccgacggtgagattcgtaggttcttgatatccgcggtacagacggctgaatacgtgatatacgttttcccccggccggatggtgtagcgtccggtgtgtatattttcggaatatttcttgtattgggccatccagcggaagccggtgaagcttcgaggatggccttgttgttccaccttattatatatggagtcggcggtgtcgtcgcggtctatatagatatagactgtctttttcggatggaattgcggggcaaacagatagtagtatactgttcctgcacaagctgctccaataagaatcagtgcgacgaatgttccgataatgattttcttcttttccattttgttttactgcatctttagtcgggcaaagttagtaaaaaatggagtgaaaaccatcaagtcatatcagttaattcgatagctgacgaaggctatgcgtttgctgtccggtgcccatgagttgacattgatggtgccttgtccaccgaaaagctttaacaatgtcttgggttctccaccgtttgcgggcattaggcgcagctctacgttcttgtttgccaggtgttctcccggttccaggtcacctttgtagtaggtgatgaatacaacggattttccgtcaggggagatgtgggggaaccaggagttacgggtttcgtcaaaggtcatctgggtctgttcggagccgtctgccttcatgcgccagacttgcatgagtccggtgcgtacggaattgaaccagatgtattgtccgcagggggaatattccggtccgtcatccagaccttcggcagtggtcaggcgggtttcttcacctccttccgccgggatggtatagacgtcatagttgccgtttcgttcggcgcaataggcaagctctttgccgtcggggctccagccgtggaggtagctgggagccataggtgttattaaacggggagtgccgcccgtgatgggaagtgtataaatgcgcgatttatagtcttcttttgtcccgtggctgatggctatctgctgtccgtcggccgagaggacgtggtcgttgttgcagttttgggcaaatccggtgtttatcagttccggttcggcaggcgaggtgggggaaaggcggtaaagctttccgtcgttgttgtatagcagccattgcccgtcgggcgtccaattgggagcttcaatccggtagggaaattcttttacgacggtccggttaccgttagttacatccagtatttcgaggacgctggtaatctcgtttttttgttgagcggttgcggtcagtgcaacagttgcaaagaaggggattagatagggtttcatgttcatatcgtatttaataaatctccgcaagatacattttttattggaaactacatagtcggagcatgcttttttcagagagaatctgtagtgatggtcgaatgcgtagtgcttatcatatgaatagtctccgggattcttgaaatagttgtccacatactgccagttgtcggtgtcgagcggcgtgtgcgaagtcatgtacgatagggagcttttatctctactatctcgctgtccagactaatcaggtctttgcccaagcggacaatgcgggcatcttcgggcatgtagtcggtgccgacttccccctttccgcctccgccgaatgacaacccatcctgtaccttcgtcatctatcacggcacccgggtcgaaaggagccctgcagtggcctaatccttgggtgaactggttcaccagcatacgtcttaccgtccgattccactcgcgatacgatggatggtgcccatgaggctataccccatggcgaaaggacctttacctcaatcagtccgtgataagtccagtttaccatgtcatcggtggacagcatgaccagtgaatggatgtattggtatgtgtttttgccgtcttttcccacactgtccagttgctgggtgtcattggttccatacacatagagccttccgttgtattccaccgatgtcgggtcggccacaaaaatgaaatccaacagcgggttggcgtttccactgaagaattggggtgattttaccggacgcgtgtctttctttcttgaatcggaaagcgcccacacatcgtttcctgcggatatagccgccagcagcaaagccgctgtaaataacttgattcttttcatttttttatagtatgttataggaatctatggtagccttttgattttggcttgtgttcttcaatcacctcaatcctttatttaagattgaaaaattgggttattgaaaagttgccgcaaatattggggattactatgtataatataaggtgtattatgcttttaataatgtacctatatgtttcaagttatcattgtaatcggatggtgctgttttaaactagctttacttgctttgggataattatgcggctatggattaaactgtttggaagggcattgtgttttatgcaaatatattggtagaagagcgtttttttattctaacgattcttgaaaagaaaaagcactgattattccagataatcagtgcttgaatatcgagccgctagccagacttgaactggcgacctacgcgttacgaatgcgttgctctaccaactgagctatagcggcaataagcttttgtttacggggtgcaaaggtacatctttatttgaaaaggcaaaaagaatctctgtttttttagaaatattttagtgggataattttctatttgaatgtcctgaactttattgccataaaaattggataataaaacgaaaagaagcatctttgtcgtaggtcctatagcaaataagtctgatactgattatgaatttaagaatctattataaatatctttcttcacgcatagcgtccaaatggacggtgctgttggtagatgtaattatcgttgtgatttccatgctttctgcatgttttttgcaatataggctttcgtccgtatcttatgaaatttctttgtatgtatggctgaccattttggctgtcttgtgtaatgtctgtttctttcatattctccgtacttatgtgggtgttatccgtttttcctcttttgtggatatttatcgtgtgttttggagtcttacgataagctatgttgtactgtttttagggaattgctgttggtctgtttcggggcttggagaaactttgccgaacagcattctgtttatggcatatatgttcaccttctctctgatggcttgtatgcgcattgctgtgaagatgctttatgaagctattgcttttgatgcacgtcattgtgtgaatgtttttatttatggattccatgggactggagtcaatgttgcaaaatccttgagagttagtcgtaataatcattatcgcctgcgtggctttatttcggacgaacctgatatgataggtaaacatacgatgggatgcagggtatatcccaatgatgagcagctgtttgaccgtctaaagaaaaagaaagtggatacaatcattatctctccaagcaaggtgtcggatttggaaaattccggaatgctggataaactgttctctcatgatattcatgtaatgaccgttcctcccttaagcgattgtatggacgatggactgataaaggatattcaaatagaagattggctccgtagagaaccggtacaagttgacgtgcgtaaaattacggcccatattgaggggcgtagagtaatggttacgggagcggcgggagctgtaggaagggaaatcgtccgccagttggctacactgaatccttatcagttgattctggtagatcaggcagaatccccattgtatgatgtacagttggaattgtctgatcattggaagaatctggaggtccgtgtattggttgcagatgttgctaaccgtacgcgtatggaggctatatttgaagaaacacgtcctcaacttgtttttcattctgctgcgtataagcatgtacaactgatggatgattttgtatcggaggcaattcaaacgaatatatcggggacagtgaatattgcggacctggcggcaaagtatagagtgtcccgtatggttatgatatctgctgctaatgcacgtcatccggagaatgctatggaatatagtaagcgtgtggcggaaatatatgtgcaatcatctgattgcaggttgaaacgcgacacaggggaaactgatatgttcatagtacgtttgggtgaggtgtatccgacgaatactcattgtttgattaccttgtctgaagcttgtatgctcaccctggaagtgggagtcatgggggatgggggagaagtgtacattgtgggagggcctggggatggacttttggattctgtaatcggtgaaaagataaagcgtgaaaaggcatctgttgatgattatgaacatgtgcgggaagaagtgctggccttggtgcaacatagttatactgaaaaaaaggctattttgattggactaatgaaaaaaatagtgccaatttttccgctttcttctacccgatgaaaagacgtgaaagtgacagttttttaatgctttttctgaaacttagaggtggaataaatgtatattataaaaataatatattacctttgtgcccgatttatatttattacaagaactcaaaagattaatcagaatatcttatgcgtagattaataacactattctttttggtatttactttgtcaggggtagcttttgctcagcagatgtcagatgatcaggttgttcagtatgtaaaaagcgctcagcagatgggcaaaaatcaaaagcagattactactgaattaatgcggcggggagtgacaaaggaacaagttgaaagaattcagaaaaagtatgaaaattctaaatctggaagtccgcagagcaatacccaagatgagaaacgttctcgtcaacgtggtgaaatgagtggcgtagtcaaagggttgcgtacaacttcggaaatgtattctgccaggcaaacggatgttgcaggggattctttacaaatgatggataatcgttccttgtctcaagagaaaggggcgggggatccgacttcgcaaatttatggtcataatatttttactaacgataatttgactttcgaacctaatgtgaatgttgctactcccgagaattatcgtctgggacctggtgatgaggtgattattgatgtgtggggagcttctgaaacaacaatccgacaaacaatatctccggaaggaagtattcttgtgaataatttaggaccggtttatctgagtggtaaaacagtaagtgaagccaataattatttgaaacaagaatttgccagaatatattctggagtaactggaaatgttccctctacccaagttaaattgacattaggagaaatacgttctattcaagtaaacgttatgggtgaagttatggtgcccggaacttataccctctcatcatttgcttccgtattccatgctttatatcgtgcaggtggtgtgaatccgattggtagtttacgcagtattaaagtgattcgcaatggaaatacaatagcggatttggatgtttacgatttacttatgaaaggaaaaatgaaagatgacatccgtctgcaggatggtgatgtaattcttgtggatccttaccagtcattggtacagatattgggtaaggtaaaacgtccgatgttttatgaaatgaaacccactgaaaccgtaggtacattattgaagtattcaggtggttttacgggtgatgcttataagaaagcattacgtataatccgtaaaagtggacgtgagcatcaaatttataatgtggatgagatggattattccgtattccgcgtagatgacggtgataagataacggttgattccgttttacagcgttttgagaatcgtgtggaaatccgcggtgctgtatatcgtgaaggtttgtatcagttggacggtacgatgaatacagtgaagcagctgattaagaaagcggaaggacttcgcggagatgcattcttaaaccgtgctataatcgatcgtgaacttgaagacttgtcgcatgaggttatacaagtagatgtgaaaggtttgctgaacgggacggctgcagatattcctttgcagaagaatgacattttatatattccaagtattcatgacttgaaggaagaagctacacttaccattcatggtgaagttgccaatccgggtacatatctttattctgataaaatgacagtagaggatttggtgttgcaggctggtggcttgttggaggcggcggctacaacaaaggttgaagttgcacggcgcatgaaagatccgaagagtacatctttcagtactacagtaggccagaatttctcttttgatttgaaagatggcttattggtgggagaaggaagccaggatttccatcttgagccttttgatgaaatttatgttcgtaagagtccgtcctattttaaacaacagaatgttatggtgggtggagaagtcctttttagcggtaattatgcactatcgaaaaagaatgaacgtttgagtgacttgatagctaaggctggtggagtaactcccgatgcttatataaaaggagcgcgtcttatacgtaggatgaccgaagaagaattccgccgtaaggaagatgctctgcgtatggcgcaagcgggaggcggagattccatatctgtaaaaagattggatttgtccgatacctattctgtaggtataaatctgggagaggccttgaaaaatcctggttcagatgctgatatggtgcttcgcgagggagatgtattatttgttccggagtacgtaagtacagtgaaaatcaacggtgctgtaatgtatccgaatacagttttatataaaaagggtgaaagcttgaaatattatatcaaccaggctggtggttttggtaatgacgccaagaaacgcaaggcctatgtaatatacatgaatggtacagtttctcgtttaagagcaggaaacaagaaagccattgaaccaggttgtgaaataattgttccaagtaaagaacagaaaaggaagatgactaccactgaaattctgggaatgggaagtacgacagcttctattgcagcgatgattgcgactatggttaatctctttaagtaatttgaattatgagcgaagaaaaaatacaaaacataacctctccacaacctgaggaacaagaaatagatttgatagaactggcccagaaagtatgggctagtcgcaaattggtttttaaggcgtgtggtatcgctgcccttgttggactggttgttgcatttagtattcctaaggagtattctacaagtgtgacgttggctccggagagtggtggtaaatctggtggcggaagtatgggagcccttgcagccatggcgggtatcaatttgggtacttcttctggtgaagatgctttgtcacccgaactttatcctgatattgtaagttctactccttttctgattgaactgttcgatgttaaagtcaaggatcagaaagcaaaagtagacacaactctgtatgcttatttgaaagaggaacagcgttctccttggtggagtgcaattttctccgctccttttaaggtgttaggatggacattgtctttgtttaaggatgaaccggaagagggggatgcaaagctggatccttttcgtcttactagagatgagtctgccattgcagatgctttaagtaaacgtatctctgtttccgtagacaaaaagacaggtgtgacaaccttgtctgttactatgcaggatcctttgatatctgcttcgctgacggataccgtgatgcattgcctgcagaactacatcacagattatcggactaataaggctcgtcatgatttggcatttaccgaaaaactttatggagaagcaaaggccagttatgagtctgcccagaagaaatacgcaaattttgtagatgcaaaccagaatataatattgctgagttatcgcgcagagcaagagcgtttacagaatgaaatgaatttagcctatcaagtatatacacaagtgtctcgacaattgcagatggcaagagctaaggtgcaggagattacaccggtatatacggttgtccagccggctacggtacctttgaagcctgcaaagcccaataaattgatgattttgatcggcttcatgttcttggcaggtgtcggcagtgtgggatggatattatttgtaaaagatttattaaagggatggaaaaagcaaacaatatga

SEQ ID NO: 146 - DNA, 9166 bp, unidentified
  source 1..9166: mol_type = unassigned DNA
ttacttattgttcttcttctcattctcaagcttcttcatagctcttaccttaagtgaaagaccgaagaggttgatgaatccgtcagcatcatgatgatcatacatatcacctgtcttgaatgatgcaattgactcgttgtaaagtgaatatggagatgttgttccagccttgatgatgttacccttgtaaagtctgaacttaacttcacctgttacatattcctgagtcttctcaacgaatgcctgaagtgcttcacgaagaggtgtctcccactttccttcgtaaacaacctgtgcaaacttgtttccaacatccatcttgaatgttgttgtatctctgtcgagaactaattcctcaagctgctgatgagcttcgtaaagaattgttccaccaggagtctcatatacaccacgggacttcataccaacaacacggttctcaacgatatcaatgataccgataccatgcttggcaccaagtctgttaagctctctgataatatcagaaaccttcatagccttgccattaactgactttggaacacctttttcaaatgtcatagtaacatattctggttcatccggagcttcctcaggagtgcatccaagaactaataaatgcttgtagttaggctcattagctggatcttcaagctcaagaccttcatggctgatatgccagatgttacggtcacggctgtagctgcagtctgtgctgaatggaagatgaataccatgctgtctgcagtattcaatctcatcctcacgagactgaagcttccagttagaatctctccaaggagcgataatcttgatatctggagctaaagccttgattgtaagctcgaatctgatctggtcattacccttaccagtagcaccgtggcagatagcaacagcaccttccttacgggcaatctcaacaagtctcttagcgataagaggtcttgccattgaagtaccaagtaaatatttattttcataaacagcgtgtgcctgaacacatggaacgatgtagttgtcgcagaactcatcagtgatatcttctatatataacttagcagcaccgcatgagagagctctctgctcaagtccgtccaactcctcttcctgaccacagtctgcacatacgcagacaacatcatagttgtatgtttcctttaaccaagggatgatggcagttgtgtcaagtccgccagaataagcaagaataactttttctttcattatatattcctccgtatattattaagtttacatagtaaaacacatatgctatgcatctgcagattataataaactactttatttaaaaatgcaacaacaaattatgcatattatacattaatatacaacaaaaatgtataaatataaaatttcttcaaaatatcctttacataagaaaaaaagttgctataatgtaggttatcaatttacattttgcgttattttatgcataaatgttgaatatatgcattttgcttcgcaaaacaaggaggagttatgattaaagtaggcattatcggtgcgacaggttacgcaggtaacgagcttgtcagattattattaggacataaggatgcagagattgtatggcttggttcgagaagttacatagatcagaattattcagatgtatatagaaacatgtttaagcttgtagatgcaaaatgtatggacgacaatatggagcagcttgctaacgaggttgatgttatatttacagcaacaccacagggcttatgtgcgtcacttgttaatgatgagatactttcaaagactaagattattgatttgagtgcagatttcagacttaaggatgttaatgtatatgagcagtggtataagcttgagcataaagcaccacagtatattgatgaagctgtttatggcttatgtgagattaacagagataaggtaagcaaagacacaagaatcattgctaacccgggctgttatacaacaacatcaattcttacactttacccaatggttaaggaaggaataatcaatccggatacaattataattgatgctaagagtggaacttcaggtgcaggacgtggcgctaaggttgccaatcttttctgcgaagttaatgaaagcatgaaggcatatggcgtaggaactcacagacatacacctgagattgaggaacagttaggttatgcatgtggaagagatgatttaaagcttatcttcacaccacatttggttccaatgaacagaggaattcttgtaacagcatacgccaaccttgccaaagatgttacatatgaagatgttaaggcagcatatgacaagtactatgataaggaatatttcgtaagagtacttcctaaagatgtatgccctgaaacacgctgggttgagggaagcaactttgttgatataggatttaagattgagccaagaactaacagacttataatgatgggtgcgttagataatcttgttaagggtgcagcaggtcaggcagtacagaatatgaaccttctcttcggacttccagagaatgagggattacagcttgcaccaatgtttccataataaatgtagcgtaaattcagaatttacacgacgaaatatgcacaatgacagagtatatgtgatggtacaataggaggatgttatgaatataattaaaggcggtgttacagcagctaaaggattcaaggctgccggatgtgaagcacagattaaatataagaacggaaagaaagatatggcacttgtatacagtgagaagccatgtgttacagcaggaacatttacaactaacaaagtatttgcagctcctgttaaatgggacagaaacattgtatataatgaagactttgcacaggctgtagttgtaaacagcggtgttgccaacgcatgtacaggcgttgaaggagataacgcatgtgcagaagaagcaaaggcagttgcaaaggttcttaatgtaccggagaatgcagtacttatcggttcaacaggtgttatcggaatgcagcttcctgttgacagaatatgtgcaggaattgaaaaccttgctccaatgcttgatgattcattagaagcaggaacacaggcagcagaggcaattatgactacagatacaagaagcaagcaggttgctgtagaagtagaagttgcaggtactaaggtaacaatcggtggtatgtgcaagggcgcaggaatgattcatcctaacatggcaacaatgctctgctacataacaacagactgtgatatcgacaaggcacttcttcagaagatgacaagtgcaattgttgatgattcatttaacatgatatcagttgatggagatacatcaactaatgatacagctcttgttcttgctaacggaatggctggcaacaagaagattacagaagagggtgctgattataatgctttctatgaaggcttaagctatgtatttacagagctttccaagatgattgcaggtgacggcgaaggctgcacatgtcttttcgaggttcaggtaaagggtgcaacaactaaggcagaagccaagacactcgctaagtcaattgttacatcaagtcttaccaaggcagcaatattcggacatgacgctaactggggaagaattctctgtgcaatgggatattctggtgctgactttgaccctgaaaaggttgatatattctttaagagtgaagcaggtgagcttcagattgttaaagatggaactgctacagattacagcgaggagaaagcaacggaaatactttcacagaatcctgtaattgctattgcggatgttaagcagggcgatgcaagcgctacagcatggggctgtgaccttacatttgattatgtcaagataaatgctgattacagaagctaatctgacacagcattttaaagcaaatagatatctgaataaatatgaaatggagattattatgagcgcaaaagatatgacagaggaacttatgaaggcacaggtgcttgttgaggcacttccttatatccagaaatttaacagaaagataattgtagttaagtacggcggaagtgccatggtagatgaagaacttaagagaaaagttattcaggacgtagttcttcttaaacttgttggttttaagccaatcatcgttcacggcggtggcaaggaaatcagcaaatgggttgaaaagtcaggcatgacacctgaattcaagaatggtttaagagttacagacgagccaacaatggagattgccgagatggttcttaataaggttaataagagtcttgtttcaatgattgagcagcttggtgtcaaggcatgtggtatcagtggtaaggatggcggcatgttaaaggttgagaagaagtattctaagggtgaggatataggatatgttggtgaagtgacagatgttgatacaacacttcttgattcattgcttaaggacgatttcctcccagtaatatgtcctatcggatatgatgatgattttcatgcatacaatattaatgcagatgacgcagcatgtgcaattgcaagagctgtcaatgctgagaagcttgcattcttaacagatatcgaaggtgtatataaggattttgacgataaggattcacttatatctgagctttctacttcagaggcgagaacacttttagagagcggaacaatcggtggcggtatgcttcctaagcttaataactgtatagatgctattgagcatggtgtatcaagagtacatattcttgatggaagaattccacactgccttcttcttgaaatatttactaacaagggtgttggtacagctattctttcagacgatgcagaaaaattctttgattcagataaataattgcgaaccttaagctttgaggttataatattatattggctcatgtgaaaatgtgtgctcataagaataggaaagtgagagtaataatgaatacacagcagattatagaaacagcagaagagaagctgattcatacatacaaccgttaccagatagtacttgataagggtgacggagtaagactttacgatacagatggtaaagaatatcttgattttggagcaggtatagcagtatttgcacttggttataacaataaggaatataacgatgcattaaaggcacagattgataagcttatacacacatctaattatttctataatgaaccggctgtagaggctgcaacagcacttacaaaggcttcaggaatggacagagtattctttactaacagtggtacagaggctattgaaggtgcagtcaagcttgcaaagaaatattattatgtcaagaacggaaaggctgatgcagagattattgcaatgcagcattcattccatggaagaagtatgggagcacttgctgtaactggtaataagcattatcaggaagcatttggacctatgataccgggaattaagtttgcacagtataacgaccttgacagtgtaaaggaacttgttaatgataaaacttgtgctataatatttgagacagtacagggtgaaggtggaatttatcctgctactaaagaatttattgaaggtgtaagaaagctatgtgatgagaagggaatccttcttatacttgatgagattcagtgcggaatgggaagaacaggaagtatgtttgcattccagcagtatggcgttaagcctgatatccttacagttgccaaggctcttggctgtggtgttcctgtaggtgcatttgcagcgacagaggaagttgcgaaggcattagttccaggagaccatggaacaacatacggtggtaatccacttgcatgtgcagcagcaaccaaggtgttcgaactttttgagaagcagcatgtattagataatgtcagggaagtatctgcttactttgaagaaaagcttgatgagcttgttgagacaatagatgttgttgtcgagagacgaggaatgggacttatgcagggacttgagttatcagttaatcctaaggatgtaattgcgagagcacttgataacggacttattctgttctcagcaggaactaatgttataagatttgttccaccacttgtaattactaaggcagatgtagatgaatgcatagctaagcttaagaaatccttctagaatcaggagtttactttatgaaattaagaagatttatcagtatgatgctgattgttaccatgctgacagtctttgcaggctgtggtaataaagatgacaggacacaggctgcgaagaagcttaatcttagtggacctattacagttaatgtctggtataatgacagtgcatatgagtcttatcttgaattcgttgccagacaatttaagaaatctaatgaactggtgactgttaagccagtatatattgaggcggattcatatattaattatatatatgacgaatcggtaaggaataacaatgcatgtgatatatattttctgacatctgaagagatggagaaggcttatctttcaggtcttacctctgagaatgatatgtatcctgaagtctataatgagaatgtgtatggtaaggctgcaatgactgcatgttcgtatggtggtaagttatatggttacccggtgtcgttcaacacttcatttcttgtatataataagaaatatgcagaagcagttgatactatagaccagattcgtaatataagtgataattatcagattacagatgagaatcaggatgtttcaatggtgtttgaatgggatcctgattcaatgttccttaattatgcagcagcaggagcctatattaatataggcggagttaatgcagagaacagggctgaggtatctcttaatgaggaaaagattaagaaggttcttactaagtacgctcagttaaaagatgcatttggtattgacagaaatacagtaagtcttaaagactgtgcagatctgttttctactggaaatatgctctatactgtgcttgatgcagacagtcttgcagagattaatgttacagatgtagattatggaatatgtgagtatccttcaatgggagatgaccttgattctaaggcaatgtctgttactacgatggcagtagttaatccgtacactaagaatgtagatgcatccaaggctgttgcaagagcaatttcttatgattatgcagattatcttggaagcatggctaagaaaagctgtgcaagggcggatttaaaggttaagagagcagaaagctatcagaagttacaccagatttattctgactctgttgtaaaagctaaatatatcggagtaggagaagtatacatgagatatgagattatgcttcatcaggtatatgatggtggaaatgttgatacagcttacagtacatttgcaacaacaatagaaaaaacaactaaaaataataatgaaaacagtacgcagaatactaaataacattatgaataaatatcctgttattaactaataattattctatgcagattaatggggaggttagttaatggcaggatttttgattgcaataatatcaggtgcacttatgagtttacagggcgcatttaatacaaatgttacaaaagcaagcagtgtgtgggttacggcaatgtttgtgcagttgacagcactggcgacttgtgcgattatgtgggtaattgacggaagacctgatatcatgaagctgtttaaggttgataacaagattacacttcttggaggtgtgataggtgcatttataacatttacagttataaaaagtataagtggtcttggaattgctaaagcggaggttacgattgtagttgcgcagataattgtttcgtatctgctgggacttttcgggctgtttggaagtgagaagactacattttcatggattaagctcgtgtcgcttcttattacggttgcaggagtatgtatgttttattttcttggtaatccgtcaacgaattaatatattatgaataattatgataaatgtcagaaaaatctggcaggaaggaacagaatggaagatttattcagcgtatgcggaaagatacgattaagaaaaggtgaaggaagaacattaaaggcaggcggtgcctggatatatgataatgaaattgaatggatgtctgacggaataattgacggacatcttgttaaggtgcttgattttgatgattatttcatgggaatcggatttattaacagaaaatccaagattacagtaagaatgcttgcaagacacactgatgttgttgatgaggcatttattgaggagagagtaagggctgcgattgaatacagatttgacacagtagatacctctgcctgccgtcttatattcggggaggcagattttctgccggggcttgttatagataagtactcagatgtgcttgttgtggaatcgcttgctttaggtattgacagatttaagtcacttattgtcgaaaaagtgaaggaaatccttcatgaaaaaggcattgatatccgtggagtatatgaaagaagcgatgccaaagtccgtactcttgaagggatggagagagttaagggctttattggtgatgaatttgacactaatgttgagatagttgagaatggtgtccactacatgatagatgttgtgaatggacagaaaaccgggttctttcttgatcagaagtacaacagacttgcaatgcagaagctgtgcaaggacaagcgggtattagactgttttacccatatgggtacatttgcattaaatgcaggaattgcaggtgctaaggaagttactggacttgatatatcagaatatgctgttgaacaggcgagagccaatgccaagcttaacggacttgagaatacagtacattttaaatgtgcaaatgtattggatgagctgccaaagcttaacgaagcaggtgagaaatatgacgttgtaatacttgacccgccggcatttaccaaatcgagggaagctacaaagaacgcaatcaagggctacagggaaatcaatatgaagggacttaagcttgtcaaagacggcggctatcttgcaagctgttcatgctcacacttcatgacacaggagcttcttaccaagactattaaggaagccgctaaagctgtacataaaagactccgtcaggtcgagttcaggacacagtcacctgaccacccaatactgtgggaggcgcaggagagctattatctgaaattctacatcttccaggttgttgatgaaaaatga

SEQ ID NO: 147 - DNA, 19686 bp, unidentified
  source 1..19686: mol_type = unassigned DNA
ttcccggaaatggctaccctggattgtggcacctgtaatttcggagatgaggtatttgaaaataccatgcctatgatgagggatttcggtaaaagaatgctggaaaaccggatcaaaccggaatacgaatgtttcgagatgggacatctcgaaaccgtattgaatatggcaaagaaaggtcaggtaccgggagctcctatgcagtttaattttgtactcggtgtccccgggtgtacgcctgcaacagttcctaatctttgctggcttgtaaatgctattccggcaggttctacctggactgcaaccggtatcggacgccatgcctttactttggctgctcctgctattgctatgggaggaaatgtcagagtggggttcgaagataatctgtatctcgaaaaaggggtattggctaaatccaatggcgagttggtagctaaggtcgttcgtatcgctaaggaattgggacgcgaaatcgctacctcggccgaagcacggaagatattgaatttgaaagctagaggctaaaaagctagaagctaaaggctaaaaggtataaagtgaaagaagtttaaagtaaatattaaaaaataaaacattatgaaaaaaggaaataaatacggaacgcatagagtaatttcaccgaaaggagtattgccacaaccagctgacaaactggataacaatatggacgaaatctatgataacgagattttgatcgatgtgcaaactctgaatatcgattcggctagttttactcagattgaagaacaagccggaggggataaagctaaaattgccgagatcatgctgggaattgtagagaaacaaggaaaacaccgtaatccggtaaccggttccggtggtatgttactggggacggtggaaaaaatcggagatgctttggttggaaagaccgatctgaaagtgggagataaaatcgctactttggtgtctttgtcactgactccgcttcgtatcgataaaattaaagaaatccgggcagatgtcgatcaggtagatatcgatggtaaagctattttgtttgaaagtggtatttatgcgaagattccggcagatctgcctgagaagttggctttgtcggctctcgatgtagccggtgctccggctcaaaccgctaaattggtgaaaccgggagatacggtattgattatcggtgccggtggtaaatcgggtatgttgtgttgctatgaagcaaagaaacgggctggtgttaccggtaaagtaatcggtttgtgccatagccagagaagtaccgaacggcttcagaaattaggcttctgtgattatgtattctctgccgatgcaacccagccggttccggttatggagaaaattgccgaactgacgaatggtgaaatgtgtgatattacgatcaataatgtgaatattacggataccgagatgaccagcatcttgtgtactaaaaatgacggattggtttatttcttctctatggcgactagttttacgaaggctgctttgggagcggaaggtgtcggtagcgatgtgactatgatcgttggaaatgggtataccaaaggacatgctgagattacattgcaggaacttcgtgaaagcgaggcattacggaagatatttacagagttgtatgcctgaatagtcgggattacaaaatcccgatgaactaaaaatatatttttatggctagcagaagaaaagagtttttccctgaagtgaccgatgaacaatggaacgattggcattggcaggtgaagaataggattgaaaccttggatcaactgaagaaatacatccggctgacaccagatgaggaagagggtatccgtgagtcactgaagacattgcggatggcgatcacgccttattatctgagtctgatcgatcccgataatccttattgtccgatccgtaaacaatcggtaccgaccattgaagaattacatcggtcgccggctgatctggaagatcccttgcatgaagacggtgattcacccgtaccgggattgacccatcgttatcctgaccgggtgttgttcctgatcaccgatatgtgttcgatgtattgccggcattgtacccggcgccgctttgccggacatcacgattgtgccactccattggaaagaatcgataaatgtatcgaatatatcgctaatactccccaggtgagagatgtccttttatcgggtggagatgctttgttggtcagtgacgaacgattggaatatatcatcaaacggttgcgtgaaatccctcatgtcgagattatccgtatcgggtcgagaacaccggtggtgttaccacagcgcattacgccggaattggtaaatatgctccggaaatatcatccgatttggctgaatactcatttcaaccatccgaacgaaattaccgaagagtcggcggcagcttgtgcccggctggccgatgcgggtatacctttgggaaatcagtctgtcctgctccgtggtatcaacgattgtacacatgtcatgaaaaaattggtacacgagttggtcaagatccgggtacgtccttattacatctatatctgtgatctttctgtgggtatcggccatttccgtactcctgtgtcgaagggaatcgagattatcgagaacttgcggggacatacttccggttatgccgtacctactttcgtcgtggatgctcccggtggaggcggaaaaattccggtgatgccgacctatctgatttctcagggccccaatcgggtggtgttgcgtaattttgaaggcgtggtgactacgtataccgaaccgacggattacagagatgaatgccactgtgaagagtgtgagaagcgccgtaaaacagaaggagtggctgagttgctgagcggagaacgcttatctctcgaaccggcgaatctggatcgtaagacacgtaatctattggcgaaaggataaattatttgtgattttggatttaccgtttcatgcgattgaaaggataagtccggtatcataaattaaaatgctgaacagatgggttttgttgatgacatatccgattacaggagtctggcaattgtcggattggagaaaaatacagggaaaacagaatgcctgaattacatccttcgcaggataaaagattcggcagatcggttcgctctgacttcgatcggaattgacggagaaaaccgggatcaggtatgtcaaaccccgaaacccgagattaccgtgccggaaggaatgatattcgttacttcggagaaacattaccgggagaggaagttggtggctgaaatcatggaaatcgatgatcatcggactgctttgggacgattggtcatcgccagggctaaaacttcgggaaaagtactgctttcagggcctgcggatactgccgggttgaaaagtctgatccggcatatgaaagatttcggggtacaaacgaccttggtcgacggggctttgtcccgtttaagcctggcgtctcccaccgttacggaggcgatggtcttagcgacaggggccgctgtttccgggaatattcgggaagtggtgagacgtacccgttatgtttgtgatttgatcgatctggaagaggtggacgaagttttacaagagagattggatgctattcaacaaggtgtatgggcggtcgggccggagggagaatgtattgatctgaaattgccttctgtgtttatgctggagaaaagtggaacagatctgctaaaatatgggcatcggatttttattgccggtgctgtgagtgataaagtatttcagtttttacgcgtacagaaacagaccgtagaattgatcgtccgtgattttacccgtgtttttgccgcacctgagtctttttatgcctttttacgtaagggcggaagagtacaggtgcttcatcgtagccggcttttggccgttacgatcaatcctcaggctccgggaggattacttttggattcgttgcgtttgcagcaagcattggaagaaagcttgcaaattccggtgtatgatgtaaaaaaaatagaaaaagtcggtaaaaaccgttgaggatatgattttaagggaagcgataagacaagtcaggggattccgttatatgatcgaacaattggatatctgttcggccgtaggccgtagggtattgtatgatctgccctggctcgattcgaaacctcggttggaggccgaatttgaacgcgttcaaaagatcatggtgctttttgaacaacctgaaaatgaatcccgtctggaacgtttgactggtaagctgatgcaggtgagagatatacgggggacgatcgggcggatggcgatggagcaagtgttggatgatcttgaattgttcgaattgaaaacttttgctttgtgttcggaagaaatcaggggacttgtcgaagaatggcggatcgttttactcccggaactggagccggttgtacgtttgttggatccggaagggaatcggattcctcatttttatatttatgatacttattcggctgagctggccaggctgagagctgaaataaaacaaaagagctttcaaggggcagaagaacgggaattagaagcgttgtatgtacaaagtgtggttttggaagacaaggtacgcgaagagttgtctgtgcagttgagaccttatcacgacgatttgaaacaggctttggaagcggtcggattgctggatgtcgtattggcaaaagccagacaagcaataaaaggacaattgactttaccgcaaattccggaagagggggaaatggtgttcgaaggtcttttccatcctcagatccgggagattttagaacaggaaggaagagcgtttcagactgtagatttgaaattggaaaagggagcgacggtgattaccggagccaatatggccggaaagacagtgttgttgaaaagtgtgcaactggcgcaatacctgatgcagttcggtttttatgtacctgcccggcgggcgggtatgccgctcgtggaacaagtcttgaccagtatcggggatgatcaggatgaattgaacggtctctcttcttatgcggctgagatgttgcgggtggatgaaatgatccggcaagtcaggcagcgaagtaaaattttggtgctgatagacgaattggcccggacgaccaatcccgtcgagggacgggcaattgtgaatggggtagtggattttttgactactcaccgggtgatggctatggtcactacccattatagcggaataacggccgagtgccgtaaattgagagtgcggggattcgtagagaatcggattgaagggaatataaccctgaaaaatatcaatgagtttatcgattattcactcgaagaagacagcggaaaagaagtcccccaggaggcgatgcgtattgcctggatgctgggggtcgaccgtggagtgttggaacgggtggaaaattatttgcaggaagaaaatcctgatcggaaaaagacagtacagtagaaaggaaatatatatgaaaagtaaattaggaatagattttgataaagtcggacatgcccgtgaaatagcccgtaagattgctgaccaggtgcaggattttgtggatggctatacgacagtggctgtcgaaaggacattgtgtcgtttgctgggtatcgacggagtggatgttcatgctgtccctctgccgaacatcctggtagacgagctgaaagaaaagaacgtgttgggagaaggaattttattctttctgggtaatgtaatggtggaaaccggaatgactccgcaggaaatagccgaacaagtagctgccgggaaagtagatgtcacccgggtaccggtatgtactcccggccagcgggaaaaagcgctgcaaccctatatcgaggccagtatccggcggatttccgacaaccggaaacggcgtgagaattatatcgcaacgatcggagagggagcaaagccttatctttatgtaattgtcgctaccggtaatatttacgaagacgtggtacaggcacaggcggctgcccggcaaggggcggatgtcattgctgtgatccgtacaacagggcaaagtttgttggattatgtaccctatggggctacgacagaaggattcggcggaacttttgccacccaggaaaattttcggattatgcggaaagctttggatgaggtcggagaagaagtcggtcgttatatccggttgtgtaactattgttccggtttatgtatgccggagattgctgtgatgggagctctggaagggctggatgtgatgttgaacgatgcattgtatggcattttattccgggatatcaatatgcagcggacgttggtcgaccagtttatgtcgcgggtgatcaacggctttgccggagtgattatcaacacaggcgaagataactacctgactactgccgacgctgttgaagaagcacatactgttttggcttccgatctgatcaatgaacaattggctttgttggccggactaccggaagaacaaatgggcttgggacatgcttttgaaatggatcccatgctggaaaacggctttttgtacgaattggctcaggcccagatgacccgggaaatttttccgaaggctactttgaaatatatgcctccgacgaaatttatgaccggaaatattttccgcggacatattcaggatgctcttttcaatatgatcggaatctggacttcacaaggtattcaactattgggaatgccgaccgaagccatacatactccatttatgtcggatcgttatctgtcgatcgagaatgcccgttatatttttaataatatgaaaaatatcggagatgaagtagtctttaaagaaaacgggattatacaaaacagggcgaaagaagtgttggataaagctaccgttctcttggaaaagattgaacgggaaggactttttacagccttggaaaaaggaatttttgccgatatcaagcgtcccaaaaacggaggaaaaggattggacggcgtttgtgccaagggaaagaactatagcaatccttttgtagagatcatgatgaacagataacaaaaatcgtaaatcaaataaagattatgagcggaggtttatattcaacagaagggagagatttcgatcaaaccctcgatctgaaaaagataaaaccctacggggatacgatgaatgacggaaagacacagctgagtttcactttacctgtacctgccggagatgaagcgatagaggctgctaaacagttgatgaaaaaaatgggatttgaaaatcctcaggtggtgtttcatcaggaactgacgaaaggatatactttttttaattgttatggaagttgtgtacacacggtagattatagtaatatctatgtgccgaaagtggaatcgaccaagtgggatatgggagagaccgatcagtttgtccgggaacatatcggtcggaaaattgtggtgatcggagctagtaccgggacagatgcccatacggtgggaatcgacgctattatgaatatgaaaggttttgccggacattatggtttggaacggtatgaaatgttcgaagccttgaatatgggtagccaggtgaccaacgaggaatttatcgctaaggctatcgaattgaaagccgatgctttattggtttcgcagaccgtgactcagaaagatattcatattaaaaatctgacggaacttgtggagatgttggaagccgaaggattacgggacaaagtgatcctggcttgtggtggtccccggatttcacatgagttggcgaaagaattggggtacgatgccggcttcgggatgaatacctatgccgacgatgtcgcctcgtttattgcgcaggaattggatcgaagaatgaatcattgaaaatatacaagctatggaaaaagaacaaatcagggaagtgattgccaggagagtggcaatggaactccacgatggagacgtggtgaatctgggtatcggtttgccgactttagtgccgaattatctgcctgaaggtgtcgaggttatcttacaaacggagaatggattgatcggtatggggccaactcctgctccgggagaagaagatccggacttgatcaatgccggcggtggagcgataacggctctgcccggagcggccagcttcgatagtgctacttcgttcggtattatccggggcggacacgtagatgtcagtatcctgggggccttgcaagtagatgaaaaaggagatttagccaactggatgataccggggaaaaaaacaccgggaatgggaggagcgatggacctgctgatgggagccggtaaggtgatcctggccatggaacatacggcaaaaggaaatccgaaaatcctgaaaaaatgtactttacctttgacagccaagggacaggtgaatatgatcgttacagaaatgggagttatggagatcacatccgggggaattgtactgaaagagatacatcctgagtttacggtagaacaggtgcaggcagctacagaagcaactctgatcgttgccccggatttaaaaaagatgtgctgaacgacgaaagcgtattgaaggaaatcacgatggaggatggatggtggatacctctagcccgaatcgtaaactataaattaaaaaaggtatggatttttcattatcaaaaaaagagatattgtttcagcagatgatcagagcatttgctgagaaagaagtaaaaccgctggcggcagaagtggacgaagaagagagattccctgtcgaaacggtagaaaaaatggcgaaactggggattatgggtattcctttcccggtggaatatggtggagccggtggtgataacgtattgtattctatggctgtagaggaattgtcccgggtatgtgcgacgaccggagttattgtttctgcccatacctctttgtgtgcttctccgatctatgaattcggaaatgaagaacaacggaaaaaatatttacctaaattatgttcgggagaatggataggagcttttggtttgaccgaaccgaatgcaggtaccgatgcctctgcccagcagacgatggctgttgctgaagaggatcactatgtgcttaacgggtccaaaatatttattacgaatgcagcttatgcacacgtttacatcgttatggcgatgaccgataagtcgcagggtacacgaggaatctctgcttttatcgttgaacgggatttcccgggattttccatcggtaaaaaagagaaaaagatggggatccggggatctgcaacctgtgagttgatttttgaaaattgtattgtgcctaaagaaaatatgctgggtaaaccgggtgaaggatttaaaattgcgatgaagacgctcgatggcggacgtatgggaattgcttcacaggccttgggaattgctcagggagccatggatgagacaataaaatatgtgaaagaacggaaacagttcggacgctctatcggacaatttcagaatacccaatttcagttggccgatttaaatgccaagatcgaagctgcccgtttgttggtgcggacggctgcctggaagaaagacaggaaaatcccttattctgtcgattcggcacgggctaagttatttgctgctgaaacagcgatggaagtgacgacaaaagccgtacagttccacggggggtatggatatacccgtgagtatccggtcgaacggatgatgagagatgccaagattacggagatttatgagggaacctctgaagtacagcggatggtgattgctgctgctctattgaaataataatgttttccgcattgaacttataaaaagagaacacatgaaaatagtagtttgtataaaacaagtacctgatacgacagagatcaaactcgatccggtaacaggaacaatgatacgggatggtgtacctagtattatgaatcccgacgataaaggaggattagaaatggctttggccttgaaagataaatatggtgcacatgtaaccgttattacgatgggaccgcctcaggccgacgacattttgcgtgaagcttttgccatgggagccgaccgggcgattcatttgagcgaccgtaagtttgccggtgcagatacattggctacgtctaatgctattgccggtgctttacggatgctggatttcgacctggtcattaccggccggcaggcgatcgatggagatacggcgcaggtaggacctcagattgccgagcatctcgatttgccacaagtgacgtatgtcgagcatctggaattcgatggtgacaagttgtttacgatccgtaaatctaccgaagaaggatatcaaaccgtacaggtggaatctccctgtgtcgttactgttctggctacggcaaacaaggcgcgctatatgtctgtgcggggaatcgtagaggcatacgatcgggaagtggaaatctggaattttaataatatcagtgtggatgaagctaaattgggattgaacggttcgccgacgcgggtatggaagtcttttaccaaaggagctaaagcagctggaaaagttttcgaagtggaaccgaccgaaggggtagatattattatcgaaaaattgaaagagaaatttattatttaatacatgattttagaggaaaaccgggaataatccggtgaaatctaaagtttaaaatctgatgaaaatggataaatctcaatataaagacgtttatgtattcgtagagcaacgggaaggagttattcagaaagttgccatcgaattattggggaaagcccgggagttggccgatagcctgaatgaaaaagtggtggcgatgttgttgggttatgaagtggcggatcaggcacaggaattgatcgcttatggggccgatgtcgtattgtgtgctgacgaacgggagctggtacaatataataccgagccttacgctcaggcgattacacagattgtacatgagcgtaaacccagtatcgtactgattggtgcgacgacgatcggccgggatttgggccctcgtttatccgcccgtttagagactgggttgacagccgattgtacaggcctcgctatctcggatgaacgggatttgctgatgacccgtcctgcattcggaggaaatctgatggcgacgattatttgtaaagaacaccggccgcaaatgtcgaccgtacgtccgggagtgatgcgcacgaaaccgaaagatgaacaacgtgccggaacggtagagaaggtgaatattcatttcgataagtcgaaatttaaagtgcggattctcgagacggtgaaagagcaaaagaaccgtatcgatataacagaagcgaagattctcgtatccggaggccgtggtgttggtaatacggagggatttgagatgctcggaaaattagcggaaacgctgaatgccgaggtttcttcttcacgtgccatggtggatgccggggttatgcctcatgaccgtcaggttggccaaaccgggaaaaccgttcgtcccgatctgtatttcgctatgggtatttccggagctattcagcatttggccggaatggaggaatcggaatttatcgttgccgtgaacaaggataaatatgctccgatttttaacgttgccgacctgggaattgtcggggatgtgaagcagatcgttccgttgctgaccgagaggttggcaaacatccggaaaactgacaaataaaagcccggacatggagtatcaaaaattaatgctggaaaaacaagatcgtgtttgtctggtaaagatcaatcatccggaggcattgaatgcattgaatacggtgatcttgcaggaattggaccgggcattcgatgaaattgcagccgatccggaaaccgatgtggttattctgacaggcgaaggacgttcgtttgttgcgggagccgatattgctgaaatgagtgtgatgaaggccgaagaaggccggcgtttcggtgagttaggagctgctgttttccggaaaatcgaactgatggctaagccggttattgctgccgtgaatggatttgctttagggggaggatgtgaactggcgatggcttgtgatatccgtatcgcctcggctaaggcgaagttcggtcagccggaagtgggacttgggattacgccgggattttccggtacccagcgtttaccgcgtttagtcggattaggtaaagccaaagagttgatttatacggctgcggttatccatgccgaggaagcttgccggatcggactggtgaacaaagtggtggaaccggaagaattgatgaacgagtgtatggctatggcaaagactattgctgctaaagcgccgttggcggtccgttatgccaaagaagccatcaaccggggagtggaaacggatatggataccggtatcgtcatcgaaaacggtttgttcgggttgtgtttcgcaacgaccgaccagaaggaaggcatggaagcttttttatggaaacgtaaacccgaatttaaaaggaattaaaatctttgtaatttaaatttatcgattatgaaaatatgcattgttggaacagggactatgggacatggtattgcccaggtatttgcccaggccggacatgaggtattgttaaaaggtcgttctgaagcttctttggcaaaagctcacaaagctatggataaaaatctttccagaatggtggaaaaaggtaaattggaagccggggttaaagatcaggtattggccagaattaaagatacgatgaaatatgaggattgtgccgatgctgatttggtgatcgaagcgattgctgaagatatggctaccaagcatgagatattcaaattgttggacggaatttgtaaaccggaagcgatattggcaaccaatacttcttcgctttctataacggaagtggccgctgtgactaaccgtccggaaaaggtgatcggtatgcatttcttcaatcctgttccggctatgaaactggtggaagtgatcaaaggtcggctgacttcggcagaggtacatgatcaggtatttgctttatcgcaggaaatcgggaaagtgcccgtcagtgtcgaggaagctcctggatttatagtcaaccggattctgatccctctggtgaacgaaggcatcggtatattagctgacggagtggcgaaaaaagaggaaatcgatgccgctatgaaattaggggctaaccatcctatgggaccattggagctgggtgatttgatcggattggatgtttgtctggctattatggaagtgttgtaccgggaattcggtgactccaaataccggcctcatcctttgttgcggaaaatggttcgtgctaacttattgggacggaagaccggagtcgggttttatgattatcggaaataatgaggagagtcttctttaccgggatacgatgctggggaatatttccccagcatttttactttttccccactttctacaacctacgattcttaatttgttgtgtgtgatatattgataattagagtattatgttggatttgtgcttgtggcatcggatttgtcctgtttaaggataaaatctaactctaaaaaataatagtatgaaaaagatcgtcattttaggaatcggagcttctatgttcttcctgggtagttgcgtagagagttctcagaaatataagtctttacaagcccgtctggattctttgagtacagtacatattatgcagaattccgaaatggagagtatgctggctgatttgaatgatatttctgccggaatgcaatcgttgcgggatgccgaacgtttattgactttggaaacaattaatgaaaataaagccaatagtaaatccaaacagcaattgaatcagctgaaaaaagacatacaggctgttaccgaagcgatcgcttcttataaaggacagatttccaaactcgaaggtaagaataaaagccagtcggccgagtttaagagattgattgccggcttaaatgcggaattggatcaacgtacacagaaactcaatgaaattactaagcaattggctgagaagaatcagcaattgacagtgaagaccgaggaagtcgctaatctgaccgagaatgtggaagctttggataaagccaataaaagtcagcaaatgacgatcaatgaacaggatatggctattcatcagggacactatttgattggaaaccgcaaggagctgaaagaagctgaggtaatttccagacaagggattttctgtccgccgatcgtatcgtcacaagcacaaaaagccaactttaccgatttggatatccgtgagatgaaggtgatcccgttgaatagtaagaaagcgaaattactttctgtccatccggctgattcctatactttggagaccggtgaagatggtaatatgaccctgaaaatcaatgacgaaaataatttctggaaacaaactaaatacttggttgtgatgattggataaaagcgggaataattttaactgaaagaggcatacccatcgggtatgtctcttttcttttttcacaacgattattcttgttgagagagaaaataatgaagtttctttgatttaaagacagttcgtttagaaaactagccgaagatcatcaggatttttaaaagtgtatccgatgagaaaatcgctttcaatttgtcgatgcttttgtatttcagtgttttaacactgcttactgagatgttcatttcctgtgctatttgctgattgtcgaggccttgaaaagcgagctgcatgacttgtttactacggggaggtaatttttcgatttccttgatgatctgtaaagctacatctgtttcgactataacattgaaaatgtccacttctttgagcgaacggctgttcacgaatttttcctgcaatttcagttttcttaaccattcgagagaaaggttatgtaccaacatgtacatataattatcgatgctttcgattttcttctctttggacactaattcccaaagccgtgcaaaagcctcctggacaatgtcctctgatgccgatttatcgttcaaaaaccggttggctgcaaaacataaaggagcatacaaccgattcattgtactggcaaattcatttggagaagaatttttaatcccttgttttgctgttgatttcatctttatttaacctgaaagtcgaaaacaaaggtaaaaaattgtaagaatcattcatctttttggtggacttattagtctttaatataaagtgtaattcgatataaaacaaattatgtgtcttgtacaagatcgtcaaaaattgattttgttgttgcaaaaagcttatttcgggcaactctctgaagaagaagccgggctgttggctgagtggcgtagtcggtcttcggaacatgaggtattgtatcgacggatcatgagcggagaaagcctggccgaactgcttgagtggcaaaatcatttcgatccggaacaagcgaatcggtcgattttgcatcgggttgaaaaacgtagatctgttcggatgaggaaaataggtttgcgggtagctgctatagttctcctgttgctgggaataggaacgatatggattataaatcgtcagggcgatgatagacggcaacaggaattggcttttacatcgattcacccaggaactccccaagctattcttactttggcggatggaaggcaagtggtattggataagaagccggtaaccttgaaattaaatgaaaaacaatttttgaccggagatagtgctatattgaattatgcggttaatctaccgaatggttgggaaaataatggacagcaaacattaatgcataaggtggaagttccggttggtggtgaatatcggttagtgcttgccgatggtactaaagtctggatcaatgctgaaagttctttacaatatccgggagagtttactgctgaacggcgaacagtaattttacaaggtgaagcctattttgaagtcgtttcggatacgctgaaaccttttatggtgaaaacgcctgccggtttggaagtgaaagttaccggtacgcatttcaatgtagaggcatatgccgatcgtagaacatggaaaaccactttagtagaaggaggggtggaagtccggcttggaaaatatcaagcccatctgcgaccgaatgaacaattcagttttgatcaggaaaccaatcagggaagcttgaaaaaagtaaatgtcagggaggttatcgcctggaaaaatggctggttcgtttttgataatactcctttggaagaaatcatggagacaatacgacgatggtataatatcgaagtagaatatcgggatgctgagacgaaacaattgtgcttcacgggtgatctgagtaaatatgattcttttgaaacggtgatccgtatgtttgaagatactaagaaagttaagttaaaagtgcaagccggccggttgatcatagaaaaatactaattcataggaataaattataaaatatacctaaaaatagggatttctcaacttcgggtatcccgttatttttggacctgctaaaagggtcgattcattttgcggatttccgcgaaaacaacggacaggtggtgattgaaaataaacaattattaactaaaacagtaaacatgaaagtgatgtgttatttcaaacaaggaaccatatcccggatgttattcagagggatgttgtttgcattgttggctgtatgttacccggaatattcccgggctgttattgctgaggatcatcaggcgaatcggttgattacgctttctatgaagaatatctctgtggctgatattatcggacaaatccggaaaacgacagattatcgtttcttatttcaggtcgatgacctgaagggagtccggaaagaggttttcgaggtttctgaagcgactatccgggaagcgatggataaattggtggcaggaacatcactgacttatactttacgtcaggacggagtggtcgttttatctcaaacacaacctcaatccagggaatttaccgtttcggggtttgtactcgaggctgaaacccggaaaccgataccttatgccactgtttttattccggatttactgatcggtacttctgcccgggaagacggggcattcacgctcaatcaggtacgcccgggaaaattgaaacttgaagttcgttatatggggcggatcagtctggatacggttattcaggtgaatgcgaatgtaagggatctccgtttttatttgcaggaagaaaatttcagattgaatgaagtacacattacggcggagaacagcaaagccggacaagctacctcctctaagatttcccgtttggccatggatcatatgcaggcaagcagcctgggggatgtgatgcagttattgccgggtgggttagcgaccaatccgaacctagggtatgcttctcaattgaatctccgtatgatttccgagaatgcttccggcataccgggattgacggatggagaagaggaagctgccaatatgaatagtttagggactctgattatccgggatggggctcctgtttccaataatgccaatctacagactgtaagtcctgctatcacaggtgccgggaccgctttgggcggaacatcttcaccggccggaggtgtcgatgtccgggctatctcgacagacaatatcgaatccatcgaggtgattcggggaataccttctgtcgaatacggagatttgacttcgggagctgtcattatcaattcgaaagccggccgggaacccttccgcttacggtttaaaaccaacgaaaacatttatcaggtatcggctggaaaggggtttaatctgggagggaagaaaggaagcctgaatatcagtggggattacgcctataatgtgacggatcctatgcaatcctatgtttattatcagaggggagctgcaaaagtgatgtattcgaatatattcctacatgatgttctccgttccaatacttcggtagagttgatatatggggataataaacggaaacaaaatccggatgatgaacggcttcaactgaagagcaacggacgggatatcggtatttcgttcaatacaaacggaatttttgacctggattacggctggctgaaaaatcttcgctatacattggcagtaaattatatgaataagaagagttatgaacaaagattattgacgaatgcaacgtatcaatattcgatgacgacgaccgacggtgcaattctgagcaatcggcccggtgtcgatttgtatgacgatcagggaaataaactgaccaatattcctgtcggcgaagagacgctttatgccaatatgttacccaacgattatcttacccgttatgatatcgaagggaaagagttgaatgtgtttgctaaagtgatggccaattttgtcaagcaaggcaaccggatcaataaccggatattagtcggagcggattttaaaagcgatggaaacaatggagatggaaagactttcgatccggcgacacctccataccgggtaaataccagtctgtattcttctttccgcccgcggaaatacagtgatattccgtttataaaccaactgggagtatatgcggaggaaaatttcagactgaattttgccaggcggaacctgaatatacaattcggtgtacggtatgataaattgttcggacaccaggacatctggacgccccgtttgaatgcttctttagacatattaccaaagatatttacgttgagaggaggatacggagaaacagctaaaatgcctactgtactttatttacatccggagaaggcctatttcgagatggtcaactttttgagtctgacggatgacaagattcccgaagctcaacggttgatgatgacgacaacccgggttttcgatacggaaaacaaagacctggaaattgctaaaaaccggaaagcagaagtcgggttcgatttgaatatcaaaggagtgaggctggcagtcaccgcttttcaggaacacatgaataacggttattcgatggcttacttgccgactacttttaaatccgttgaaaacaaacaatacaaaagcggggaattacctgccgatggagtgactgctcctgcgctgatcgaaaaggggacttaccgggtattgatgaaatatatgactcctcagaataacattacaatcaatacgcggggactggaattcgatctgaatctcggacggttcgatgcgattcgtaccgctttttcggtcaatggcgcctggttacggacagaacggttcaataatggttatacctattatgaaaaaggctccgaagatccggccaaagctcctcatgtggggatttatgaagccgctatgcggaaaaattattcagaaagaatggcgacgactttccgggtgacccacaatattcctgatatcgggtttgtggtgacattgtctgctcaggtattgtggaaagaggccaactggagtcgtttcggaaatgattcgatcccagttagttatatctcgaaagaagacgggcaggtatatcctttcgatccggcgaaaaaagaggatgctgagttttccgctatcatgaggacagttaaccagaaagaccgaatccgggaatccatgcctccgacactctgtatgaatttgtatctgacgaaggaaatcaaagactacctaagggtatcgttttttgcgaacaacatgttcagcagtcgtccgctatacaaacaaaaacggacgatcggttcctatgaaagaagaaatattccgttattcttcgggttggaactatcggctatcatcaattag

SEQ ID NO: 148 - DNA, 25675 bp, unidentified
  source 1..25675: mol_type = unassigned DNA
tccacctcgccggtacttaagttacgctggaagttcttcatatcatcgtcggcattccacaggcaccattctacataagagaatacggacagcttcttgtcctcggagcttccgttggtcagagtcagctgggagatctcacagttatcattcagaggaacgaaagagagcacggaagccttaacaccgttcttggaagaggtgaaacggctgtaaccgataccgtgacggcactcgtaagaatccagttcggtcttcgtaggctgccagccgggattccatacggtatctccatccttaatatacagatatttgccgttgatgtctgtcggtacattattgtaacgataacgggtcagacgcagcagtttggcatccttatagaaggtatatccgccgcaggtgttggatatcagactgaaaaactcgttgcaacccaggtagttgatccagggaagcggagtcttgggagtagtgatgacatattcttgatgcacatcatcaaaatgaccatacttcataagaaaatctccttctttcatgttgttgtatgttgagtgtttgctttttcgctgcggactgcttaatgttcagtaaacgattaagtaatccggaattctgatttgtattatacagaagcagtgctgaaaatgcaatacgaatcttgaaaaagcctgtaaaatgcgcaatatatacaaatacgcaagaaaaacatggacagaagatacaaaacaaaacggatcttgaaaaaagcggatttacgaaacgaaatagtagcaaacgttatcgcatacttttccattatatagaagaaacccaatcgctgtacaagccaaatgtacaaaaacacctattagaaattgttaattatagacaaagtggatactttttagaaaaaaactgcaaaaaagtattgcaaaatgctcaaagttgttatatattaaaactacgaaaacgattaagttacaaaacaggtcggatgaaatgacgaagacatgaaacaggagaacggtatggcatcattgaaagacatttccaagatttgtggagtctccgttgcaactgtcagcaaggcactgaacgaccacaaggacattggagaagaaaccaaagcaaatatcagacgggtagccaaggagatgggatattccccgaacctttccgccagagcactgaagacgaacagaacttatggaataggagtcctcttcgtagatgaagcacaaagcggtctgacccatgattacttttccagtgtactggacagcttcaaaaggacagcagagaagagcggttacgacattacctttattaacagctgcaagaaccgtccggatcggatgtcctacctggaacacagcaggtacagaggctttgacggagtggtgctcgcctgtatcgatttcgcagatcccgaagtcatcgaattagtacagagttccatcccggtagttactattgactatctgtttaataatcgtatcgcaatcatgtcggacaatgtgacaggtatgaaagaactgctggaatacatatatagtagaggacataggaaaattgcctatatccacggcgcaatgtcagcggttacctcggggcggttatccagcttctaccggacggcagaacgactggggctacagattcccgatgagtacatcagagaagcagcttacagagatactgccacgacctatcgtgtgactaacgaattactggatcttccggatccaccgacatgtatcatttatccggatgactttgcttctttcggaggcatcaatgctatcagggagagggggttacagattcccgaagatatctcggtggcaggatatgatgggattcagtccgcaagacagctggagcccaggctgaccacagtccagcaggataccgaacagatcggttgcctggcagccagagaactgatcagcctcatagagagacctaagaccaccattatcgaacaggtcatagtacccggtaaggtagtggaaggcaagtcggtagcacagattccgacagacaaataatcaggcatttatatggaagcgccgcaaccgcaaccatatgaagataaatgcaacaagcacttacaacaaacattcaacaaaaaatgggaggaaacaaacatgaagaaaaaagtacttagtgctttacttacaaccgctatgcttgccagcatgctggtaggctgtggcaacagcaacgatgctcctgcagtagcttctagtgaggcagcacccgcagcatccaccgaagcagcagcttctaccgaggtagcttctacggaggcagcaacagaggaaggcaaagtcttcaacatctactgctggaacgaggagttcaagagccgtctgacagatcattatcccggatatgaagaagtagatggaaccaccggtaagatcggtgacatcactgtaaagtggaacatcactccttctgatgacaacgcttatcagaacaatctggatgcaacactgttaaagcaggctgatgcagcagctgatgacaagatcgacttgttcctggttgaggctgactacgcattgaaatatgttgataccgactacacaatgcctgttaaggatctgggcatcaccgatgcagatctggctaaccagtatcagtacaccaaggatgttgttaccgactccaacggcaatctgaagggtgtttcatggcagggctgccccggcgttctgatttataaccgtgaagctgctaaggctgttctgggaaccgatgatcctgcagaggttcagaagtctgtatctgattgggataccttcaccgcaaccgctgagaagatgaaagcagccggttacaacatggtatcttccgtaaacgatacttatcgtgtatactccaacaacgtatccggcaaatgggtacaggatggcaagatcgtaatcgatgacaacctgatgaagtgggttgatgactccaagaagatggttgacgctaaggaaaccggtaccttcgatctgtggtctgatgactggagcaaaggcttctatcccgatggcaaagtattctgctactttggacccgcttggctgatcaacttctccatggcagctgataccgatggatctatcgcaaatcagggtggctggggcgctactgaaggacctcagggcttcttctggggcggtacttggatctgcggtgctaccggaaccgacaacgcttctctggttaaggatatcatcctgaagatgaccactgatgaagacatcatgaaagagatcgttgtagctgatgatgatttcgtaaacaacaaacccgctatggaagctatggcagcagatacctcttatcagagcaaggtactgggcggacagaaccctctggctatgttctgcgcaggcgctgagaagatcgatctgagcaacctgtctgcatacgatcagggatgtaacgaagagttccagcatgctatgaagaactacttcgatggcaaggcttctctggatgatgcactgaatctgttctacaaggctgtagaagagaagtatcctgagcttactcactaatccgaaatgataagcgaatagcgaaacaataaggaattgagaaccgtgcctgcctggctggtcaggtaggcacggtttttctctcaaaattcccggttggcagaagcttttttcagaagaagataattaagaacaaaaagaagagagctgctgcgagcctgatcggaaacaaagaaaggcacgaaaaacgtaaagtcgctaagagagcatgacggcaaaagggaggaatcattatggcaaaggtaaaacgcggaaaggtggtacgctataataagtgggggtatattttcctgatcccctttgtagtagtgtatgtattattccagttgatcccgttgttcaggacattttattacagcttttttgaaaattaccgttccggactgacacagatcggaccgaatttcatcggatttggtaactatgcaaagctgttgtccaatccggacctgtggatgtacaccaagaatacattgatcatgtggatactgggatttgtaccgcagatcatcatatctctgcttctgggtgcatggttctcggatcccagccttagattaaagggacagagattcttcaagacagtgatctatctgccgaacctgatcatggcttccgcatttgcaatgttgttcttcacgctgttttctgatggtggtcctatcaatgaaatgctgatgcagatcggaatcttaaaagagccatatcagttccttacaaacgtatggagtaccagaggtctggtagcattgatgaacttcctgatgtggtttggtaatacaacgatcctcctgatggcaggtatgatgggtatcgatacttccctcttcgaggcagccgaggtagacggagcaacctctacccaggtattcttcaagattacattacctttgttgaagccgattctgatctacgtaatgatcacatccctgatcggtggtctgcagatgttcgatgtacctcagattctgaccaacggtaagggcgatcctatgagatccagcatgaccctgatcatgtacctgaacaaccatttgtacagtaagaactacggaatgagtggtgcgttgtctgtaatgttgttcattatcacaggtatcctgagcttgatcgtatttaagttctcgaacggcaaacaggataagtaggaggtggcagaaatgttgagcgtagaaacaaacgagacaaaaaaaggtctgggcattcatgccagaagagcacttgcatatatcgtactggttattatgagttttctctgcctgttctggttctatatactgtttgtaaatgcaaccagatccaaaggtgagctgacacagggatttaccctgctgcccagcacacatctgatccagaactggaagggtgtcatggcaggaaccctgccggtagtcagaggtatgatcaacagccttgtagtagcaacctgcagtgcagtgctgtgtacctacttctctaccatgaccgcatatgcgatccatgtatatgattttaagttaaagaagttcatgtttacctttatcctggcaatcatgaccattcctacccaggttaccgcactcggatttatccagttggtagctgatatgaagctggaggataactttatccccctgatcatcccggcaatcgcagcacctgctactttcttctatatgaagcagtacatggaaagtgcattgcccttgtctctggtagaggcagccagaatcgatggttccggtgagttccgtacatttaattccatcgtattgccgctgatgaagccggcaatcgcagtacaggcgatcttcactttcgtagcgaactggaataactacttcacaccggcactggttctgcatgatgacaagatgaagacattacctatcctgatcgctcagctgcgttccgcagacttcctgaagtttgatatgggtcaggtgtatgtaacgattgcattctctatcttccctgttatcatcgtatacctgttcctttccaagtacattgtccagggcgtggcaatgggaagcgtcaagggttaatatttcgccagcaacattcaatacataaatctctcctgaaaagcggcactcttccccggagtggcgcttttcgcttgcaaaaaaacggggaaacaggtataaaataaagataagggtgaacatgtattttggatgaaaatgtcagatacagcggtaaaggacattcgtatagaaacggaagaaagaggtaattgccatgcagatgtatgaggtgacagcgctggcaccggaaggaccggaggaagtctatcaggcgatggtgtttgcagaggatgaagatgatgccttgaaccagctggaggaacagctgaaagagcagaagattgcgcatggaatgtgcatggcggaagaagtgtgaaaagaacttctaatcactcagagcaaaggctctttcgtgaagaagttctatgtttcacacgcaaatttgtgccaatggcacaaaatttgtaatcaatgggaggatgtcgatatcagcatggaaaactcatatcgtttttttgagaacagagattgtaaatatttcccttgccacaagggccttacggagtttaactgcctgttctgttactgccccatgtaccgcatggagcactgcccggggaatccccggtattttgagaagaacggcagacggatcaaggactgctcaggctgcaccttcccgcatgatccggagcactatgatacgattatgcagatcctgcgggagacgtaacacatttttctggaaaataaacatatattctgcacatttttctaaaacgaaaagccgatagtctgttttcacagattatcggctttttatgcgcggagacggtgggatttgaacccacgtgcccgagaagggctaacgcatttcgagtgcgccccgttatgaccacttcgatacgtctccaaaagattacaacgtaaattattttatctgaaaaatgccggtttggcaaggggagaaacgaaaaaaccttttgtaatgagattgttactgcctacgtgataataaggttgaaagcggtagttataaaaaagatgttgacagaacaacatctaagtagtatattgcaaataaatactttgataatcaaagtattcgcagggcaatgctgtacgatatagcgaagccaaagcaattgtgccgaagagaacaaagcggcaaagacagaatattaaaaaagaatgcataaggagagtaaaaacatgttagagaaagtagcagctatcatcagagaacagttaaaccaggagaatgtagaaatcacggaggcgacccgttttaaggaggatctggaagtggactccctggatctgtttgaactggtaatggcatttgaagaggaatatggtgtgtccattccttccgaggaattggaaaatatggcaacagtaggtgatgttatcagatatattcaggagcaggcgtaaggactgcatatctgccctcatgtgggcttagaccttttggccctggtatcatcagaatatgtaatataacgcagaacgacgagaaggatcagaaagacaatgaaaacaaagatcacggaacttctacaaatcgaatatcccattttccagggcggcatggcatgggtggcggaacataagctggcggcagcggtatcgaatgccggaggcttaggcatcatcggtgccgcttccgctccgcctgaggtcgtccgggaggaaatccgcaaatgtaaagagctgaccgacaagcccttcggcgtgaatatcatgctgctcaatcccaatgcggaggaagtagcaaagatcgttgtggaagaaggagtacaagcggtaacgacaggtgcgggaaatcccggaaaattcatggatctgtggaaaaatgccggagtgaaggtcatcccggtggtggcaagtgtagctatggcgaagatgatggagcgggcaggagcagacgccgtagtggcggaaggtatggagagcggcggacatatcggttctaccacaaccatggcactggtgccgcaggtggtggatgcggtgtctatcccggtgatcgcagccggaggtatcgccgatggcagaggcatggcggcggcatttatgctgggggccgagggaatccagatgggaacccggttcgtagcatcgaaggaatctattgtccatgaaaattataagaatcagatcatcaaggcaaaggatatcgattccgtggtcacgggaatgtctaccggacatccggtgcgttccctgcgcaatcagatgaccagagaatatctgaagctggaaaaagaaaatgcagacttcatggagttggaaaagctgacgttgggatctctcaggaaggcagtgcaggacggagataccgtaaacggaaccctgatggctgggcagatcgcaggactgatccgcagagaacagacctgccgtgagattattgaagaaacagtgcagcaggctcaggagtgcatagcggcacaaggacagcataaataaaatatagcgacaggtaaccgctgacaacagatttcgaacagcgacaggcaacgtagttatatggaaaacggtgcattataaaaaatgtgctgtaaccgaggagaacaatagcatcacatagtaataggagatgacaaaatgagcaaaatcgcatatttattcccgggacagggatcccagtacataggaatgggaaaagaattccatgatacttacccggaagcacaggcggtatggaagctggcggacaaggtacttcagaatctgtactggcaggataagcgggaaaagcaggcggatagcggacatccgtactctatggagcagctgacctttgaagaaaatccttatatcaacattacggaatatacgcagatcgccatgctgaccatggaagtggctattctgaaagtattggaggcaaaaggactgaaagcggagatggcagcaggcttaagcctgggagaatatggggcgctggctgccgctggtgtgatggaattgccggatctgttccgtatcatccggatgcgtggtatctatatgcaggaggcctatccggaaggtggagccatgacagcagtattagggctggacggagatgctgtggcagcaatctgcgaacagacagcaaaagaaaccggcaaagtcgtctccgtggcaaattataactgcccgggacagatcgtgatcaccggagaggcagatgcagtagaggcggcatcagaagcgctgaaagaaacaggtgcaaaacgctgtatccccttaaaggtcagcggaccgttccactcagccctgttaaaaaatgcaggagaacaattggcagaagaactgaaaagcgtcaagctgtcaaccccttggatcccttatgtgtcaaacgtaacagcagattacgtgacagatgcgtcacaggttgcggaactgctgaaacaacaggtatccagtcccgtacagttcactcagagcatagagcgcatgatcgcggatggcgtggacacgttcatagagatcggcccggggaagacactcacaagcttcgtccgtaaaattgacaggaatgtcaaagtatacaatatcgagaaaccggaggatctggaccgggtgatggaggaactggcatgctgacaggaaaaagtctgacaggacaagttgctattgtcacaggggcatcacggggcattggaaaagcagttgcacaggcactggcagcagaaggagccacggtgatcattaattataacggctctgcagaggcggcggaagcggtggcggcggacatccgaagctgcggcggcatggcggaggctgcgaagtgcaatgttgcggattttgcagagagtgaagcctttgtaaaggcagtaacagagaaatacggcagagttgacatccttgtcaataacgccgggatcacgcgggacaatctgatcgtgcggatgacggaagaagaattcaatgctgtgctggacacgaatctaaagggcgcatttcacatgatccggcatctgacgaagacctttatgaagcagagatatgggaaaatcatcaatatctcttctgtcagtggcatcgtcgggaatgccgggcaggctaattattccgcatccaaggcggggctgatcggtctgacgaaaagtgtagcgagagaactggcatcccggaatgtctgtgtgaatgccgtggcacccggatttatccggacagatatgacagacaagctgccggaggcggtacaggataatgcggtcggacagatcccgcttaagaaaatgggaagaccggaggatgtcgcacaggcggttctgttcctggcaggagatgcctcggactatatcaccggccaggtgctgtgtgtagacggcggtatggcaatgtaaaaataagtccggcaacaggaaagcggaatagaaaatatgtccgctaacgatacagcaggatagaaaataagtcaggacgcgagggagtatatcacgtatgggtaaaaatagaagagttgtagtaacaggcatgggagccatcactcccattggcaacagcgtagaggaattctggaatggtatcaaagagggcaagaccggattcggttccatcacctattttgatactgcggattaccgctgtaagctggcggcggaagtgaagaattttgatcctgcacaatatatggacaaaaaatctgcccgcagaatggagcagttctgtcagttcgcagtagcagctgccggacaggcaattgcagatgcaggtcttgctatggaacaggaagatccatatatggtgggctgcagcgtaggcagtggtattggaagcttacaggccatggaacgggaatatgaccgcctgaaggaaaaaggtcccggcagggtaggacccatgctggtgcctctgatgatctccaacatggcagcaggtaatgtcagcattgcctatgggctgaagggcaagagtctgaatgtggttactgcctgcgcaaccggtacacattccatcggagaagcatatcgtacgatccagtacggtgatgcagacgtgatggtagccggaggaacggaaagctctattactcccatcggcattgccggattttccgcactgacagcattgtcgtttagtgaagatcctcagagagcttctattcccttcgataaagaccgcaatggtttcgttatgggagaaggctcggcggtagtggtactggaagagctggagcatgcaaagagacgcggagcgaagatctatgcggagctgatcggttatggctgttcttcggatgcttaccatattacatcccccgcggaggacggcagcggagcagccaccgccatgctgaacgccttaaaagacggcggtgtggcgccggaggagcttacttatattaatgcccatggaaccagcacccatcataatgacctgttcgagaccagagcgatcaagctggcatttggagaacatgcgtatgacctgaagatcaattccaccaaatccatggtagggcatcttttaggagcagcgggtgcagtggagtttgttacctgtgtaaaagaaattcaggaaggctatatccaccgcaccgtgggactgcgtgagacggaggaggaacttgatctgaattactgccgggacagctacgaagaagaggtgccctatgcactgaccaattcgttgggcttcggcggacataatgcgagtctgttgctaaagaagtacatagaataaccgcagcagatgttcaagacacaggatagaaggcagagcatcaacgaggacgattgcagaatgcgaggaagtagttgatacgacagcattcgcggaacggaggaataatgtcagtatataacacccaggaaatcatggagattctgccccacagacatccatttctgctgatcgatactatcgaggagctggagcccggtgtgcgggcagtgggacgaaaaaatgtgacctttaacgaaccgtattttgccggacattttccgggaaatccggtgatgccgggcgtgttgatcatggaagcactggcacagacaggggctgtagcaattctgtctctgccggagcatcgtggcaagaccgcttattttgccgggatcgataaggcaaaattcaagcagatggtgcgtcccggagacaccttggagctggagaccaccattatccgcagtaagggaccggtgggtgtcggggaagcaatcgccacggtaaacggaaaactggcggcgaaagcagaacttacctttgcagtaaaataaaaatagtctgcggaagttttttatgagtgggacagagagataagagtgacgcagaataagaggtgcaagtatgggaaatgtagatacagaaacagagatcaaatgcccgaaatgtaagaaaatgataaacagagactgggcagcgaaaaataaatatgtctgctatgagtgtggttattatttccgggtgaagacccacaaccggatccgcatggtggcagaccggaaaagctttcagccctggttcgaggagatagaagagagcaatccactgaactatgagggctatgaagaaaaactgtcggaggccagggaaaaatccggcacaaaagaagctgtgaccgtaggtgaatgcgagatctacggggaaaaggctgtgatcggcatctgcgaatccaaatttatgatgggcagtatgggtcatgtggtcggcgagaaagtcacccaggcaattgaaaaggcgacagaattgcggctgcctgtatttttgttctgctgttccggcggtgcgagaatgcaggagggaatcgtgtcgctgatgcagatggcaaaaacctccgcagcgatcaaacggcatggagaagcaggacttctctatgcgactattttgacggatcccaccacaggtggtgtcacggccagctttgccatgctgggagatgtgatcatggcggaaccgggagccttgatcggcttcgcaggaccgagggtcattaagcagactttgggacagcgcctccctgacggcttccagacagcggaatttttacaggagcatggttttgtggacggtatcgtccgtcgggagaatctgaagaagaccttatatttcctgatcacgacgcatcggtgcagtgaaggaaattatgcggattttaagaaaaatattgacttccattttgaacctacggaaatcgtgaaggaacggtcattcctgacactccccagaacagcatgggaaaaggtcaagaccgtccggagagcggacagaccggcagcgaccgactatattccctacattttcgattatgtagtggaagctcacggagaccgttattatggggatgataaagcgctggtaggtgcggtggcatttctggacgggcagccggtcacggtgctggcagatgtgaagggcaaggattttgcagagtgtgccagacgcaattacggaatgcccatgccggaggggtatcgtaaggcactgcgcctgatgaaacaggcggagaaattccaccgccccattatcagctttgtaaacacgccgggagccttctgcggtgtggaggcggaggagagaggccagggcgaggccattgcccggaatctgctggagatgtcagccttaaaagtaccggtattatgtatccttatcggagaaggcggcagcggtggggcgctggctacagcggtaggcaatgaggtatggatgatggaaaatgccacatactcgatcctgtctcccgaaggctttgcttctatattatggaaggatgctgaccgtgccagagaagccagtgaggtcatgaatattacatccgaggacctgaaacgtctcggtgtgatcgagcggatcgtaccggaatacggcggggcagaccaaagtaccgtggaggccatcggtgggtatctcaaggaacatatcaaggaattcctgcaaaaatataccggcatgaccggtgaacagattgcagaggaacgttatgaaaggttccgcaagtattaaagcggtaacgagaggtgatgtgggatgaagcacggaaaaatgatcctgggggaattacatgcagatattcccgtgatccaggggggtatgggtgtggggatcagcctgtccggtctggcgggagcagtggctgcggcaggtggaatcggcattatttctactgcccagatcggtttccgcgagccggattttgacagagatcccatcgcctgtaatctgcgtactatcggaaaagaaatagaaaaagcaagacagatcgcaagaggcggtatcgtcggtgccaacatcatggtggcaacacaacgctacgaggattatgtcagggcagcagtgctggcaggtaccgactgcattatctccggtgccggactgccgttagatctgcccggagtcgtggcagagacggaaagcggaatgcccgggcgaagccaccggacgatgctggctccgatcgtgtcgagcacccgtgccctgtcggtcgtcacaaaatactggatgaaaaaatacgacagaaagccggactttatcgtggcagagggaccgttggcgggcggacacctgggatttaagcgggaggaactggacgcttacacaccggagagctatgagagagaactgacggcaatgatccggcaggcggcagaactggaaattccactgatcgctgcaggcggtatttatgaccggagggatctggagcattgcctgtccctcggggctgcgggggtacagctgggaacccgttttgtgaccaccgaagagtgtgatgcggcagatgcatataagcaggcatatctcagcgcacggaaagaagacattgtcattgtgaaaagccctgtgggaatgccgggcagagctatacagaatgcttttctggaaaaggtggcggccggggagcggtttatgaccggatgcagacattgcattaagacctgcgatccgaagacagcaccgtattgcatcaccagagcattgatcaatgcggcaacgggagatgtggataacggactgctgttctgtggcagcaatgcctggagggcgcagaaaatagaaagaacagtggatatcatggaggaaatggcgtgaggaccataagaatcaccggaaccggaagtgcacttccgggaaggattgttacaaataaagaattggagcagatggtggaaacctcggatgaatggatccgagagagaaccggtattgctgaacgtcatgtgtctgtgggggagacggttgtgacacttgcgtcagaagcggcccacaaagcattggaacaggcaggaaaaactgcagaagaaatcgatctgattctggtggcaacctgttctccggagcagtatctgccctgctgtgcctgccaggtacaggcagctgtcggcgcggtgaatgctttggcttttgatgtgaatgctgcctgttccggatttttgtttgcactgaataccgcagatgcttatctgaggacaggattggcgaaaaatgccctgatcatcggcagtgaggtgctgtccaagctggtggactggacggatcggagcagctgtatcctgttcggagacggtgccggggcggtagttgtagagcgatgcagggcagagtcccgggcagtggaatacagtaacgctttgccggagacagagaaagggatgcaggagacggcggaggagaaacggataccggcagcaggcattctgggccgggcactgcactccgacggcaccggtggcggagtcctgcaatgcggagcgagagaactgacaaccccatatgtaaggacttcagcggcaaaaacagatcaaaaccagccgacggacgacagagagcattatattcagatggatggacaggaagtgtaccggttcgccaccagacgggtgccacagtgtatcgaggaagcattgtcagatgccggacttgctgtgccggatattgacctgttcgtattgcatcaggccaacgcacgtattattgatgcagtggcgaaaagactgcatgcagacagagacaaattccccaccaatctggaaagggtcggaaatatgtcctctgcctccatcccggtgcttctggacgaactgaacaggcagggaaagctgcaccgcggcgatcgtatcgttctggcgggattcggtgccgggcttacgattggggcttgcgtgatgacctggtagacggtatactgataacgactaaggacacgacaacggcatggacgcggtacggtagacaggaagtctgcggtccgggagtattgccggtataccagagagacatttattgggaaaactatggaaaaaagcaacaaccgggtactgaatgaactgttggtgaacctgttccataacgtgatggatgcagaggcaaaggcggtcataacagaagaattcaaggatattacaaataatgacatacacattctggaggctatcggcatcgaggaacccaagagcatgtccaggatcgcgggggaactccacgtcaccgtgggaaccctgaccacgaatatgaacagtctggagaaaaaaggctacctggagcgtaaccgcagcacgcaggacaaacgggtggtgctggtgaccctgacagagaaggggagaaaagcttttttccaccacagagatttccacaggaaaatgatccatacgatcattcgggatctggacgaggaagaaatgaagacattgatcaaatgtctgggaaaactggatatatttttcagagaaggcaatgcagagtgaccggagagttccggttactttcagactgtagacaaagctccctcacaggaaggaactttgtctacagtctgaaacgagatcagttcctatgatcttgtaaattttatgcgtgacttcagggtcgcagacaaaggcgatggaacttaatatcaatatttcccagaaccaaagcgttcatgaaaaaatcaaaaaaataatcggtttaaccaatctcgatgcactgtatctgacagaaaaagagattgaaaatatctttgagttcaccatgctgattgacagctgagtactaggttttgagagaaacgacggaagtcaggtgatattgcacaagactgaaaagcgcaagacggtattcagcatttttgccaacaaccaacttttacaaaaaaatagtaaatggtaaaagtgcataataaatgcccgcgaaaatccggcgatgtgccaaaaagagacgaaatagcaagattgtaaaacaagtgagcaagataatgattgctaaaaaactggaaaagcactacacttaaatcaccgcgaaagggaggtaatcccgacacagaatttacacttaggaggaaaacacgaatgaagaagattgttgcacttttgatggcttctgctatggcagcatctctggctgcttgtggtggcaatactcaaaactcggaggctacctctgctactcctgctgaatccacggctgccgagtctacggctaccgatggcaagaagtacgagggcgttgagttgaccatgtggtccatgtggtctgccggtgaggttcaggcagccgcaattcaggctgccgccgacgctttcgaggctgaaaccggcgcacaggtcaacatcgagtggaaaggccgtgatgtcaacaccctgatttctgccgcactggaatctggcgaaaagcttgacattttcgaggatgattacaaccgtatcggtcacgcttatgccccgtacacctacgacctgaccgagatggcagacgctgtcggttatgatgacttcagctacgcttgcttcaatgatcaggccaaagagtgggctggttatctcaactccatcgtagagcagccccagattggcggcatcttctacaacaaggacattttcgatgcctgcggtatcaccgacacccccaagacttggaatgagttcctgacagtctgccagaccctgaaagacaacggctatgagccgctggcactggacggtgcttacgcaaacttcaacttctacaaccatctggtccgccatctgggcgaggacaccattgccgagttgggtaagaacggtggctgggctgacaatgaagctgctgtaacggctgcacaggaaatcattgatttcgtgaacgctggttatctggccgagggcgcgcccgatgcttatcctgccagccagaccaaggttggccttgacacggctgctatggttgcttgcgcaaactatgtcacttccgaggttgatgctgctgttggtgagcctgtaaactggggattcttcaactatcctgaagtcgatggcaatgttgatgcttctgcttacgccggtgcaaactctctggccatctcctcttcctgtgagaacccgcaggctgcatttgacttcattatgaccattgttaccggcacctgcgggcaggagctggttgacaagggcggtcagatccccgctgacacccgcctgaaagagtctgtcctggctggctctgttgagacactgaagaataccaccaccccgatgagctggtgtggttctctgaacacgctggacgactggtccctcatcaagagttccatgatcgagctgttcgaaggcaagtacgcaaccggcgctgactactgcgcttacttggataccctgtgcgactaatcctataataaatcatggtacgccgtcaagcgatgcggttataatggatttattcaggattccctcgatctgaatggaggcggcacctgaatgggtgctgtctttgcctatgacatttcatttttgaggtattaccagtatgaaaaagaacaagacaatgattttcctattcattctgcccatcgttctttgccagttgttcatgtatgtctatccggtcgttcggacgattatcatgagtttctttaaggtagagagccttacggcatctacaagtacatggagcttctatgggctgcaaaactatttcaaaatcctgcgtaatgccggctttatcagttccatgaaaaatatggtgatgatttggctggtgggcggcatcattaccatgtgcctgtctatgctgatggccgtgattttgaccagcggcatccgcggcgcaaaattctttaaggccgccatttatatgcccaacatcattagtgccgtggcgctggctaccatgtggattcagtatgtgttcaactatgattatggtctactgaaccagatcgtcaaagtattcggcggtgagaatgtccgctggctgggtacagatctgattttctgggccatgatgattgccttcatttttggcagcgttggttactatatgctgattttcatcagcggcatcgaaagtatcccgcaggatttatacgaagctgccaccatcgacggcgcgaatatctttgaccgcttcttccagattacgctgcccctgctgaaaggtgtgattcgcacctgcgttactttctggagcatcaatgcgactacattcttcctgtggacgaagatgttctcccccatcaatacagaaacggctaccattgtgcccgttgtgtacctgtacgatacagtgttcggcggcaagggcgttgtcgagcgcgatgctggtgcgggcgcagcggttggcgttgtgctgactttgattatcattgctgtgtatgttatcaccaatctgatcttgaaagattcggatctggagtattaaggtaggagagcggttatgggaaaatatcacgatagaatcaactggaagaaagagcttcggcttctgcccggttatatcattgtttgcgcatggatcgcactcacggctgccatcctgttatggatcgtctgcgccagcctttcctcaacaaaggaaattctgacgggcagagttatggacttttccaatggcctgaagtgggataactacgttacggcttggaacacccaaaatgtatcgctgtatttcttcaatagcttggtttatgccattgtttcctgtgtgggcgtgctgctgatttccgcgcctggtgcttatgtgctttcccgctggaagttcgtcggcggcaagaccatccgtatcggcttggtcattgccatgagtgttcccactattatgatcatcatgccactgtactctttggctgtgcagtggggcatcaagggtcgcgtgctgttggttgtgctgtatattatgctgcgcgtaccgtataccacgatttacctgctggatttcttctcatcactgtcccggtcttatgaggaggcggcctacatagacggatgcagccattctcggacgttctggcagattatgctgccactggttcagcccgccattattaccgttacgattttcaacttcatgtctgtgtggaacgagttcttcatggcgctgattttcaccaccagcgattctatgacccctgttggtgtcggtttgttgcagattgtcaatgcaatgaagtattccggccagtacggtgctatgtttgccgcagttatcattgtgttcctgcctactttcctgctgtatcttttcctgtctgaaaagattattgtcggggctaccagtggcggcgttaagggttgatttgactttcctccattcaaaatattacgttttaaggagaatcattatatgaatgatgtaagaaaaatgggtcgtgtaacgatccccaccgatatggacgccgtccctgaaaccctcgacctgctcaagcgcttgggcgcggatgccatccgcgactgcgacggcaccgagttcccgcaggagttgaaggacactggcgccaagatttatgccacctactacaccacccgcaaggacaacgcatgggcaaaagccaatcccgatgaaacgcagcagtgctacattatgacgccgttctacaccgctgcggacgatgcgctgaccatccccctgatgacgggcatcagccgcgaactgatgatggtcaacgaccacgatgacatcacccgtttgtgggaggtcatcgaccgcacgacgggcgagcctgtccccaccgccgactggcactatgatgccgccagcgaaagcgttgtcatcgacgcccccgccgcctaccacgagtacacggtcagctttttggcgtacctgatctgggatcccgtccacatgtacaattcggtcatcaacgactggaaggatgtcgagcaccagatcccgttcgatgtgcgccagcccaagacccacgcctacaccctacgccgcctacgtgagtatctggaaagccatccctatgtcaatgtcgtgcgctttacgaccttcttccacctgttcacgctggtgtttgacgagctgcgccgcgagaagtacgtggattggtatggctactcggcctctgtcagcccctacattttggagcagtttgaaaaagaggtcggctataagttccgcccggagtttatcatcgaccagggctactacaacaaccagtaccgtgtgcccagcaaggagtacaaggacttccaggctttccagcgccgcgaggtcgccggtctgatgaaagaaatgaccgacattgtccacgcctacgccaaggaagccatgatgtttcttggcgaccactggatcggctgcgagccgttcatgcccgagtttcaaaagtccggcgtggatgctatcgtcggcagtgttggcaacggcagcacgctgcgcctgatttccgacattcccggcgtcaagtacaccgagggacgcttcctgccctacttcttccccgataccttccacgagggcggcgaccccgtgcgcgaggccaaggtgaactgggtcacggctcgccgtgccatcctgcgcaagcccattgatcgtatcggctacggcggctacctgaagctggcctgcgagttcccggaatttctcgattatgtcgagagcgtctgcaacgagttccgcgagctgtacgagaacatcaaaggcaccacgccctactgcgtcaagaccgtggctgtgcttaacagctggggccaacagcgcgcctggggctgccacatggttcaccatgcactgtaccagaagcagaactacagctatgcgggtgttatcgaggctctgtccggtgcgccgtttgatgtgaagttcatcagctttgacgacatcaaggtcgacccgaaggtactggacagcattgatgtccttatcaacgtaggcgacggcgataccgcccataccggcggcaaggtctgggaggatccggagatttcctccgctgtcaagggctttgtccaccgtggcggcggtctgatcggcgtcggcgaacccggcggccaccagtatcagggccggtatttgcagctggccgcgccgcttggtgtagaaaaagaaacgggcttcaccctgaactacgacaagtacaactgggacgagcaccgcgatcacttcattctggccgactgccccgaccatgatgtggacttcggcgagggcaaaaagaacatcttcgcgcttgagggcaccgagattttgattcagcgtgataaggaggtccagctggccgcccacgagtacggtcagggtcgcggcgtctacatcagcggtctgccctacagcttcgtgaacaaccgcgtgctgtaccgagccatcctgtgggccgcccacgacgaggccgacctgcacaagtggttcagcacaaactacaatgtcgaagtacatgcctatgtcaagaacggcaagtactgtgtcgtgaataacacctacgagccgcaggataccactgtttacactggcgacggcagcagctttaccctgcacatggacgccaacgagatcaaatggtataatctataaagcaggacaagggtgtgccgcactgtgcggcaccctttggctgcaaaaacattgatacgaggtttgttatggataaacatcctaatattatcctgcttatggcagaccagatgcgcggcgactgccttggtattgccggtcacccggatgtaaaaacgccgttcctcgatgcactggccgccgagggcgtgcggtatgaaaatgcctattctgcctgtccgacctgtgttcccgcgcgggctacgctgtatacaggcatgtcccaggagcacacgggtcgcgtcgggtacgaggatcttgtgccgtgggattatccccacacactggccggggagctgagcaaggccgggtactatacccagtgtgtcggcaaaatgcatgttcatccgctgcgcaacaacctgggtttccatgatgtacggctgcatgatggctatctccatgcctaccgccgccccaccacgcccagctatgaggatcagcgtgtggccgatgactattattggtggctcaaacagcagcttggcgtggatgcagacccggtggacactggtcttgactgcaatagctgggtcgtgcgcccctggatctacgaggaaaagtatcacccaaccaactgggtcgccagcgagtgccgagactttctgcgctgccgtgaccgctcgaagccattcttcctgatggccagctttgtgcggccacatcctccgctggatgccccggagtattacttgaatttgtacaaagatgagtcactggccgagccttggcgcggtgattggaacgactgcgtccgctgggaacgtgacagccacagctaccatgcccagacggcaccttcggatgaaagctacatccaccagttgcgggcgggttactatgcggccatcacgcacatggatcatcaaatcgggcgtttagtctccgcactggtggaggagcaaatcatggataataccataattctgttcgtgtccgaccacggcgagatgctgggcgaccacctgatgttccagaaagcaaagccgttccagggcagcatccgggtgccgctgtttatctccggaccggagcgctatgtgggcaagcatggtacggtttgcactgatttggcagaactgcgcgacgtcatgcccacgctgctggagctggcgggcgcaccgattcccgaaaccgtggacggcacgagcctgttgcaccccgtcgaacgcgaatatctgcacggtgagcatacactgggcgaggattccatgcactttatcctgacgaaaaaggataaatatatctggtactctcagaccgggcgagagctgtacttcaacctgcgcgacgacccgaatgagacgaagaacgtgctggaggaaaacccagagcgtgtgacggcgctgcgcactctgctgattgatgctctaaaaaaccgtgaagagggttacaccgatgggtacaccctgcttgtgggcaaaacacccgtgaccgtattacagcataccgaggtgctatgaagcagcttcaattcctgattaaacccgcagcgggctactgcaacatgcgctgccaatattgcttttaccgagatgagcagcagaattgcgtgaaccccgacgactgtatgatgtcacaggcaacgacggaaacgctgatttaacgctgctttgcggaacttgagccgggcggctttgtttcgttcgcctttcagggcggcgagccaacgctgaccggactggatttcttttgtttctttacgaagacggtgcgaaagtacaaccaaaagcacgttgccgtgcaatacgctatccagacaaatggtcttgccattaccgatggatgggctgatttttcagcaaagaacactttctcgtaggtatcagcttggacggcaccccggatgtgcatgatgccctacaccctcacaccggaactgtatgcgcagttcctgtgcgcactgttcgacgcatggtaccgcgactggagaaccatcacctatgtcagcatccgcctgtttgaagattatattcagctacttttgggtggcccggcgggaacttgttccacgaccggaacctgcggtgtctacatggtcgtggaggagagtggcgcagtgtatccgtgcgacttcttctgcttggatgcctataaacttggtacgattcaaaacgataccctgcaatcgctgcttaccggcgaaaaaatgcgaacgtttatcacggatggctggcagatacctgcagaatgtcagcaatgcaaatgggtacggctgtgccgtggtggctgcaagcgcgaccgaaatacggcagctgcagcgcagcgcagttgctattgcaacgccctacaaaagtttttcgcctacacggaaccgcgcctgtacgaaatgatccgcgctgttcaaatgtatcactgaaaaggagaccgattctattggacaagaaaaataaatactggcagctgtttctctctacctttaagctgagtgcctgcaccttcggcggcggcttcgtcattatccctttgatgcgggagcgcttcgtgaaagaactacattggattgacgaggaagaaatgctggatctaacggcgattgcccaatccagccccggctccatcgccatcaatgcctctattttggtaggttaccatgtggcaggtatccccggcgcactgattactgtggtgggtgcagcactgccgccgcttatcatcatttccatcatctccgtgttctatcaggcgttccgctccaataagtacgtgagcatggcgatggccggcatgctggccggggtggcggcagtcatctttgacgtcgtcatcaatatgatgtggcctattctgaaaaagaaacgctggcttcccattacggtcatgctggcggcttttgtggcgacccgcttcttctcggtgaacatcatcctgattattctggtctgtggtgtcatcggtgcgctggataccctgtatctgcaaaagcgggagggcgacaaatgatctaccttgaactgttttggagctttttccaagttggcctgttcagcatcggcggcggctatgcggctatgcccttgattcagaatcaagtggtggatattcacccctggctgacgatgacaggctttgcggacatcatggccatttccgaaatgacgcccggccccatcgcggtgaacgctgcgacgtttgttggcattcaggtggcggggctgcccggggcactgattgccacgattggctgtattttcccgtcctgcgtcatcgtcatggcgctggcctacatgtattaccgtttccgcggccttagcgttatgcagggcatcttgatcgggctacgccccgccgtcattgctatgatcgcctccgccggtatctccctgttatgcatggccctgtacgggcagcgcactttccctgcggagtttggcagtatggatttgattgcag

SEQ ID NO: 149 - DNA, 22359 bp, unidentified
  source 1..22359: mol_type = unassigned DNA
tttttacagagaatggtcatgggaaaaaaggttttcttacaagtgctgtggttaaggactttataaatcaatatccaacacttagaatcaaacctaatccggattgccatgatagatggatcattcttgattatgggttacctgcagaatccgtatatcattgtggtgcttccagtaaagacgcgggtaaaaagttatgtgcaataaataaagtggattctgttcaaatgattcatcctgtaatagataggttgcttttattgccggataaacagatataacctgatcccttcgaggatggtcatattccctggatgacattatgcgtagtccgggtaatgagttctatgcactcagatccagattccgtccaatcactgcggcagcatcggcggattttttgttctgctgataaggattgctctcgtcactgtagctgatcttggtcgtggtggtaccgccggcggtgtagacagtgccgcattcgggacataccgcggtccgcagggatactgtggcggagagaactttaccgttgttctgtgcagctttgttgtaggcattggttacatgctcctgctcatgggcgcgcaccctggaagcggaagcctgtggagagatatgggatgcagatttgaaggagaccatctcatcggaaccgtcctgatatttgcggttcttgcaggtctcacattccgcgggagaagatttcctgccgggcttttccacatcggattttccgggatttactatcatacccttctcttcggaccgtgcggaagataccgcaccggtagaataaccgtatccgtaattgccggtcagactataattattataataatcgattccgtaaatacctgtcatggaacttctcctttctgcataatgctttgattcattacgtatatgtcttctggttgcccccattgtagcacctgtatccggtgagggcaagttaagattgccgaaaaatccgctctacttcggaaattaccgaagtcgttcccaagattacgatgggatccggacaagaatcagccagagtcagtgcctgttgcacggaatctgtccatatcgtgccaataccctcttctgccaatgactcctgctgttttggggaaaaatgataatgcggattgccggacctggtgaggatgatgcgggcagccacatctttcatagaccggaccacaccggcataatccttatcctccggaatccccacgataacagtacaattcgaaatccccagatgacgcagaactgcttttacattttcacagctggcggaatggatgcacgcatccagcaggataaaagggtccgaacttagaatctccatccgccccggatgatggatcgcagacagttggcagcgaatttgattgcacattgtatctgaaaatatatccggagcattggattcccggcaaagatctgccatgacatccacgcacggagccagagccagtgcgcagtttttcgcctgatgttctcccaataacggaatctgtaaatcaggataaatgttatctccgatcaccacatcaaatagcataccggaacaggtatagcggatattttctgcctgaaaatcccgaccatatattttgtagggaacctgcatagcctcggcacggcgaaccagaaccttcaatacttccggatcctgctccgcaaaataaacacacttctgctccccggtgatgacgtgggatttatcttctgcaatggcagtcagcgtatctcccagctctcttgtatgctctaagaaaatccgattgatcacggcataatcgtgacgaatgtagttcacatcatcatattttgcccctttgccgcattcaaatatattgaaatctgtatgtttttccgaaaaataagtcagtgccaggtccgcctgaatgcccatggggctgatacataccgaatccggcagatcggaggcaatgtctagaatctccggctggatctctgccatcagacggcaaaagtcggtttcactgatcatggtatcattgacgcggaagcgctctctgaaatcagtaatatgaggactggtcatcagtcctacggataaatttgtctgcaggatccgggagaccatattggcaacggagccctttcctttgcttccggtgacgacgacacagggagccatcgatttctgccggagcagagatctcgtcagctcaggatgtctttttccggcatcctgagcggcatagtcctgatgtgtggcagcccgcagataggaagcatagacgaagtcttccgcctctttctgcgtagtgaatttatgaaattccagtggtgttccggaaacattattcataaaaataagcatacctttccgtaacctgcaattttattgatacgatagcatcgtatattttcgtacactgtgcaggtacaaatatgagatgagttccttatgcaaagtctgatcgtattgtttccataacttttgctgcaacattaataccggaggctttttcaatgccttccagtcccggcataacattgatttcgcaaaaataaggtttttctctgccaaaaagcagatcaattcccagaaaatccagtccggtctgctcgtaaatatctgcggctatggcacggatgccgggagtgacagggtaaggctctaccgaagcgcccagagctacatttgcacggaaatccccctgggatctgcgctgcatacaggcaacggcttctccgcggatgctgtaaaatcgcagatccctgccgtagctttctgagataaattcttcgaagagccattccttggaggaagggtagttaagagagagctcttcataagaagctttatcccggatgcagacgatttcctcgcccatggagctttccagtcctttaccgacaaaaggaagccccagttgttctacaatagaagaaaaaggcaacagtgaagttcccagaagatatttcgggatcagaaaggcttcggaatgaagccttcgtacctgttcaaatttattaatatagatattataagcagttaaaggattatagcttcgggtggcaagtgcatttatagcatccttttcacgcccccatttatagcggttgatgacaaaatccacgggttccagtattttaccatgatttataacaccatgcggagagaccatagtatcgtggatccctacaatctgcagatccatatccagggcagaagcttcctgtaccagacgattgcaggtataagcgttggtcatagcattatatttttctatgatatatcctctgacaggcataaggcacctcgtaatttcagtattctcatggttaacatagcaaaatgtaatcaaaatagcaagaaatatagttcttctattgaaaaaggagcaatatcctgcgtataataagagatataagagcctaaagtactaccacagaatatattaaaatatattaagaagaaacaaaagaggagacatacaatgaaattactcgaagagcgcattcgcaaagatggtacggtaaaagcaggaaatgtattaaaagtagattcttttctgaatcatcagatggatattgatctgttcaatgaaatgggaaaagagtgggcgcgtctgttcgcagaccgtaagattacgaagatcctgactgtggaggcttccggtatcggcatcgcctgtgtggcagcccagcattttcatgtgccggtggtatttgcaaaaaagtcccagtccgtaaatattgacggtgaagtatattccaccaagatcgaatcctttacgcataagagagtatatgacgtgatcgtctccaaaaaattcctacatccggaagatcatattctgattattgatgatttcctggccaacggatgcgcactggagggtttgatcgacattgtcaataaagcgggagcttctgtagagggtgtcggcattgccgttgagaagggattccagaagggcggcgacctgatccgttccaagggtatccgtgtagagtccctcgcaattgtggaaagtatggatgacaaaaccggagagatcacatttcgatcttaagagttagataagttagataactattcagaaccacattctcaaacgagttaataaaaatttaatacttctcttgacaagaagtcagacaaatgcttatactgactaatgttgagagagtacaataaaggggtcgtatgaaggtgtcatacaccctttttgcgttgactcaccggtttatctgcagatctgtgcccgcgctgctacatggatctgtaacgaagcagcagcgcagaaagaggagaattatgaaaaagaaagtcgtaagtttactcgcagctatggctctcgcagttactgctctggcaggatgcggatccaataacgcagctaccaccggcacagatgctgcaactgttgcagctactactgaggcagcagctactactgaggcagcagctactactgaagcagctggcgaagctgtcagtggtgtaaaggcaggttttattttcctgcatgatgagaactctacttatgatctgaacttcctgaacggagcaaaggcagcttgtgagaagcttggcattgagtacatgaccaagaccaacattcctgaaggacaggaagcttatgaagcagcttgtgagcttgctgatgcaggctgcaattttatttttgcagacagctttggacatgaggactacatcatcgaggctgctaaggagtatcccaatgttcagttcagccatgcaacaggaaccaaggctcatactgagggtctggacaacttccacaatgcatttgcttccatctatgatggccgttaccttgcaggtatcgttgcaggcatgaagctgaatgagatgatcgctaatggtgatattaccgaggatcaggctaagatgggttatgtaggtgcttatacttatgcagaagttatgtccggttatacatccttcttcctgggcgctcgttccgtatgccccagcgttaccatggatgtaacctttaccggttcctggtacgatgagaccgctgagaaagaagcagctaacaagctgatcgagggcggatgcgtactgatcagccagcatgcagactccatgggtgctcctaccgcatgtgagaccgcaggcgttcccaacgtatcttacaacggaagcactgaggcagcctgccccaataccttcctggtatcttccagagttaactgggagccttactttgagtatgctattaaatgtgtagcagatggaactcctatcgatactgactggtgtggtactctggagaccggctctgtagagctgagcgatcttggtactgctgtagcagatggtaccgcagaagcagtagaagctgcaaaggctgatctgatcgcaggcaaggctcatgtatatgatatcaccacctttactgtagacggtaagaccctggacagctatgaagctgatatcgatactgatcctgattatactcccgaccatgaggtagtaagtgacggatacttccatgagtccgatgttgcattccgttccgctccttacttcaatgtaagaattgatggaatcaacctgttggatgagcagtattaattgacttattgaaatagcccggacggcgcagcgtttatcgccgcgccgccctttttctaccttatggatcttttgcttttgtggatggatgaggtagaaaaggggcggccagtgtgcttatgccaggtattaaaagacctgaaaattgcaggtcgtggataaattggaaaggtgactaggatggaaaaagagacaaaagtagctgcggtttcaatgaaaaacattaccaagacttttggatccgtgattgccaatgataaggtaaatctggatatctataagggtgagatattatcgctgcttggggaaaacggcagcggtaagacgacactgatgaatatgctctccggtatttattttccggatgagggacagatctttattaacggtaaggaagaggtcatcaaatcccccaaggatgcgttacggctgggaatcggtatggtgcatcagcattttaagctgatcgatgtactttccgctaccgagaatatcatcctgggtctggagggcaggcttaatatcaaggaggcttcccgtaaaatagaggagatctgtgacaaatacggttttgaagtagatccgaagcagaaaatctatgatatgacggtatcccagaagcagaccgtggagatcgtaaaggtgctgtatcgtggtgcggatatcctgatcctggatgagcctaccgccgtactgacaccgcaggagacagagaagctctttaacgttctccggaaaatgagagatgacggcaaggctattgtcattattacccataaaatgcatgaagtggaatctctgtccgacagggtggctgtgcttcgtaacggtcagtatattggaagcatgctgacaaaggataccaccgttacggaaatgaccaatatgatggtgggacatgcggttactctgaatattgtcagaccggaacctgtgaatccgaagccccgtatcgaagtacagggactgaccgtacgtaacgaagaaggtatcgttaagctgaaggacgtctcctttaccgccaatagtggtgagatcctgggaatcgccggtatctccggctgtggacagaaggagcttctggaggccattgcaggtctgcaggtaacagaagccggcacgatcagttatgtggaagatgatggaagtaaggaaatgttgatcggcaaggatccgttgaagatcgcggagatgggtgtatcgctttcttttgtaccggaggatcgtctcggaatgggtctggtaggcaatatggatctgaccgataatatgatgttacgttccttccgacagggacatacaccgtttacgaaccgaaagccttccaaacagcttgcaactgatgtggtagaaaatctggaggttgtaaccccgggtatcaccactccggtacgcagattgtccggtggtaatgtacagaaggttctcgttggaagagagattgcgtctgcacctaccgtactgttgacggcttatgcggtacgtggactggatattaattcttcgtatactatatatgacctgatcaatgaacagaagaaaaagggcgttgccgtgattttcgtaggcgaggatctggatgtgctgatggagctgtccgaccgtatcatggtattgtgcggcggagaagtgagcggtattctggatgcgagaaagacagacaaaaatgaggtcggtatgctgatgaccagagtaggaggcaaagaacatgaaggaaaagaataaagagcctttgtttcatatcgtaaaaagagatgcgcttccctggtataaatctctgggtattcgatttttggcaatcctgctggcactgatcctgtgcggtatcattacgacgatcaccacgggaatcaatcctttacaggtatatcagtccatcgttctgggtgctttcggatctgtccgcaagacctgggtcacttttcagaatatagcgatcctgcttttgatcgcattggcactgaccccggcatttaagatgaaattctggaatatcggcggtgagggacaggtgctgatcggcggtctggcatcagcagcctgtatgatctgtctgggagataagcttccgaacgcagttgtgatcctgtgcatgatcgtggccagcctggcagcaggagccatctggggattcattcccgcatttttcaaggcgaaatggaataccaatgaaacgctgtctacgctgatgatgaactacatagctacacagctggtggcattttatacgatagtatgggaggttcccaagggatccggtaagatcggtatcatcaaccagaacaccaatgtgggctggctgccgcagatcttcggttccaaatatctgttaagtattgtagtggcggtagtgatcacgatatttatgtatgtgtatctgaactacagtaagcagggatacgagatttccgttgtgggtgagagtgaaaataccgcaaaatatgttggcattaaggtagaaaaagtaattatccggaccatgctgttatccggtgcgctgtgtggactggtaggtctgctgttggtaggaggcatcaatcatactgtgaccactacgattgcaggtggacagggatttaccgctgtactggtatcctggatgtccaagttcaatcctctgaccatggtattctccagcttcctgatcatattcatggatcgcggagccagtgagatctctaccaattttggactgaatcattcttactccgatattctgacaggtataatcctgttctttatcatcggctgtgagttcttcattacttacagactgcagttccgtaaaaaagcagaaaaggaggaacagtaagcatgtggtcatttttacttgcatttattccgagagcaatcgtacagggaattcctctgttatacgggagtaccggtgagatcatcacggagaaatccggtaacctgaatctgggaatccccggcgttatgtatgtgggaggtatctgtggtgtcatcggatctttcttctatgagagatccgcaggaggcgcggcgaacatgaatgggtttcttgctattgcgattccgatgctctgctgcctgttaggatccctgttgatgggattgctgtactgcttcctgactgttaccctgcgggcgaaccagaacgtgaccggtctggcaatgaccaccttcggtgtcggcttcggtaacttctttggcggatccctgatcaagctggtgaacagtgatgtaccttccattgcactgtctgctaccagcagttatttcagtaagtcacttccttttgcgggaaagcttggctggtttggcaagctgtttttatcctatggattcctggcttatctggcagtgatcattgcgtttgcggcatcgtatgttctgagtcataccagaaccggactgcacttaagagcagtcggtgagggtcccaataccgcagatgcagccggtatcaacgtatcccggtacaaatacatcgctacctgcgtgggatgtatgatcgcaggtctgggcggactgtactatgtaatggattatgcctgcggtgtctggtccaacgatgcgttcggtgacagaggctggcttgccattgcgctggtcatcttcactatctggagaccgaatatcagtgtatttgcttctttcctgttcggtggtctgtatattctgtatctgtatctgcccaccggtatcgagcatatggagtaccaggagctgtataagatgatcccttatgttgtgaccttactggtactggtcatcaccagtatgcggagcaagagagagaatcagccccccgcaagtctgggactggcgtacttcagagaagaaagataataattttatagaaagtcgattaaaaacggcgttttccggaaatttccggagaatgctgttttttagtgcacattttggaaaaaactcacagaaactttaggaaaacttttgattttattcggatggaatttacctgtgtctgttatgctgagatcaattcagagaaaataaacggaagggagaaaaaagatgaaagtattgatcacaacagactggtacaagccggccatcaacggagttgttacttcggtatgcaatctgcgggaggaattacagcaaagaggacatgaagtgaagatcctgaccctgtcccgtacagctcattcctacgaagaagagggtgtgatctatatgggttccgtgaatgccggatatatttatccgggagcaagacttcgggtgtcctcgggacgcgaactgtatcgcgggattatagagtggaatccggacattgtgcattcccagtgtgaattttctacctttttcatggcaaaaaagatcgcagaggaatgtaagatccctctggtgcatacttaccataccgtatacgaagattatacccactatttttccccttacaagaaatggggcagagatatggtacagttcctgacgagacagatctccgagaaggtggacagcatgatcgctcccagcacaaaaatagagacattactaaaaggttatggaattcattgtccggtatcagtgatcccatcggggattgatctgagtaaatatgacgcgcagacccggacggattcccgggagagaatccgaagaaaatataaaatagaccggaagaccacagtgcttttatatgtaggtcgtctggcaaaagagaagaatgtggaagaattgctggagtaccagcagaaagttcaggagagcggcacaatgctgatgattgtaggcggcggtccttatttggagactttacggaaaaaggcagcagaactgggtgtgacgggaagcgttatttttaccggaatggtattacccgctgaagtagcatcttattatccggcaggagatctgttcgtcagcgcttccaccagtgagacccaggggcttacctatgcggaagcactggcagcaggattaccgttattatgcagaagggatgaatgtctgcgggcggttgtggaagaggacaaaaacggctggcagtaccggaccgaggaggaattcttgaaagacctgaagaactggaaggagaaagaagacgatgaacgcagaggaatgtgcagttatgcaaaacagtccgcagaaatattttcccaaaaaagatttgcgggaagcatggaacaactataccagcgtcagatcgaagaaaaacaggtcgaaagagaaaaacgcttggcaaagagccgtcaatattgcatcctgggttagtctgatcctctgtggaatactggcagtctggagctatcagagcggcattttccaatcggtggagactatgcagcagtttgtgaaccgtttcggaatgatcggtgcactgatcttcgtgctgatccagatcgttcaggtggtgtttcccatcataccgggtggcatcagctgtctggcaggagtgctgctctttggagcggtgccgggatttttctataattatataggaatctgtgtgggttcctgtattgcttttggaatagcaagaagtctgggaagaccggtgctgtacaagatgtttcccgggaaaatgattgaaaaatacctgacatggacggagctaaaggggagatttttgaaattatttacactggcaatctttctgccggtggcaccggatgattttctctgttatctcgccggaacgacgaatatgacatggaaacagtttgtgacagtcatctttttgggaaagcctttctccattgcgctgtatagtctgggactgacgacactgttccaggtgattttccacctggtataggagagtatacttatgaaaatttatatatataaaggcggactttcactggtggcaaaaagcggcgttggcagcgccatacgccatcaggagaagatgctgcgagcagcaaaagtgaccgtgacggacgtctggaaagaggcggatatcgtacagatcaatactgtattgcctgattcgccgctggtggcacggcgggcaagacggcaggggaaaaaggtcgtctattatgggcattccactatggaagattttaagaattcttttatcggttccaatctggcggctcctttattcaaaaaatggatccgccattgttatagacagggagatgtggttatcacaccaacggaatactcccgggaattgttaatgaaatatgatctgcatcgggagatttacgcactgaccaatggtgtggacactgaatttttccacaaaacagagcaggcaggtggacgattccggatattttttcatcttcctgtggataaaaaggtcgtgatatccgccgggcatctgattcacagaaaaggaatcgaggattttctggaaatggcaaaaaggatgccagacattatttttctatggtttgggggcgggaacaatgcattgattccggcagagatcaaaaaggctgtggcagagaagccggaaaatgtgatctttgccggtttccaaccgtccgggatcctgcgggatgcgtactgtggtgcggatgcatttgcttttttcagttatgaagagacggaaggaatcgtggtattggaggcattatcctgtgagattcctgtgatcgtgagagacattccggtgtatgaagggtggcttaccgacggcgagcaggtgcgcaaagccagcaatccggattcctacgagcaggcaatccgagacatcttgtatgaagaaccgcgggaaaaagtaagacgaagaatccgggcaggcagggcactggcggaggaacacagcatgcgggtgacaggtgagaaactgtatcagatagagcagaagcttttgtagacatccctcttgcaaattcagagtctttatcataaaatgagagtaccttacaaaggaggtgcttacgatgaaccttgtaattactatcagccgaagattcggaacaggagccagtctgatcgcacaggagctgtctgagaagctgggggtgccggtatatgataaggcatacatagagcatgaactggatggtgacagttatgctacggaagcggaggtcattaaggaattggcggaacatccatgtattattctgggacgttgtgcatccgagatcctgaaggatcagccgaatgtatttaacgtgtatgtgtgcgcggataaggaagatcgtattgaacgtatcatgaagaaggaaagtcttccccacgatgaggcaaaagaaatgcttgagaaaaatgatgcggagcgcgccgactattattatgaaaataccggtaaagtgtggggtgatgtgaacaattatcatatgatcctcgataccaccaaactgggaatcgaaaattgtgcggacattctgatccggtattttgagagagtggaaattatttgatagtccggaatgagaatggacgttacgatttcaagagtatgcagtacgaagaaatcgtttaggatataaatagggaatagattgtaaacagatgcccgacacggacatctgtttttttatgaaaaacattttaaacatagtaataaaattaatcaattatacaacattataaaattaaaagtatggttttaaatataacaaaaaatgatatatgcaattaaaaattttaatcaaataataaaaaggaataaatatcgaataaaacagcctttttcttgaatttgtatgtgtatgacaaaaatgtcacattaaaatacatcaattaacaagataagaatatatcttgcttacagaaattatgagtgttaagataatgcaatcagataagtgaaaatagtaaaaacagcaggttttgaaaataaaaagtaatcatacggcaggaggatttccatgaacagcgcagacattgcagcaaaatatcagaaaacttattttatgccccccgaggtgacctacgactgggtaaaaaaggacagtattaccaagccccctatctggtgcagcgttgacttaagagacggcaaccaggcattgatcgatcccatgagtctggaagataagctggaattcttcaagatgttggtaaagatcggtttcaaggagatcgaggttggttttcccgcttcctccgacactgagtacaactttatccgtgcactgatcgagcgcaacatgatcccggaggatgtgaccattcaggtattgacgcaggcgagagagcatatcatccgcaagaccttcgaagcagtcaagggagcgccccacgcagtgatccatctgtataattctacttccgtagagcagagagaacaggtatttaagaaggacaaggaagctattaagaagctggcggtagatggtgcccggatgttaaagaatctggcagatgagaccgaaggtaacttcacctttgagtacagcccggagagcttttctcagaccgaggtggattatgcattggaagtctgcaatgcagtactggaggtatggaagcccaccgctgaccgcaaggctatcatcaatctgcctaccaccgtacaggtggcaatgcctcacgtatttgcgtgtcaggtagaatatatgcacaagcatttgaaatatcgtgaaaatgtagtactcagcgtacatcctcataatgacagaggctgcggcatcagcgatgcggagttcggcgtactggccggagcagaccgtgtggaaggtactttgttcggcaacggtgagcgtaccggtaatgtggatctggtaaccgttgcacttaatatgatgtgtcacggtgtggacagtggactggatttctctcatattatggagatccgtgaagcttatgagaatttcaccggtatgaaggtgcatgagagagttccttatgcgggagatctggtatttaccgcattttcaggttcccatcaggatgccatcagtaaaggtatggcatggcagaaggaaggcaggaccggcaagcgctgggatattccttacctgcctatcgatcctgcagatgtgggaagagagtacgaatccgatgttatccgtatcaacagcgtatccggtaagggcggcgtagcattcgtattgaagcagcagtttggattctcactgcctgcagctatgaaggaagaagtcggctacctggtaaagggtatctccgacaggcgtcatcaggaattacttcccaaggagatctacgcgatcttcgaggaaaattatatttatccccgtagtatcttcaatgttccggagtgtcacttcaagcaggagaacggtattcaggcagaagtgaccattgatcagggcggcgcttccagaaccattaccaccatgggtaatggacgtctcgacgcagtcagcaatgctattaagacatacttcggtattacctatgaactgtctgtttacgaagaacatgcgatttccagaggttccaactctaaggcagctacctatgtaggcatcgtccatgacggtaagttctactggggtgtcggcgtggatgaagatatcatcaagagttccatcgcagcattggtatccgctgtgaacaagctggcagcagagcagcatatcacttccggcagagaggagcggatcgtggagatcatcagtttcatccagaagaactacgtggatgtaacactggatatgctggtagataccttccatctctccaagccgtatttgtccaaatacattaaggaaaaggccggcatgaccttccaggaggttgtaagggaagaacgcatgaagaaggcaagaatgctcttgaaggagaccaaccagacggtggagaccatagcggctaatgttggttacgagaatgtggagcactttaaccgcctgttcaaaaaggcttatgatatgactccggtacagtatcggaaacagagtgcggaataacaggagtctattcagcaaattaaatttaggaatggctttttaagtgttgattatcgggtaaacaaagtataacataattttatcattgtataaaaatatgctgaatattgacaatttatgacagtaaagttatactaaagtagtatgtggtcatagaataagaccacaacttatggagggacaagataatgaataacagagagaaagcaaaggcagtacaaaagaaattcaaccagcgactgggaatttattacggcgtgatggcagcaggtgtcattgtggcagccatcggactgatgacacagatcaacgtattgaccctgctgggagtggtagcattttttgcaggattagtgatcctcagctgggtagacgggtataccgagtatacaaaacgtgttatgacagcaaaagctctgatgggtgaagagatgcccgaggatgtggtaaatgccggtattgaactggtaaagaagcaaggtggaagcctgtctgcacttaagagccagaccagagagttctctcatattttatatcatctgtgccagggtattttcaccggggcagccatgctggagaagatccccggactgaagtctgtatccggtattgcacagagtatgatcaagaaagcttacagaagaatcaatctgttgttagagggttatctgtttgcaaaatacggcgagatgaccaaggagacttattatgacggcgtatctctgttgttacaggatggcaggacttttctggtaaaatccgtaaaagatgccgctgtatctgaattgctggtaaccctgagtgtgatcggtactctggtatttgtagctttgggcggcatactgaaaaatgttgtgtttgttgtattgggcattgcctgtgtggttctgtatgtggtagtagccattgtatatgacagcaacaaagatttcgatatgctggcaagctatattgagtatgcttccacacatgaagtcaacgaagagtatcgtaacagcctgctggcagcgacggatgccgctactcaggtgaacatggtagccggtgcactgaagaaccctgccgtaaatggtattatgggcgcggccggagcagcagagaagctgtttggaaataaagatgagaaataagaattaggccatacccattcgcagacactgaagtgcctgcggatgtacggttgtcgccgtataaatccaaaaagaaagatacacctttgtgagcaagttccaaggagctgcgccatgcgcattcgtagacgcgctgcgtctacttcatgtacggctgtcgccgtataaatccaaaaagaaagatacacctctgtgagcaagctcccacggtgtatctttctttttgtctttgcatggcttgtagcttttaacataatgacaggtcttaagaacaaaaataggtagaaatatttgtttttttcgattatgatgaaaacatagagcaagagaattcgtatcgcggcatcggccggagcgacaagagtaagaacatataaatggacggggcttacacagtaagcagataggagtagaaaatggaaatgaaagagacgattctgaagactttcgcagaagtatttggagatgcagagggtgccaaggcttattttgcaccgggacgtgtaaatctgatcggtgaacataccgactataacggcggacatgtattcccctgtgcactgaccattggtacttacggcgtggcaagaaaaagaaacgacaataaactgcgtttctattccatgaatttcgatcagctgggcgtgatcgagtcttctctggatgacctggtacccagcaaggaagcgaattggaccaattatcccaagggagtgatctgggctttcggcgagaagggcatgaaagtgacttccggtatggatctgctgttaaacggcaatattcctaacggttccggactttcttcttccgcttccgtagaagtgctgaccggctacattctgagggatttcttcggctttgatgtgaccaatcaggatctggcgctgatcggacagttctctgagaacaaatacaacaaggtaaactgtggtatcatggatcagtttgccattgccatgggtaaaaaggacaacgctatttttctggatactgcgactctggagtatgagtatgcaccgatccatctggagaatgcgaagattgtgatcgcatgcagtaataaaaagagaggcctgggagattccaagtacaatgagcgccgcagtgagtgtgagaccgcactggcagagcttcagcaggtagtgaagatcaagacgctgggcgacctggatgaggagacctttgagaagttcaaggctattatcaagagtgatgtccgcagaaagcgtgcaaagcatgcagtatatgagaatcagagaacaatccgtgcggtagaagcgctgaagaacaatgatgtgaagctgtttggcgagctgatgaacgcatcccacgtatccctgcgggatgattatgaagtaaccggtatcgagctggatactctggtagaggaagcatggaaggtagacggtgtcattggatcccgtatgaccggtgccggcttcggcggatgtaccgtaagcattgtaatggatgaagctattgatacctttattgagcaggtaggcaaagcatacaaggaaaagatcggctatgcggctgatttctatgtagtagagatcggtgacggccctcagaccctgtaagaaaagtaaggttcctacgcaaacagaaagtgagtgccgcggaagctgtccgaatggtccggcggcagaatggagaaaaaatggatattcaggtattaattcgtaaattagtatcctacggagtacagacaggactggttccggaggaagatgtgatctataccaccaaccgtctgttggagctgtttgaactggatgagctggaagaccgtgacaatgtgaccatgcgcgaggatgaactggaagaggttctgaagggcatgctggattacgcttatgaaaaaggcattctcaaggagaacagcgtggtataccgcgatctgttcgatacgaagatcatgggactgctgatgcccagacccagtgaagtgatccgtcatttccatgagctgtacgagcaggtatctcctgaggcagctactgactattattataaattaagcagagattccgactatatccgtcgttatcgtatctgcaaggatatgaaatgggtggctcccaccaaatatggcgatctgggtattaccatcaacctgtccaagcccgagaaggatcctaaagccatcgccgcagcaaagctggcaaagcagtccggttatccgaaatgcctgttgtgccgtgaaaatgagggttatgcaggccgtgtgaaccatcctgcccgtcagaaccaccgtatcattccggtgaccatcaacggcagccagtggggattccagtattctccgtatgtatattataatgagcactgcatcgtatttaactctcagcatgtgcctatgaagattgagcatgcgaccttctgtaagctgtttgatttcgtaaagcagttccctcattattttgtaggttccaatgcggatctgcccatcgtaggcggctccatcttaagccacgatcatttccagggcggccattacgagtttgccatggcgaaagctccggtagagagaacgttctccgtagccggtttcgaggatgtggatgccggtatcgtggcatggcccatgtctgtcatccgtctcagcggtacggatactgaccgtatcattgcactggcagatgtaatcctgaacaagtggagagaatatacggatgaagaggcatttatctatgcctacaccgataacgagcctcataacaccatcactcccattgcaagaaagagaggagacaagttcgaactggatctggtgctgcgtaacaatatcaccacagaggagcatccgctgggagtctatcatccccatgcaaagctgcatcatatcaaaaaagagaatatcggcctgatcgaggttatgggtctggcagtactgcctgcccgcctgaagggcgagatggcgcatctgaaggaagcaatcctcgccggtaaagacttaagagctgatgaggaactggcaaagcatgcagactgggtagacgagttccgtccgaaatacgatgccatcactgctgagaacatcgacggtatcgtagagaaggagatcggtctggtattcatgcaggtattggaagatgccggtgtctataagagaactgaagaaggccagaaggcgttcgatcgttttgtaaagagcttataatcatatttttgttgaatgtttgttgtacatttgttgcgaggaaaaggaattgtggtgacacaattcttttttcttagtataataatcccatgaaattcttattaacagctattaatgcaaaattcatacattccaatcctgctatttacagcctgcgggcaggtgtgggagaaaagttacagccttatgtggaactggcggaattcaccatcaatgaatctctggaaagtattctggaggggatctggaagcgtcagcccaaggtaataggattttcctgttatatctggaactggaagctgatccgggaaattctgacggaattgccgaagatcctgccggatacggagatctggctgggaggaccggaggtgacttatgatggaccggggcttttaagagagttccctcaggttaccggaattatggtgggagaaggagaagttaccttccgggaggtactgggccaatatgtgcgggaagcagaaagcaccggacagtccgaacagcaacccgaacccgacagcatagaacagcaggcagcagatcgaacgggaacgcttgcaggaaagtctgtggcagagcgctttggacagatccccggtctgtgtcttgcctccggttatacggcaccccgagaactgacggacttgaccacacttccttttctctatgaggatatggagccttttacgaatcgtatcatctattatgagaccagtagaggatgcccttaccggtgcagctattgcctgtcctccatagataaaaaagtgagactacgtgacatagatgtcgtaaaaagagaactgcagtttttcctggatcaaaacgtaaaacaggtgaagttcattgaccggacgttcaattgtgatcacaaacatgccatggagatatgggagtatatttacaaacatgacaatggcgtcaccaacttccatttcgagatttccgcggacattttgcgcgaagaagagattgtcctgctgaaccgcttccgtccgggactggcacagctggagattggggtacagtctacgaattcggagacgataagagccattcaccgtgtcatggatgtggacaagctggagaaaattgttgcggccattcacagaggacagaatatacatcagcatttggatctgatcgcgggtcttccttatgaagattatgagagcttcggcagatcctttgacagggtgtatgcaatgcagccggagcagttacagttaggcttcctgaaggtattaaagggatccgatatgcatgagcatgcacaggagtatggaattcgctatctggaactgccgccctatgaagtgttgtacacgaactggatcagctatggagagatccggagactgaaacggatcgaagagatggtagagctgtattataacagtggccagttcactcataccctgcctgtattggaaaaagcattttccggtccgtttgccatgtatgaggcactggcggattattatcaggaacagggatattttacgaacagtccggccagagcttaccggtatcagatcttattggagttcgcagcgatgaaagatccggccaaccgtgagatttacagagaacttctgacgtatgatatgtaccttcgggagaacctgaagagcaggcctgcgtttgcggcagagatcacggaagagcaaaaacagaatatccgccgtttttaccagacagaagagcaggagagacattatctttctgtctatgatcagtatgactggaaacagctaagccgaatgacacacttggaaccgttccgctatccggaacctcattatgttctgtttgactatcaggaacggaatccattaaattatgaggcaaaggtacaggtgatcaggaatccgatactataagtacaggagaagatcggttcataaaaattgaggtatgcagtcagaatatatcggaggaaccggctgcaaaatggagatcagtatgtatggcacttatgtcagtatagatttggagaccacgggactgaatcccaagagagatcggatcatagagatcggagcaatccgtgtggagcagggacagattgtggaagaattttctacgtttgtggatccggggcggaaattggaagaacggatcacagaacttacgggaatccgggacgaagaccttgcggatgcacctcagctggatgaggttttcccaaaattattggaatttatgggagaattaccgttgctgggacacagcattttgtttgattattcttttttgaaaaaggcggcagtggaccggaagattacttttgagagatcagcggtggacactttgcagattgcccggagatatctgccggaattgcctcatcgcaatctggaatatctgtgccggtattatgagatcccgcatcatgcacaccgggcgctggaggatgcgaaagcaacgaaccggttgttccgaaagctgatagaactgttttacagggaggaaaccggtggacaggcatcgacagaagctgtcggaaaatcggcaaagaagaatttatttgagccgcagccattacattttcaggtaaaaagagatacgcctgcgacgaaaccgcaaaaagagcggttatatcgtctggcagagcagcataagataactttggaggtcgatgtggaaaagcttacccgcagtgaggcgagcaggcttgcggat

SEQ ID NO: 150 - DNA, 16518 bp, unidentified
  source 1..16518: mol_type = unassigned DNA
gtgaataagacggctatctatagatgggatgatgctgccggcacgagccttcatcctagagaagatacgtgcagagaaaggatggtacacaatggacgcattaacatgtattgaaacaagaagaagtatcagaaagtatcaggagaagccaattcctcatgaagtgatggaagaaatcgttaaagaagcttctttcgcaccatcatggaagaactcccaggtagtcagatatgttgtagttgagaatcctgaattaaagtccaagattgctaatgatgcagttcttggcttcacttacaatacaggaacaatcgagcatgccgcagcactggtagtcgttacaatgatccagggcagaagcggatatgagagagacggttcctttactaccagcaaggaagaccgctgggaaatgttcgatgcaggtatcgcaacacagactttctgtctggcagcgcatgagaaaggcatcggttccgttatcatgggaatctttgatgaagctaaggttggcgaacttatcaacatcgaagaaggaagaaaagtagcagcgctggttgctgtaggttatcccgcagagacaccggaagcacctaagagaaaaacggtagaagatttggtgcgtttcatgtaattgtgcatttttcataattcaaaatgataattatgcataaaaatacaaaagaacagaaacaggtattgacatatgccggcaaagtgaatatagttataccataaaaacacagaacagaaactaatgaccgagaggagtacatggtctgaacggattcacagagagccgcaggtggtgggattgcagcagtctaaggaacatggaatggactcgggaaggtgggagcaaagagcatatgcttgagtaatgcccaacgggatttccgcccgttaccaagggaagacgtatgatagtacgtttatggagagggtgtatttttatacatcaatttaggtggtaccgcagaagtatattcaagagcttttgtcctaagcagttaggatagaagctctttttttgcgcgaataagcaagcgaagcttgcgagtctgcttattcacagaggtgatagtaaggaggtcagctcatgataataccgacatatgaacaggcgaagcaatatgaaaaagattacacatacattccagtgtgcagggagattctggcagatgatgtcaccccaatcctgatgctgcgtaagctggcagcgctggatggacagtatttcctgctggagagcgtggagggcggcaatcttggaagatattcttttctgggatatcatccgaagctgtctgtatcctgtaagaatggtgtggtgaaggtaaaagagaatggcatggtccgtattcttcccggtaaacccaaggaagccctgcagagcctgctggaacagtatcgctccccacagatagaaggtcttccgacctttacaggaggtctggttggatactttgcttatgagacgattcaatatgcagaacccaagttacatatcaagcagagtgatgtaaatgattttgaattgatgatgttcgataagcttttggcttttgaccaggtaatgcataagctgtgtatcatcgtcaatgcaaggactgctgatggtgaagcaggatacaacaaagcagtagaagagatagatgcctttatcgagactcttcgtattacagaaccgattccttatgaaaagcctcagaaagcactggagtttacctgtaatctcagcaaagaagagtattgcagcatggtagagaaaacaaagcattacatcaaagagggcgatattttccagggtgttatctccagaagatttgaagcggattatgaaggaagccttctcaatgcatacagagtacttcgaaccaccaatccttctccgtatatgtactacatgcagatcaaggatatgcagattgcaggtacttcaccagagaccatggtgaagctgaccaatggtagactgatgactttcccggtagcaggaaccagacaaagaggcaagagcatagaagaagatcaggcattggagaaggaactgctggcagacgaaaaggaatgtgcagaacataacatgctggtagatttggcgagaaatgatcttggaagaattgcagaatatggttccgtcaaagtggcagattacatggcaatccaccgtttctccaaggttatgcatatcgcaagtacagtggtaggtgagctggcaaagggtaagacctgtgcagatactatagaagcgctgcttccggcgggaacactctctggagcacccaagttcagggcttgtgagatcatagatgagctggaaccggaagccagaggtgtatatggtggggcaatcggatatatggactttagcggcaatctggatgtatgtattgcaatcagaacagcagtgaaaaaaggcaggaaggtatacgtacaggctggtgctggtatcgtggcagattccatacctgagaatgaatatcaggaatgtgcaaataaagcaggcgcggtaatagaagcaatccgactgacagaggaggtgtgtaaggcatgattttactgattgataattatgacagcttttcttttaaccttgtgcagctgataggagagcttgcagctggcagggaagaactgcgagtgattcgaaatgatgaattgtcagtagaagagatcatgaagctggaaccctcacacattgtattgtcaccaggaccgggaagaccagctgatgcaggggtgtgtgaggctctgatcagagcggtgctggagcatccgataccgcttcttggtgtgtgtctgggacatcaggcaatctgtgagacactgggaggaaagattacatatgcgccacagctgatgcatggtaagcagagcattgtaaaaacagatgacacaagtgtcatttttaaagggcttccaaaggagcttgcggtagcaagatatcattcactggtagcagataagaatatgatacctgagacattgatggtcactgcagtggatgagaagggtgaggtcatggcagtacagcacagaacattaccaatctatggtgtgcagttccatccggaatccattatgaccccacagggcgcagacatgatacgaaatttcctgtagcgatacaatgaacgatagacagacacaaggtcaggtatccatataaatgcctgaagtacagaatggaggattcgatgatgatagtagaggcaaccaagaaggtagtagagagacaggatttaacagcagcagaagcagagcaggtcatggatgagatcatgagtggtgaggcagaagctgtgaatatggcagctttcctgacagcacttcgtatgaagggggagacagtcgaagagattacggcttttgcaaagggcatgagaaagcatggaattaaagttcctgtacagggagacgtactggaaatcgtgggaaccggtggcgatgaagccaattccatcaacatcagtacaacagccagcatccttgttgcagcagcaggctataaggtagccaaacatggtaatcgaagcgtatccagtaagagtggtgcggcagattgcctggaagcccttggtgtaaagctggatttggagccggagcagaatgccaaagtcctggaagagagcaatatctgttttatgttcgcacaaaaatatcattcagcaatgcgcttcgtaggacctgtccgtaaggcgcttggaatcaggacagtattcaatatccttggacctcttgctaatccggcagaagctgatgtggagctgcttggtgtctacagcgaagagctggtagagcctatggcacatgtactggataaactgggcgtgaagcgtgcattggtcgtatatggacaggacagactagatgagatatcactaagcgcaccgaccactgttatggaagtgaaccagggtactttcaccagatatgaactgaccccagaacagtttagcatgaagagatgtgataaaagtgagctggtaggcggtgatggcgcacagaatgcccaaattacagagagcattctaaaaggagaatgtacagatgccaaggcagaagcagtgattctcaacgcaggggctggcatttatctgatgggtggagctgattccattgcagctggcatccagaaagcaagagagacaatcgcaaacggcaaagcatatgagaagctacagcagtttgttgcacttaccaatgcgtaggaaatgagggaaaatatgattttagataatctggcggcagctacgcgggcgagagttgagagaaaaaaggcacagataccactggaaacagtgaaagaacaggcattgaacctggcagcaaaggaaggcacatttacttttccctttgagaaggcggttgccaaagacggtattagttttatctgtgaggtgaaaaaggcatccccatcaaaaggaatcatagcagaggatttcccttatctggagattgctagagaatatgaaaaggcaggggctgactgcatctccgtactgacagagacagactacttcaagggtgaagacagattcttacgggaaatcaatgatgcagtacagattccaacgatcagaaaagacttcatcattgatgaatatatgatctatgaagccaaattgctgggggcttcctgtgtattgctgattgcagcactgcttgatacagagaccatcagacaatacaaggcaatctgtgatcagcttggcttgtccgcactggtggaagcccatgatgaagcagaagcagccagcgctctggcagcaggagcaagaatggttggcgtcaataaccgtaatctgaaggatttcacagtagatatccacaacagcacaaggcttcgtgaactggttccccgtaatgtattgttcgtagcagagagtggaattaagacagcggaagatattgcagagttagtcagcgctggcgtgaatggtgtactgataggagagacattgatgcgcagccctgataaagcccggatgctggatgaacttcgcagtaggatataagtagtgaggtgtaatatgcccaaggtaaagatatgtggattgaagacattagaagatgtagagattgtgaataaatatctgccggaatatgtagggtttgtctttgcaccaacgaagagattcgtaaccgatgaacaggcgttgatgatgaagcaggcattggcgccacagattcaggcagtaggggtatttgtcaatgaacccatagagcatgtgctgtcgttgtgcagccgaggaatcattgatgtgatacagctgcatggagacgagactccagaatatatcacaaaaatcaaaaacagaactgacacgcctgtcataaaagcggtcagagtacagagcagtgaacaggtaagcagtatggtgacacctttggcagagtatatgctttttgatacatataaaaaagacgcttatggtggaagcggggaacgttttccattagagattctacagaaaagcttaaaagagctggaaaaccaaggcgtgtcaatacagccgtttttcctggcgggcggactgacacctaggaatattgaggaagtacttggaacacaggattgttattgcatagatgtcagtaccggagtggagaccgacggacataaggaggaagcgaaagtacgagaactgatagagaagattcgcagatatcagaaagagaggagtaatcaaatggaacagaagaaaggacgatacgggttatacggtggacagtatattcctgagacattaattcccgcagtcaatgaagtggagaaagcatacgaatactataagaatgacccacaattcaagcaggaattacatgatctgctgacgaaatatgcaggaagaccatcattgctttattatgcagagaaaatgacaaaagatctgggtggagcaaagatctatctcaaacgtgaggatctgaatcataccggttcccataagatcaacaatgtattggggcaagtgctgcttgccaagaagatgggtaagaccagagtcattgcagagacaggagcaggtcagcatggtgtggccacagccacagcggcagcactgatggatatggaatgtgagattttcatgggaaaagaagatacagacagacaggtgctcaactgctatagaatggagcttctgggagcaaaagtacatcccgttacttcaggaacaatgacactgaaagacgctgtcaatgagaccatgcgtgaatgggcttccagaatggatgatacattgtatgtacttggttctgttatgggacctcatccttttccgatgattgtccgtgatttccagaagattatcggagaggaaatcaaagagcagctgcaggaagcagaaggcagattaccggatgctgtaattgcctgtgtaggtggtggcagcaatgcaatgggcgctttttatgaatttattcctgacacgagtgtcagattaatcggatgcgaagcggcaggacttggtgtgaacaatccaaagaatgcggcaactatcgcaaatggaagtattggtattttccacggtatgaagtcttacttctgccagaatgaatatggacagatcgcaccggtatattctatctctgccggactggattatccgggaatcggaccagagcatgctaatctttacgaaacaggcagagcacagtatgttccgattacggatgaagaagcggtagaggcttttgaatatttgtcaagaacagagggcatcattcctgcaatcgagagtgcccatgcagtagcatatggtaagaagcttgcaccgaccatggataaagaccagatcattgtaattaacatttcaggacgcggagataaggatgtagccgcaatcgccagatacaggggggtagagatctttgactagaatacagaaagcatttgataatcagaaggcattcattgcctttgtaacagggggagaccctgatgtggaaaccacaaagaagctgataccggagatggcaaaagccggagcagacctgatagagataggaattcctttttcagatcctattgcagagggcgtggtaatccaggaagcagatgtgcgtgcattaagcgcaggtactacgacagatgatttatttgatatggtaaaagaagtccgcaaggagacagatgtccctcttgtattcatgacttacatgaatccggtgtatacctatggaacagagcgttttatgaagaaatgtgcggagtgtggaattgatggcgtgatcattcctgatgtgccttttgaggaaaatgatgaagtcagtggcgcatgcgaggcagcaggcgtagatctgatatccatgatcgccccgacttccaaagagcgtatccatatgattgcaaagcaggcaaaaggtttcctgtattgcgtatcttcattgggcgtaacgggtgtgagaagccagattacaacagatattcatgctatggttgagcaggtgaaacaggtatcagacatcccctgtgccattggctttggtatttccacaccacagcaggcatatgaaatggcagctaaggcagatggagctattgtaggcagtgccattgtaaagcttgttgccaggtatggtaaagactgtattgctcctgtgtgtgaatacattaaagagatgaaagcagcagtcagcagggcagaaaattaaaaaaggttgtaatttacctgatatatagtaaaatataactagcctatatatggatttatgatgtataatctgtatacagtacactggttatttgtttatgaggagcttactatatgttggaaaataaagaaaaaattgacctgaaaaataaatgcgtttttattaccggtgtggcgggatttatcggttccaatctggctaagcgccttttgaaagaagtagagggtgtaaaagttatcggtctggataacatgagtgcctattatgatgtatctttaaaagaagccagactggcagaactgaatcagtatgaacagttttattttataaaaggcaatctggcagacagggctgcgattgattcaatttttggtcaataccagccacagatcgttgtaaatctgggagcacaggcgggggtccgctattccattacgaatccagatgcctatatagaagcaaatctgattggcttttatcatattctggaggcttgcagacattcctatgatgaagggaatactcctgtagagcacctggtatatgcctccagttcttccgtatacggctctaataagaaagtgccatacagcacggaggataaggtggataacccggtcagtctctatgctgcaacgaagaaatctaatgaactgatggcacatgcctattccaagctctataatattccatccacgggacttcgtttctttacggtatatggacctgcaggaagaccggatatggcatatttcggctttacgaataagctgttaaaaggtgaaaaaatacagatttttaattacggaaactgtaagagagattttacctatattgacgatattgtagagggtgtggtccgtgtcatgcagggagcaccaaaacgtgagaatggagaagatggcttgccgattccaccttatgcagtctacaatatcggtaatcagaatccggagaatctgttggattttgtacagatattgcaggaagaactgatacgggcaggcgtgctgccggaggattatgattttgaagcacataaggaacttgtacccatgcaggcaggagatgtgcccgtgacgtatgcagacacatcagcattggaacgtgattatggctacagaccatccacaagcctgcgtgaaggactaagacattttgcagagtggtatgcaaggttttataaataagaaggagaacaccatgagagaatttaaagacttgaaaattgcagttgccggtactggctatgtaggactttctattgcgacactgttgagccagcatcatcaggtaacagcagtagacattattcctgagaaggtagagatgcttaacaaaagaaagtctccaattcaggatgaatatattgagaaatatctggcagagaaggagctggatctgaaagcaacactggatgccaaggaagcttattctgatgcagactttgttgtgattgcagcaccgaccaattatgacagtaagaagaatttctttgatacctctgttgtagaagcagttatcaagctggtaatcgaatacaatccagaagcgattatggtcatcaaatccacgattccagttggatttactgcatctgtccgtgagaaataccactgtgacaatattattttcagcccggaatttctgcgtgagagcaaggctttatatgataacctgtatccaagccgtatcattgtcggtacagacgtggagaacgcaagactggtaaaggctgcacatacctttgcagaattacttcaggagggcgcaatcaaagaggatattgatacgttattcatgggatttacagaagcagaagcagtgaagctttttgccaatacgtatctggcattacgtgtcagctatttcaatgagctggatacctatgcagaaatgaagggactgaatacgaagcagatcatagacggtgtatgccttgaccctcgtatcggaacacactacaacaatccaagcttcggctatggcggttactgcctgccaaaggacacgaagcagttacttgccaattatgcagatgttcctgagaatctgatcgaagcaatcgtagattccaaccgtacccgtaaggactttatcgcagacagagtattggagattgcaggcgcatatggtgcaaatgacagctgggaagaaggaaaagagaaagaagtagtagtgggcgtatatcgtctgactatgaagagtaacagtgacaacttccgccaaagctccattcagggtattatgaagcgtatcaaggcaaagggcgctacggtcattatctatgagccaaccttgaaagacggagagaccttctttggcagcagggttgtgaatgacctggaggagttcaagaagcagagccaggcaatcattgccaaccgatatgacaagtgtctggatgatgtagaagataaggtatatacaagagatattttccagagggattaagggataacttaaaagggtataaggcgtttttcatgccttatacccctttactttaagtgacgccgtgcatagttaacaattcaccgcaggcacactctcgttgctcatcgctggcagcggtacataagcggctaaaatacagccgctaagtaccgaccgctctgaagcacctgcttgtgaaattgttaattatgcacggctgttacttttaaagtttagtttcgtaagtactttatttagaacaagcccctgatatcatatattctgccgtcggtggcatggaagcgatagatatttggggatgcattttcgtgtatcatgtagtaggaaccgtcgaagtacgatatgaaatagggggtaccgttgttgccgaaaaggtgatagaggttttcaaagctgcctgtggtgaagtcctccagtgttcttgcacgtaatacggtggaagcggataggtcatattggagattggtggacactgtaagaaagaaatatccgtctacaatactgatctgtaccattcctgcgatatcgggcgagaccggataggtctggagaacctcgaaggtggacttatcgaccatcatgatactgctcagctccacggccgggaacaggattacatcgcctgctattgtgaaagaacgcacatagcaatgcgccagctcagggattgcctttatctccagaagctgcagggacagggagtcaccgattcgctgataaatatacatttcacctgtcatagagctccatgcgtagaacagtttatcaacgggatcatagctgacataatgaggacggacaccgacattttcaaaggtctgaaggagtctgaagctgtcatagccctttgcaaatgtaagaatccggtcattttccgtatcggtgaccatgtaaatgtcgccatcactgcataaggcatgaggctccttcaactttctggtcatgacattccagtcgcgaagctctctggagagatcatcggaataaatgatttgattatgattggaatctacaatataataggtattgttgattttggtaatctgtgtaggcatcaacagataggaataaccgttggaggcagcagatacctgcaatgccggctggctgcacagaaccggcagaagaaccaatgccgttagtttttgcaatatattctttatacgatacataacccacctcgtaaatatattatgatacataaatgatagcatagagaaagagtcaggtaaataaatactttaaatcataccaggaggaaaaaacaatgaaatgcaggaaaccaaagaaaaataccgggatgctggtgttacttggcatactgacagtagtactgctgattctggttgtcatgactttcagattgagcaggaagtcccccatacaggagtcacaggaaacgacagagagctcagaagaggaaagcacacaggctgctgtcgaaacgacaacggctgagacaacccaagaggaaacggagtcagagacaagagaagaagcaaagcaggacggatatattatcataggtgacagccatgtcgttgtgacggatgggcttggctatggtgtatatggctctgctgtggagggcgttgtctataatgagaatttattctttgtccacacaggtcttgaccctgtcatgggaacctttgaatggcttaagggagatggtacggcgcagatacagactattatagaagagcatccgcagataggggactggaatattatcagtatacatggaacgagcatggttaccatgccggatatagccgtccagtatatagataattatgagaagtggataaatgacaccttcagccgatatcatgtgtatatggtatccattccgccattggatgagaaagcatggaaagaaaatcatcctgatgtacctcgtgataacaagagtatacaggcatttaatgagcagataaaggaagccttcccggatcattattttgattactatgactggtttctggagcatgatgattttcaggatgaaatccattatacaggcaagacgtattgtatgctttttgatgaaatcataaataaaatcaaaacgcaatcttaaatttttctaaacttaaacacttgtatggtaaaaacaacaatgttattatatatacaagtgctattttcagaattgtcagttaatgacatgtgagaaagctcattcagttttacacctgaattgaggataaataaagaaatgtacaattatgaggaggaattatggcttcattaaaagaatccctttctaagggaattaccacaattaatgtaaagaccaacagttttatggaggagtcaaaatgtaaaacttatatttcgactctggaaaaagaaattcagatcttaaaacagaacattggagagactgtatatgctaaatctgtggctggtgagagctatgaagaggaagtagccgggatgatcgggcagattcggggcaagtatgaggagatcgagcagcagaaggcagcgattgaacagcttgcagttcaggagaagcagatactgggtaatcagtccatgacagtaaatatcagatattgtgcaaattgcggtgcccagaatgcggcaaattataagttctgcagtaaatgcggaagcccgctgaactaatcattacgctacatatgtaacgctgctgtgataaagcagaaaacagcagcagttaattatgagaaatagagaaaacaaggagagaaagttatgcagtttgatcccatgacaggagaaccaatcgaggaacagcagaatgaagaaaatgtgcagtttgaccctatgacaggagagccaatcagccagacagctcaggaagaacagcctacaggcggctttgaccctatgacaggagagccaatcggccagacagctcaggaagaacagcccacaggcggctttgaccctatgacaggagagccaatcggccagacagctcaggaagaacagcccacaggcggctttgatcctatgacaggagaaccaatcggccagacaacacagcaggcgggcagttttgaccctatgacaggagcgcctgtaacacagaagccaaagagcaaggttccggttgtcgtgggagcagtagcaggcgtcgttgtacttgtagttcttctggtatttggcggaattaagtcaggacttttccttggcaaatcaggcaaggttcttctggcagcaaacaatacattaaagaagatgcctcatttcgtagagacacttgagccaatgcttggtctggtagaggacgaattcacagtagagttcagtgcgaaagcagaaggcgtaaagataggtggttcttttattaatgcaagcaagcagaagcaggtaacagccaagcttgaatatggcggagagtctatagaaggtctggcaggtgttgattccaactctttgaaattccaggttcctgatctttccaagaagctttttgtatacaattataaaaaggaaaattccggatatatcgtagatctgatcggtgacgaatatattgatacgctcaattcttcactggagcagctcgtttccggcagcaaggatactgacaaggcacagaaggacgtgaccaatgttgtaatgaaggaattaaagagcctgaaattccagtctgctgccaaggaagaattcactgtaaacgacaaagatgttatgtgcaaaggctacacgacaacaattaccggtgctaacatatggaatatcattgatggaagttatcaggcaatgcttgataattatcagtccgtaggagaagcagtagatgtattagacagctatggcgaaatcgaatcagagttatcctatctggaagatgaactggataatatggaagatatagttgttaccttctatatctataagaatcagcttgcagctatcgtcgtagaagatgaggattttgaggatgatctccagctgtgctttgaaggtggagactacagattacagaatatcacatttaagagcggttcctacagaatctccatgaaaggctctgatgatggaacaaaagagaaattcaagcttagagagaaatatggaaccgatgcatatgatattggcagcttcgagtataactacgaaagcggcaagtataagattgaggtagatggcgaggtactcagcggtaagctgtacaaggaaggcaggacactgaatctgtctattgatggtcagtatgatatccctgatatggattttgcttttaccagaggtgctaagctgcagaagttctcaggagacgaattcgatatcggtaatgctgatgcagacgatctttacgatctggtagacgatattacagatgaattaagcgactttgattatttaattgatcttttttaaaaaaaatggcaggctatgtatgggagggaaatacttatatttccctcttatttatgaggagaaaaggatatgagtatacggttgttaaacagtggtgtgatcattgggggaaaatatcagatcactgccgcattgggaggaaatccggtaggaatcacctatgcaggtactgcagtgcagactgcacagaaggtgattatcagagaatttatgccgcaggattgctgtgaaagagcggcagatggaagtatcatcaatgcagcagacgtttttgaacaggagaagcagaaatatatcgcaggtgcaaagattcttcttgccaatccgggacaggcagtgacacaggtatatgaattacttgaagaaaatggcactgtgtatacaattatggaatatgtggagggaatcagtctggatgcatatctgacacagaataagaacagattcccggtaggaagaatacaggttttgatacagcctctcctcgctgattttgctcgtttacaggaaatgggctttatacatggtaatatttcaccggacaacctgattttcagtaatgccggaagtctgaagctgacaggctttgggtatgtacagggaaaggtatcgctaaagtctgatgcatatgcagctgccgagatgttccagacacagcagccagtcagtatgtcagcagatgtttatgctctgtgtgcaagtatatacagatgtattacaggtgcggctccacaggaggcttacaggagaatgagtcaggatatgcttcagaagccatctgctctgggagtagagataccgaccagcacagaaagtgcattgatgatgggtatgaagctttctgcaaaggaacgttttcaggcaatgaaggcttttgcaagagcctttggtcaggcacaggctgccacacctgaaaagaagaagggaggcaatggtggaacgatagcacttattatcgttggatgtgttcttataataggattggctgttgctgctttcatactgtttggacagatgtccggaaaagaggcggcttctgacaatgaccagacagaagctacgacagaggcttcttcagagagtacaacagaaacgacagaagaaggctcagaatacaatcagctgctttcagaaggacgatatgatgaagtgatcaatcagatcgttacgctttcagaaactgccgatctgccggatgcaatgaaggaacagtactcacagattctgcagcaggcattggaagcgcagtattctgattttgagagcaaggttgcagacagcaggaattccaatgattatgacgctgtattttcacagattgcagaagaagaggatatgtataaccagctgcagtccaacagtctggcgtcagcgtatatagatatgcagaagcttacagataaacgtgatgaaatgaagcatgctcatgcagaatatcttatgaatgatgcaatctccgctgcagctgccaggcttgatgaaagcggtttgaatgatgcagcagcgaagctgcaggagtatgcagatgagggaattatcacgccggaagagctggaaaagagcagagaaagtgcttattccacctttgtgatcgccaaaataacggcttttaataatgcaggaactgatgcggagactattctgcagtatatcaatacgaaccttgcaaatacaggcaataacagccaggtactggaattctgggattattacaatgcgctgcttggcagaaatgtcatggatgctacaatcagacatcaatccggaaacggatatattcttgagtacagtaattcaactgagctgacaagagcagatattgattatctttcacagtacgaagtgaaattagcagtatatgaaatttttgctagacatggcaagattttcagtgatcaggcattaaatgagtatttccaggcctttaactggtatcagccatcttctgacttcgacgacagcgttctgaatgaatatgagaagcacaacctggatttactggtcagctatcagagaagcatgggatacagataa

SEQ ID NO: 151 - DNA, 24713 bp, unidentified
  source 1..24713: mol_type = unassigned DNA
tatcagacgaacaagcattgacgaatttccgcagttttttaacgtgttgaaaggagatagcggtataatagggacaaccaagaaaaaccttgattttaaagggtttcgctggcttagtcgaattttgttatgataatttttctgtatggttgtgtcgagtaagttgcgaaactgcgaaaagtgaatggtttcttggatgcttattttgacccacactataagctgaaaaattatgataaggaggtttgacctagcctgcgaatgatctttttaataagaacattcacaggctagtcgtcgtgttgaagagcttacctaataaaaataaataattatgaggagtgtgttgaaaatgggaagaaaattattaattgtagcctctaaaagatatggagattatgtgaaagagatagcagagtcaatggggtgctttgaagaaatctcctttgtagataacgacagagaaggtgctattggaaaactggaagaagcagaaactttttatcccgaatataactgtgcaatagctgcatgtgatgatggtgcaaaaagacttgaatggaataagaaattagaagcactttataatattccggttttattccatatggattctacaatttctccatcagctaacttaatgcctggttgcattgttgagccgagagcagttgttggttgtggaagcactatcggtcaggcaacagttataggtgctaatacagtagtggagccatatagctttattggagatagctgtacattaaaatctggaacgattgtgaaatcaacaagtgtacttgaaatgggaactgaaacagagcagggaactgttttatttacaccgcttacaagcaaacagtgaaaaaaataagaagtgaaaggatgaaaacctctccgattttcgtgggggggggtacacaatgaatagtcaatcaaatgaaaaaaatatggatatgaatcgtacaaaccagggtacaccgaatatacgctggatgcttgtcgggtatgacttggttgtatatgtagtagtagcaataattcttttagtcttatatggaggaatggataaattatcgcctgttggaatttttcagcaagttggcttatctgtcctgtgtatttttgcagcacgtcttttgggtaaaatttatggacaagtatggagatatggtgggattcagtgctatatccgcttgttgtttactgattttatcgcttttgtagcgtatctgggtttggaactcctgcttccagttcaaaaaattacatttgctagattgctttcactggttagcttgaatcttttaggagccttggcacttcgtatgatgtatcgctatgcatacaaatgtggaaaccaggaaactacgagaggaaagttcctttctatattattacatacattttctggaattgaagcaggaaatgaaaaggaagtacagaagatcaaagttgcgattatcggtgctggacgagttggtgtaagtctggcagaagaacttttaaataatgctgaagcagcatatataccaagatgtttcattgacattaatagagaaaaagttggacgagatatacatggtattccggtatggtcagaagatgaagcaacatttaagcgtttgggagaatttgaggtacaggaaattatttttgcaatcccatcaatggacgctaataaaaagaaggcactttatgattattacaaagatgccggatataaattgaaagtatatgattatccgactgtgtatgctgcaggagggaaaagacatcttagagaatttgatattgaagaacttttattcagaaaaccgctggtggtttctgatgaaagaacaaatgcatattacaaggataaaattgtgctgattactggcggaggcggttcgattggttctgaactgtgccggcagttggcaaaaatgcagccgaagaaaatcattatcttggatatttatgagaatggagcttatgacgttcagcaggaattgaaaatagcgtatggaaatagcttagatttacagattgaaatttgctctattactcacagaaaagcacttgaacgtgtatttgagaaatatcatccgcagatcattatcaatgctgcagctcacaaacatgtgccgttaatggagcataactgtgtggaggctatttataacaatgtatttggtacacagaatctggtagagctttgcgaggaatatggggcagaacgctttatgatggtatccacagataaagcagttaatccaactaacgttatgggtgctacaaagagaatgtgtgaaatgatcgtgcagagtgcaagtacacatggaaaagtaaaatacagtgctacaagatttggaaatgtactggggagtgcaggatcagttattccgttgtttaaacgtcagattgctaacggcggtcctgttacagttaccgacaagagaattatcagatatttcatgacaattccggaagcatcacagcttgttcttcagagtggtgcgattgcaaacaacggagaattatttgttctggatatgggacagccggttaagattatggatctggcagaaaatatgatccgtttatctggtgttcaaggaattgaaattattgaaacgggattaagaccgggagaaaaactgtatgaggaattattggttaaaacagaagaactggataaaaccgataatagcatgatttttattgaaagagatacagctttaaataaagaggagatttataaaaaaatcaaagttcttagagatgcctgtgatacaggtgatgatttgattgcaaaagaagctctccgaagtgttgtaccaacatttaagacaccagaagaggtaaataaagagattgcataaaaaataaccataacatggaacgatataaaagaggtaattacatatgtttaaagagaacaataattttgaaaaatttgaatcaaaagtttggttgagcagtccgactatgcatggtccggaaattgaatatgtaaaagaggcatatgaaacaaactggatgtctacagttggtaagaatatcaatgaagtagaaagaatggcatgtgaatatatcggttgcaaatacgcagttgcattatcagcaggaacagcgtccttacatttggcaatgaaactggcaggtattgaagcatatggtatgccaaaggttgggcatggtgcattagagggaaagaaagtattttgctctgatatgacatttgacgcaactgtaaatccggtagtttatgaaggcggagagccggtgtttattgatacagagtatgacacctggaatatggacccggttgcattagaaaaggcatttgaaatttatccggatacaaaggttgtggttgttgcgcatctttatggaactccgggtaaagttgatgagttaaatacaattattaaaaagcatggtgccattttagtagaagatgcagcagaatctatgggagctacatataaaggcgtgcagactggtacatttggaaaatataacacaatttcttttaatggaaataagattattactggtagtgctggtggatgtttcctgacagatgatgaagaagcagcaaataaggttcgtaagtggtctactcaggcgagagaaaatgctgcatggtatcagcatgaagaattgggatacaactatcggatgagtaatgtggttgctggtgttgttcgtggacagttcccttatctaaaagagcatattgcgcagaagaaagcaatttatgagagatataaagagggcttaaaaggactgccagtatctatgaacccaatggatctggaaaattctgaacccaattactggttgtcttgtctgattattgataaagaagcaatgtgcaaacaggttcgtggagagcaggatgtgtgctatgtaaaagaaacaggaaagtcttgtccaacagagattctggaagcgattgcatctattaatgctgagggacgtccgatttggaaaccaatgcatatgcagccgatttatcgtttgaatccatttgttgtcagagatggaaacggacgtgcaagatcaaatgcgtatattgcaggtggagtagctgatgcaggtatggatatttttacaagaggattatgtctgccaagtgacaataaaatgacagcagagcagcaggataggattattgaagtaattaagagttgcttcgagtaaaatagaggaatttataatggaaaaaataaagcataagccatatggaccatatgaaaaatatataaaaagaccattagatttgatatgtagtttaatagcaataatagttttttcatggttgtatctgataattgcaatattggttagagtgaaattgggttctccagtgatttttacgcaggatagaccaggaaaagatgaaaaaatatttaaattatataagtttagaacgatgacagatgcaaaagatgaaaatggaaatttattgccggatagtgaaagacttaccaaatttggaaaaatgcttagagcaactagtttagacgaactgccagaagcgtttaatatagccaaaggcgatatgagtatcttaggaccaaggccgttgctgccatcttatcttccttggtatacagaacgagaacgacatagacatgatgttcgacctggcttatctggattagcacaagttaatggaagaaattatttagactgggataaacgatttgagttggatgttcaatacactgaaaaaatcacgtttttaggagatgtaaaaattatatttcaaacggtaaaaaaattcttatcacatagcaatattgcaactgatacgaataaaacagaaggtaatatggcagaaatacgtgcggaaaagttaaagaatgaaaatagtaataagtaattaaaggagtaacacattatgaatatattgattttaagtgcaggaactagaaataaaatagttgaatactttgtaaaaacgcttgcaggaaatgggaaggttgttgcaactgatatgagtaaactggcacctgcaatatatgaagcagataagtactatattgttcctaaaatgacagatccggaatatatggacattatttttgatatatgtaaaaaagaaaacatcagtggtgttttatcattaatagatccagaattatcgttgcttgctcagaatgaaaaaaaatttgaagatatcggtgtaaaagtaattggttcttcatatgaactgtgcgaaatgtcgttagataaatatcagatgtttttgtggcttaacaaaaatggatataattgtgcaaaatcttatatggataaggaagagttttataaagatattgataataaaacaataacatatccagtatttgtgaaaccggcgagaggaagcgcaagtattgctatttcaaaagtttatgataaggaaacagtagaattgttatttgcacatgatgagggacttatgattcaagaatttcttaatggacaagaaataggtgcagatgtatatattgatatgatttctggagaaattgtttccatttttacaaagaagaaattaaaaatgagagctggagaaaccgataaagctgtttcttttaaggatgataagttatttgaccttattaagaaatttgtttcaaaagctggatatagaggccagattgatattgatatttttgatattgatggagagtattatatatcagaagttaatccacgttttggcgggggatatcctcatgcgtatgagagtggatgtgaccatatgaaactgatagaaaacaatcttgaaggaaatattaataagtcagctattggaacatataaatcagacatttatatgatgaagtacaatgaaatttgtataaagaattttgaggtgtaatatatatgaatgttttatttatgacaataggaaaaatggatgatattgaagaacatacaatatattgcgatttattacgatattttcgtgatgctggacattctgtatatacaattagtccatatgaaaaaagaacaggacttcagacagcgtatgaagaaaaaaatggaattcatatgcttcatgtgagaaccggaaatgtaacaggaatggtaagtttaatagaaaaaggtcttgcccagttgtcaatagagccaatttttattaaagcaataaaaaaatattattcaaatgttaaatttgatcttgttatgtattcgacacctccgattacgttttgcaatgcaatagaatatgtaaagcgtagagataatgcaaaaacatatcttttgcttaaagacatttttcctcagaatgcagtagatataggtatgatgagtaaatctggtattaagggacatttgtataaatttttccgtaacaaagaaaaaaagctttatggtttatcagactatattggttgtatgagtccggcaaatgtagaatatgtaaaacaaaacaacccagaaattgataattatagagtggaagtatgtccaaattgtattgaagtagtggataaatctataaacgaagaagaacgcagaagcattagaaaaaaatatgatattcctttggaaaaaagggtgtttgtatatggtggtaatttaggaaaaccacaaggaatagattttttgatagagtgtttacatagccaagaaaacagtaaagataattatttccttattgtaggagatggaactgaatatggaaaaattgaggaatttgtaaaaagtagcaatcagaataatatcagattgatgaaaagactaccacaagaagattatgatactatggtaggcgcttgcgatgtaggaatgatttttttggatcatcgctttactattcctaattttccaagtcgagtattaagctacatgcaagccaaaattccagttttagcatgtacagattcgaatacagatataggaaaaattatagaagaggctggatttggaagctggtgtgaaagtaatgatgtaaatggatttgttgagtgtgtgaataaaattatgcaaatacaaagtgtagctgaaaaagagtggaattatttaaataagtattattcgacaaggaatggatacgacataataatgaaacatttttagaaaaattatagttggttttggagaaaaataatggatttaaaacgtatagttgctaaaggaattaaaactatttttaatccggcagctttaacaaattgccaagtaaataaaaatgcgaagatttgttcaggtactcaaatgaacaattcaagtataaatagatactcatattgtggacatgattgttttattttaaattgcgatataggatcttttgtttcaatagcagataattgtcgattaggcggtgcaatgcatccaatagaaagagtttcgtcatctccggtttttcataagggaaagaatgttttgaacaaaaattttgcaaaatttgatgacatttctgataaaaaaatagtaattaactcggatgtgtggattggtgcaggagtaaccgtcttatcagggataacaataggagtgggagcagttgtgggagccgggagcgttgtcacacatgatattccaccatatgaaatatgggctggaaatcctgcaaaaaaaattagaaataggtttgatgaagaaacaagtaaagagttattgcaaacaacttggtgggaatggagcgatgaaaaaataggaaaatattctcatttgtttgacaatccacagaaattcattgaaacaatcaaggagaagtaagatgagaatattaatgctaacctcagtatataaagatgaatctttgggtaacaaggatacatctactaatattgtgaattcatttgtgaaagagtggaagaaacagggacatgaggtgcttgttattcataattcacattgttatcctagagtaattcatgaaattccggagaaattaaaaaaatctttagccgcaagaatgggattctcaatttctgattatgatgcagttaaagaaaaagaatatcaagataatggagtaaaagtatttcgttttccaataaaaaagtttattcctcattcacagcctagcgatagtgctataaaaagacaagtaaataaaattgtagctactctgaaaaaggaaaaatttgaaccagatgtaataacagggcattgggcaagtccgcaaatggagataatttcggaattaaagacaatatatcattgtaaaacagcagtagttttacatgggacaggatatattgattcaccaaagtttaatgctgaaaagtatttgaaaaatatagattcgttaggcgcaagatctctatctcaggcaaaacagataaaggaaatacttaagttagagaaattaccgtttgtgtgtaattcgggtgtaccggatgagtatttgaaaaattataggcttaacacagaaaaatataggaacattaaaacgtggaaaattacttatgttggaagattagtttcttataaaaatatagactccacaataaaggcattatcagaaataagagatgtagagtgggagtttaacattgtgggagatggtgcttcccgcacagaactggaagaattagcacaaaatctaaactgtgctgacaaagttcatttctggggacgtgtttcaagagataaagttatgcaaatacttgaagatacacacatttttgtaatgattagtacaaatgaaatatttggattagtataccttgaagctatggctgctagttgtttgactattgcatctaaaaatggtggtgtagatggtattatcatagatgctaataacgggttcctttgccatgaggcagatgatagtgaattaagacaaatcttagaaaatattacaaagtatgattgtgatacactaaagaaaattgtggaacagggatataagactgttaaagaatattcagattataaggttgcagaaaaatatttgaatgatgtgcttaattggtaacattaaaggtggaaggatataaaagaaatgttggataatcaatttgaaataatagatgagaaaaaaaatagaggttttatgcttctggttgcccttgcgtgttttctttcgaatatttctcagcttccatttttggtttcagcagggatgactcaaaaattgaatatgccgatgtggattgtattactgttatatatttttctgaaaaaaaagattagagtattctatagtacatttaagatattttttgccatatgtagtgtattcgtattaatattattgtcatctattatgacgaataatttatattttaattcttcggtattacaatgcttgattttgtcgttttttatttattgtttaggaacttttgtaggagaacagttttcggataaagatctaaaaattgtttctatgtcatatgtaatatctgcaacaatagtagccttttcgatatatgtagaatatttttctgttggatttgatattacgtcacgtcaatatgcgtacgcatcaaaaaattcaatatcgcaaattatatttacagctattgttatacttatgtttatccattttgataaatttagaattttcaatttgctaaaaatagtagtcatactttttgaggtgattttgttgatatttttaaaatcaagggctacgattgttggatttgcaatatgtttactttacattattttaggaaagcaattcaatcgtaagataaaatatttattaatggtagttgtggtaattggcacattagctttacttatgaatgaaaatttatttgatatgttcgtgggtaatatattgtttgcaggaagaaacgcttctagtttagattcgctaacatctggaagagtttctattgtatcagaattcccaactttaatagaaggacattggttgactggaataggttctttgtattttgaatgtttccctttatcatgtatattacaatttggcattattacaggaagcattataattggaatagcatatttaccagttataaaaagtttaaaacttgacagaacaaatgtttattcctcgatacttgtcattgtatgtataggttatggaataaatagcatatttgagggattagctcctataggaccaggtgttaaatgttattatatgtggttaatgtatggcatattgtttgcgcgtggtatagaaaaatatgcttaataagtaaaaggaagttcaaatgagtaaacttaaaaaaaatttaggatatcagacaatatatcaaatattaaatacatgtatcccgttaattacatcaccgtatttagcgagagtcttaggagctgaaaagcaaggggttttttcatatacacaatctatcgttaattattttacattatttgcaatgcttggcgtagtgaattatggaacgagaactattgcagattgtgggaaagataggggaaaaagaagtaagacgttttggaatatatatatgcttcaattatgctgtacagtaatttcaataagcgtgtatgcgttttatttaacccagatatgttctcaaaatatatacatagcttttttacaaattttttacttattaggatcattggtcgatatcaactggctattttttggagtagagaaatttaagataactgtgtcaagaaatatggttattcgaatttgctctgtaatattgattttaatgttggttagaaagccgagtgatctttggatatacacagtaattatgtctggtagtgcgtttcttagtaatgcaatactttggttttttgcatcaaaagagatagaattaaaagctattaaaaagatttcatggtttgaagttgctagccacataaaacctaatttagttttgtttgttccattgatggcaatgtcagtttatcacattatggataaaacgatgttgggcttattaagtacttataaacaagtaggctattactataacgctgataaaattattaacattccaataggcatattaacgggtgttgggactgttatgttaccgaggatgacttctttaaataaagcaggaaaattagaggaagcaagaaaactttttttactttctattgaattaatcattgtagttgctgtagcaatggcatgtggaatttctgcaatttcaaaagagtttacaccgttcttttttgggaagggttatgatgaatgtatcagattaattattgcactatccccggttctcgtaataaaaggtctttcagaaattgctcgaatgcaatatttaataccaaatcataaagaaaaaatatttatagagtctgtattttgtggtgcaggtgtcaattttgtggtgaattggtttttaatatcaaggttaggagcattaggagcagttattggtacattagtggcagaattggtgagttgtgtttggcaatatataaaaatgaataaatatatttcatgtttaactacaatttttaagtccatgatatatgtggtattcggagttattatgtttacaattgtaagagtagtggctctgtgctttaatgggggcattgttgctcttttctttgaagttttggcaggaataattacatatgcagtaatttgtttaatttattggaaagtaacaaaaaataaaattgtgggtttggttattaagaaaaaataaaatataaaataaaaggagaaaaaaatgagtttatttaaaggaaaaacattaatgataactggtggaacgggttcatttggaaatgctgttttgaatcgcttccttaaaacagatattggtgaaatccgcattttttcacgagatgaaaagaagcaggatgatatgcgacacgactttcaggcgagaatgccggaagtagctgataaaatcaagttttatattggagatgttcgtgatttgcagtctgtaagaggagcgatgccgggagtagattacatctttcatgcagcggctttaaaacaggtgccatcatgtgagttcttcccgatggaggcagttcgtacaaatgtcattggaacagagaatgtgcttacggcagcgattgaggaaggggtagagtctgttatttgcttatcaacagataaggcagcttatccaattaatgcaatgggaattacaaaagcaatcgaggaaaaagttgcggttgcaaaatccagaatgtctggaaaaacaaagatttgttgtactcgttatggaaatgttatgtgcagtcgtggatcagttattccactttggattgatcagattaagcagggaaatcctattacgctgacagagccatctatgacacgttttattatgagcttggaggaagctgttgatcttgtattatttgcatttgagaatggcgagaatggagatcttctgattcagaaagctccagcttgtacaattcagacacaggctgaagcagtgtgcgagttatttggtggcaagaaagaggatatcaaggtaattggtattcgtcatggagagaagatgtatgaaacacttcttacaaatgaagagtgtgctaaagctattgacatgggtaatttctatcgtgttccggctgataatcgaggcctgaattatgataaatacttcaaagatggtgatgagaagagaaataccctgacagagtttaactccaataacactaagagattgaatttagaagaaacaaaagaaaagattgcttctttggaatatattcaggctgaacttgcaaaaatggaatagtagtaaatacatatataatgaaagggggagtgcatgatgagtgacaattcaaatttcgaggttaatgcagaacgcatttatgataatttggaactgcttgagaaggggcgtgtatatgaattacaaaaagctccgggggtgccaaaatgtgcaacactggcaaatcgaataagagatgatgtggatgtgattgttaaagaacttaatgaaagagaaggtacagaagctgcagatgaagaaagatttaatttgcttgcaaaattgttgggcggtctgtatgcagaattttcggcattgtcaaaaaaacagccagatgctttaacaaatgcatttaaaacagatcaagttaatcgtgtactctctcctttaaaaaagataatggcatcagaagattctacacaatatttggacttgttactggaagctgaggacggacagacaaatggaaaaggaagaagttcatacagcgatgcagtaattattatgagtcaatataaaactgcttgtgatgagtttagattaaagtattttaataaaggatgggatcatctatggtagaggtgaggtgttctgaaatatgttgttatcagattatttgcaaataggagaagcactggagaatgtgggcgtgtttgatccggtgctggataaggataatgcgttttttattaacatccagagattaaaggaaacaactactccagagtttgaaggttcttacgaaagaatcaatgatttctttcggaaaattataaaattgttggatcgtgcagaacaaaaaaatgtaaaagacacatattttcgagctgcattcgatatatttaaattttcagaagtaaatggtatatgcttagggtttggggaaaaggcaccaggatcaggatttggacctaaaatatcaatgatggtattagaaacagcatatgatatagttaaggctggaattgatgatccagaattttttcagttgctaccattatttcaggacaatgttggaccggatcgtttaagtgatatgattgcaacattgattttaccggatatacagacatatacggagagagtgaatcaacaacttggaattataaaaaataattatccggataagttgtttaataatggattattatgcaacccggtaaaaggatatgaagtacttttgcttccgacagaaatattgcataaattgccggtagcaaaatcatgggaagaaatagattcggttattgtggagaacaatacaattcgagcgatgatgaataatgaggtagcggaacaatggacacaatgggctgctactgatcgtaaatattatttgagagagaaaatatttaaggattcagaaaagtgtaaacaggttattgaagcgtaccgagaggaaaaattggatgcatacaatccagaagaacagattgattatttccttgctaaattatggcaaaggatagagaaaagtggaatatcatggttgtcgaggtataaagatagagaaatagacagtaaaactgcttcgattgaaattttgaatcttttcaaaaattgggtagaatacaatagaggttgggaagtcatattaagtgccggaactcagaagcgtgaaaagattgtgcaacgagtgattcatttatcaggtatagcctatattcaggcaaataatttaagtctgagttgtgaagctgatgaaggaagaggtcctgttgactttaaaattagccgaggacaggatataacggttatagaagtaaaattgtcttctaatggtcaatatatgcatggatatgacatacaggtggaggaatatgcaaaagctgagcagacggacaatatggtttatgtattggttgacgttggaaatccagtaaaagtaaaaaaacttcttgatcgttataatcgagatatagatgaaggtaaaaaagttccagaagtaatcatgatagattcgacaagtaaggaatctgcaagtattacataataggaattaagacatgtatgataaatattcaaagaaagagagtgtgaataataatgggaacatatgatactgtaaaatggaaagaaaatggaaagttaaaattgttaattattgtaggaaccagaccagagattatccgtttggctgctgtaattaataaaacccgtaagtatttcgatgtgattcttgcccatacaggacagaattatgattataacttaaatggtgtattttttaaggacttaaagctggagaatccggaagtatatttgaacgctgttggagcagatcttggagaaacttgtggaaatattattgcacagagttataagctgatggcagagattaaaccagatgcagtgttggttcttggagatactaatagttgtttgtcggtgattggtgcgaagagattgcatatcccgatttttcatatggaggcaggtaatcgctgcaaggatgagtgtcttccagaagaaacaaacagacgtattgtagatattatttccgatgtgaatatggcatattctgaacatgctcgtagatatttggcagattgtggtttgccaaaggagcgtacatatgtgactggatcacctatggcagaggtattacataacaatttagcagaaattgaagcatcggatattcatagtaaactcggtttggaaaaaggaaaatatatacttctttcagcgcatcgtgaagaaaatattgatacagaaaagaatttcttatctttatttaatgcaataaataaaatggctgagaagtatgatatgccaattttatattcatgccatcctagaagtaaaaagagaatcgaatccacaggatttaaacttgatccgagagtgattcagcatgagccacttgggttccacgattataactgtctgcagatgaatgcgtttgcggtagtgtcagattctggaacattaccggaagagagtagcttctttacatcggttggacatccattcccggctgtatgtattcgtacatcaacagaacgtccggaagcattagataaagcatgttttattctttcaggaattgacgaaaagggattgttacagtctgttgatactgcagttgaaatgaacagagcaggtgattatgggattccggtgccagactatattgaagagaatgttagttcaaaagtcgtaaaaattattcagagctatacaggtgttgtcaataaaatggtttggagaaaagaagtgtaagtggaatattgcactgattctataacaaatggaataaggatgtgagttgtatgaatattttgataacaggtgcgaaaggcatggtagggactgccttagtaaataatttaaaaaatatccgggataacaaaaataggaaaagaccaaatatctcagtagaaaatatttatgagtatgatcttgattcaacgccagaagaattagatcagtattgtcagaaggctgattttgtatttaatctggcgggagtaaatcgtcctgaaaatccagaagattttatgaaagggaattttggatttgcttctgatttactgaatacattaaagaagtacaataataaagcaacaattatgctttcttcatcaatacaggctacacttgcaggacgttttggaaattcagagtatggacgttcaaaaaaggcaggcgaggaattgttttttgattatgcaaatgaaacaggagctaaggttgctgtatatcgttttcctaatttgatgggacattccagaccgaaatataattcagcagtgtcaactttttgttgggcagtggcaaatgatgaagagtttactgtaaatgatcgtaatacagaattggaattactgtatattgatgatttagtagaaggcatgtttgatctgatagaaggaaaagagaagcattgcgaatttgatggtgtggaaacggttataaaagaagatggaaaatattgctgtgttccagtgacacataaagttacattgggagaaatcgtggacttattacagcaatttaaagaacagccaacgacacttatgatgcccaaaatgccagaaggttctttcgcaaagaaattatatagtttatatttgacatatttgccaacagaaaaattcaaatatgctttaaaaatgaatgtggatgatcgtggaagttttacagaattagtgcatactcaggattgtggtcaggtgtcgattaatattagcagaccgggaattacaaaagggcagcattggcataattctaaatgggaacttttcattgttgtggcagggcatggattgattcaggaacgtaatattaatacaggagaaaaggtggaatttgaagtaagtggagataaaattgaagctatacatatgattccaggttggacgcataatatcattaatttgagtgaaacagaaaatcttgtgactgttatgacatgtaatgaaatctttaacccagaaagaccggacacattttttgaaatagtttagaaaatataaagtatgatttcaatggaggggttatgagtagattgaaaaaatatgagcaatatgaaggcattttaaaagaggtttatcatttatccaaaataagaaaatccgaagaaaaagtagatgtgatagatagaataaaatctggtcagccatatagtgataaagtatatgacttcctgatgcaaacagatttggatactgtgaaatttgttcagacagttatgtatttagggcgggattataaaattccaaaagagaatgaatatgaaattgaaagacgaatggagttagcggaagaaggaattaaagtagaacctaaaaaactggaatcagtagctgatccagataggttgattgatgaatatatggctgatctgacaaaagcgaagggatggaaaagccaagatattgaagcctatcaggttagcagcaagagtactttggataaatatatggaaagagcttttaaaatattaggtatttaattttagaaaatttaaggagagaaacgatataatgaagattgcagttgcaggaacaggatatgtaggactttctattgccacattgttatctcaaaatcatgaagtaatggcagttgatattgtcccggaaaaggtagagaaaatcaataaaaggatcagtccgattcaggatgagtatattgaaaaatacttaaaggaaaaagagttaaatctgactgccacattagatgcggaatctgcatataaagaagcggattttgtagttattgctgcacctacgaactatgacagtaaaaaaaatttctttgatacatcagcggtagaagctgtgattaagctggttattgaatataacccagatgcaattatggtaattaaatctacaattccggtagggtataccgcaagtattagagagaaattccactgtgataatattatcttcagtccagaatttttacgagagtcaaaagcattatatgataatctgtacccgtccagaattattgtgggaacagatgttgaaaatgctagacttgtaaaagctgcgaacacgtttgctggattgttacaggaaggtgcaattaaagaaaatattgataccttgataatgggatttacagaagcagaagcagtgaaattatttgctaatacatatctggctcttagagtttcatattttaatgagcttgatacttatgcagaaatgaagggactgaacacacagcagattattaatggggtgtgccttgatcctagaatcggttctcattataacaatccgtcatttggttatggtggatattgcttaccgaaagacacaaaacagcttctggcaaattatgcagatgttcctcagaatatgatgtctgcaatcgttgagtctaatagaacaaggaaagatttcatagcagatcgtgtattacagaaagctggatattatgcttatggagatgagaatacatatgatgcttctatggaaaaagaggttgtaattggtgtataccgtcttactatgaagtcaaattcagataatttccgccagtcttctatacagggcgttatgaagagaatcaaagctaaaggggcatctgtgattatttatgaaccaactttggaagatggaagtactttctttggaagcaaggttgtgaatgatctggataaatttaaagaacagagccaggcaattatcgcaaatagatatgatagttgtttggataatgtaaaagataaagtatatacaagagatttgtatggcagagattaaataatatgtaagaagatatttcagggaatgggagaaaatatgggagaactttataaatcatcattttacaataggttttatgaagtggggggtcgatattggatttttaatacgttaaatcaagggttattagaggtgccagagcagagtttccgattgctgcaaaacaataagttcgatatcgaaaaatgtgaccaagatatgttggaagatattaatgaattgatagaaaatgaatttgttgtttttgaaaattataatgaattgaaaactattaaaaatctgttccataatgataaatacaaacgagattatatgtctgttacaattattcccacgttggaatgtaattgcgcttgtttttattgttttgagaggcaacatcatataaagcaagaagatagttttgattggaataaagtaacagaaggaattctttattatattgaggaaaaacttccatatgtaaaaacacttaatattgcatggtttggtggcgaacccttattgaaaatcaaggaaatagatgatttaagtgaaaagttaattgcattgacagaaaaatatggggtggattatactgcttcaatgactactaatggcactcggttaaagtatattccagacgtgtgcaatagattaaagaaaaataaaatttctaatattcagattacattagatggagatagagaacatcataaccaaacaagaaaatatgcgagtgatagtcaaggtacatttgaagatgttgtaaaagccataaaagtattatattcagagaaatttaatgtaagtgttagaattaatctgaataaaaaaaatatacataccatttcaaatgtttttgatgttttggaatctgaagatttaaagaaagtgaaattatattttggacaattattggattattcgtctgggaatacttcggaaatctacatgaacatagaggaattttcagatacgattgtaaaattgtatgaggtattgaaggatagaggattcccttatggtatggatgatcattatccaacagcagcaagagcctgtatggcctgtcgtccagactcagcagtgattgattgtaacggaaatatttttaagtgtagaacacaaactggagaattggataaaaagataggaaatgtgttaaatccagagaatcaaactagaaaagaagcaatacaagaaataaattgggcagagtggtcaccatttgaatattcaaaatgtacagaatgtcaatttttaccattgtgtatgtgtggttgcccatatacgttatacgataatgattctactgagcctatttgcgtagagtggaaatatattacagattattttgttaccgagaaaataaaggaggcaataataaatgagcaagattaaaaaaattgttgaacctaagaaattcttgaagaatcagaatattaaaaaagagaataaaggcgagtatccatattgctattgtcctgattgtagatgtgaggaatgcaataactaattaactttttttaataggcggtagaattattataaacaggcttatcaaggtgctttttggtaagcctaagtagggatatatggagtggtttgatgaatttatatgaaggagttgcaaaatactacgatatagaagaaagtgagtatcaacaagaagatatggatttctatattgagtatgcacaaaaatgtaaaggtaatattttagaattaggatgtggaactggaagagtgagtctaaaacttgcatctttgggatatgatgttactgctttagatttatcaaaagaaatgattcagatagtagaaagaaagaaaaatgaacaaaactgtaatttggaaattatttgtggaaatatgtcagagtttcatttaaataaaaggttttcattaatattgacaccagggagatcatttcaaagtttatctgaacagaaggacattataagtgcgttgagttgcatataccaacatcttattcagggtgggctgtttattttagatttgtttcaaccggaaacatttttgaagtatcaatgtaaagatgataaaactatattttcaaaaacggttggaaatgaaaaaataacaatgaagtatgcatgtaatcatattgacaaaaaaaataagattgttcataccacacatacatatgaaatagaaaaggataataattttcatcaaactcaaaaagcgtatatggaacttagatattatgaatataaggaaatagtaacgttattagaaagtgtgggtttcaagataaaagagaaatatggctggtatgataagtgttcactcgaaaaaggacatgaaattattatagtggcagaaaaataatttgttttgttaatattgaaaaagtaattgtaagaacggggagataaaaataaaatgtgtggaatagttggttttactggaacacagcaggcagcacctattttattaagtggtctgtctaaattagagtaccgagggtatgattcggcggggatcgctgtgcgagatggggagcgtctggcacaggtggttaaagccaagggaagattaggcaatctgattgaaaaaacagatgaaggaaaagcattgataggaacatgtggaatcggacatacacgttgggcaacacatggcgagccaagtcagattaatgcacatcctcatgtatctggaaattgtacaaggtcaggttctggagaagtagaatcagaagtagttggagtacataatggtattattgaaaattatacagaacttaaagaaaaattattaaagcatggttatactttttacagtcagactgatacagaggtagtaatcaaattagtggactattattataagaagtataatctcggaccgattgatgcgattgccaagacgatggttcgtgtgcgtggttcctatgccctggaacttatgttcaaagattatccgggagaaatttgggtagcaagaaaagacagcccaatgattattggagtgacagacggcgaaacctatgtagcttctgatgttccggctattctgcaatataccagaaatgtttattatattggtaatttggaatttgccagattgacacctggagaagctcatttctttaaccttgatggggatgagattgaaaagcagacaacagaaattaagtgggatgctgaagcagcagaaaaagcaggatttgaacactttatgatgaaagagatccatgaacagccgaaagcagttcaggatactttaagttctgtcataaaaaataatgatattgatttatcatcagttgagattacagaagaggaaattcagaaatttgaacagatatatattgttgcatgtggttcagcttggcatgttggaatggcagcacagtatgtgattgaggatttggtggatgttcctgtaagagtggatcttgcatctgaatttagatacagaaaaatgccaataaataaaaactcgttggttattgttatcagccagtcaggggaaacagcggatactttagcagctttgcgtttggcaaaggaaaaaggtataacaactctggcaatcgtaaatgttgttggcagcagtattgctcgtgaggcagataaagtattttatactcttgctggtccggaaatatcagtggcaacgacaaaggcttacagcgcccaacttgtagcaatgtattgtcttgctgttcaatttgctagagttagaaataccattacagaagagcagtatggcaattacattactgagttattgacaattccggataagattcagaaaatcctgcaggataaagaaagacttcaatggtttgctgcgaaatatgcgaatgctcatgatgtgttttttgtgggcagaggaattgattatgcaatttctctggaaggcagtttaaagctgaaagaaatttcttatattcattctgaagcatacgcagccggggaattaaagcatggtacgatcagtctgatcgagccaggaacgttagtaattggtgtattgacacagagtgatctttacgagaaaaccatcagtaatatgttggagtgcaagagtcgtggtgcgtatttgatgggattgacaacatatggaaaatacgagattgaagatcaggtaaattttgcagtttacgttccgaagatagatgaacacttcgtaggaagtctggcagttgttccgttgcagctaatggggtattatgtcagcgtggctaaagggttagatgtagacaaacctagaaatctggcaaaaagcgttactgtagaataagatatgaatactctggcactggtggttgccagagtatcagtataatatgattggattgacacgaaaaaggagaaagtatgaaggtatggcttaaagcaggtgtgattatattttatgttttgggatattgttttttgagaaaacgtatgcggagggatattgtcaaattatttaaagcatatatgctatttatgattttcttgctttcgctcttgccggaaccgtttatgctgaagcatttaggggtaacgcttcgggcggataccttggtgctatggatggcagggatagaggcagtggatgcatgggatgaatataaaagagagaaaaatagaaataaaagcaatcatggcagtggtgtaaagaaaaatgggaagaacaaaaaaaaaaccagggtatgatcagaacagaataatggaacagttccagaattgtattgtagaggcatatacttcgggagtggctgatggatcaggtatttcgttaaggcaagtatcagaagagtttggcattacattgatgaaaacacgaaaaatattgattactgcaggcgtatatcatactgagaacagtgagcagattaacttaatgcgagagcagggaatgagtattacaaaaataatgaaggcaactggtttgagcaagtcatctgtacattcctatctgccatataccaaaatgatctataatgtagatgaacttagtctttacgcagaacgttgtagaatgtatagaaaaagaaagcaagctgttgagcaattacagatatgtaagggggcttccttagaatgtgtggaaaattatttgtggagtacgattgaaattttttcaggatattcctttacaacggtaaaaggattacgatttcgatatgccgtaaacggaaatgaaatacagattaatcgaaagaaaaaatctataacgagaagtagtgtgaaagttgctttaaaagcgacgttagagaagaatgaaaatataagcggaccgaaaaaattaggagtattcggtgccagttatttgtatccgatgttcttgagatttggattgattgatacagaaaggaaattgaatggacatttaccagatatggacaacatataataagcaatggtcaagatatgaaatattggcttttacaggagtattgatactggtatgtacagcgatggcagtgtgtgtacatagaaagaagttgaatataattcaggcagcagcagtattggcgttggtggtgttcctgggaattgtatttggatcaactgtatttaccaggacgggaactattcgtcagtatgaattagtaccattctggtcatggagagatattattcgctaccatgattggacgttattaaaagagaatttgctgaattgcatattgttattacctgccggagtcctgcttcccataattgcaaatcataaagtgaagtggtatcaggctctggctgtaggaatattggtatcagcaataatagagttcagtcagttgatttttatgcgtggtttatttgaatgggacgatatgattcataatggactgggatgtatgatcggctgcctttttgcaaatattttgcaaatattttcgtga

SEQ ID NO: 152 - DNA, 24235 bp, unidentified
  source 1..24235: mol_type = unassigned DNA
  misc_difference 10703: note = a, c, g, or t
  misc_difference 10704: note = a, c, g, or t
  misc_difference 10705: note = a, c, g, or t
  misc_difference 10706: note = a, c, g, or t
  misc_difference 10707: note = a, c, g, or t
  misc_difference 10708: note = a, c, g, or t
  misc_difference 10709: note = a, c, g, or t
  misc_difference 10710: note = a, c, g, or t
  misc_difference 10711: note = a, c, g, or t
  misc_difference 10712: note = a, c, g, or t
  misc_difference 10713: note = a, c, g, or t
  misc_difference 10714: note = a, c, g, or t
  misc_difference 10715: note = a, c, g, or t
  misc_difference 10716: note = a, c, g, or t
  misc_difference 10717: note = a, c, g, or t
  misc_difference 10718: note = a, c, g, or t
  misc_difference 10719: note = a, c, g, or t
  misc_difference 10720: note = a, c, g, or t
  misc_difference 10721: note = a, c, g, or t
  misc_difference 10722: note = a, c, g, or t
  misc_difference 10723: note = a, c, g, or t
  misc_difference 10724: note = a, c, g, or t
  misc_difference 10725: note = a, c, g, or t
  misc_difference 10726: note = a, c, g, or t
  misc_difference 10727: note = a, c, g, or t
  misc_difference 10728: note = a, c, g, or t
  misc_difference 10729: note = a, c, g, or t
  misc_difference 10730: note = a, c, g, or t
  misc_difference 10731: note = a, c, g, or t
  misc_difference 10732: note = a, c, g, or t
  misc_difference 10733: note = a, c, g, or t
  misc_difference 10734: note = a, c, g, or t
  misc_difference 10735: note = a, c, g, or t
  misc_difference 10736: note = a, c, g, or t
  misc_difference 10737: note = a, c, g, or t
  misc_difference 10738: note = a, c, g, or t
  misc_difference 10739: note = a, c, g, or t
  misc_difference 10740: note = a, c, g, or t
  misc_difference 10741: note = a, c, g, or t
  misc_difference 10742: note = a, c, g, or t
  misc_difference 10743: note = a, c, g, or t
  misc_difference 10744: note = a, c, g, or t
  misc_difference 10745: note = a, c, g, or t
  misc_difference 10746: note = a, c, g, or t
  misc_difference 10747: note = a, c, g, or t
  misc_difference 10748: note = a, c, g, or t
  misc_difference 10749: note = a, c, g, or t
  misc_difference 10750: note = a, c, g, or t
  misc_difference 10751: note = a, c, g, or t
  misc_difference 10752: note = a, c, g, or t
  misc_difference 10753: note = a, c, g, or t
  misc_difference 10754: note = a, c, g, or t
  misc_difference 10755: note = a, c, g, or t
  misc_difference 10756: note = a, c, g, or t
  misc_difference 10757: note = a, c, g, or t
  misc_difference 10758: note = a, c, g, or t
  misc_difference 10759: note = a, c, g, or t
  misc_difference 10760: note = a, c, g, or t
  misc_difference 10761: note = a, c, g, or t
  misc_difference 10762: note = a, c, g, or t
  misc_difference 10763: note = a, c, g, or t
  misc_difference 10764: note = a, c, g, or t
  misc_difference 10765: note = a, c, g, or t
  misc_difference 10766: note = a, c, g, or t
  misc_difference 10767: note = a, c, g, or t
  misc_difference 10768: note = a, c, g, or t
  misc_difference 10769: note = a, c, g, or t
  misc_difference 10770: note = a, c, g, or t
  misc_difference 10771: note = a, c, g, or t
  misc_difference 10772: note = a, c, g, or t
  misc_difference 10773: note = a, c, g, or t
  misc_difference 10774: note = a, c, g, or t
  misc_difference 10775: note = a, c, g, or t
  misc_difference 10776: note = a, c, g, or t
  misc_difference 10777: note = a, c, g, or t
  misc_difference 10778: note = a, c, g, or t
  misc_difference 10779: note = a, c, g, or t
  misc_difference 10780: note = a, c, g, or t
  misc_difference 10781: note = a, c, g, or t
  misc_difference 10782: note = a, c, g, or t
  misc_difference 10783: note = a, c, g, or t
  misc_difference 10784: note = a, c, g, or t
  misc_difference 10785: note = a, c, g, or t
  misc_difference 10786: note = a, c, g, or t
  misc_difference 10787: note = a, c, g, or t
  misc_difference 10788: note = a, c, g, or t
  misc_difference 10789: note = a, c, g, or t
  misc_difference 10790: note = a, c, g, or t
  misc_difference 10791: note = a, c, g, or t
  misc_difference 10792: note = a, c, g, or t
  misc_difference 10793: note = a, c, g, or t
  misc_difference 10794: note = a, c, g, or t
  misc_difference 10795: note = a, c, g, or t
  misc_difference 10796: note = a, c, g, or t
  misc_difference 10797: note = a, c, g, or t
  misc_difference 10798: note = a, c, g, or t
  misc_difference 10799: note = a, c, g, or t
  misc_difference 10800: note = a, c, g, or t
  misc_difference 10801: note = a, c, g, or t
  misc_difference 10802: note = a, c, g, or t
catacagaccttggagagggtctataaacactactactttataatacgaggaatggaacatgttcactatagatgtcatgtcgcgagtgccagtctatgaacagctcattaagcaggtggaagaccaggtgcttaaagggattatgaaggaaggcgataagatgccatcggtacggtcgttatcgatggagctgtctactaatccgaatacaatccagaaagcatacatggagctggacagaagaggaatcctggtgagtgtaccgggaaagggctcttttatatcggcagaagcgttaaagactgtcgggaatcagtctaaggaaaagctttcagatcttaaggagattgtaagaaagcttgcatacgcaggggtgagtaagagtgagataacagatatgattgaggaggtttataagaaaatatgatagaggtaaaaggtgttactaaatcatttgatgactttacagcacttgacaatgttacctgtaatatagcggagggctgtatatatggtatggttggttctaacggtgcaggaaagtctacgctgctaagagtcctgtcaggaatatataaggcagataagggagaagcaataatcgatggaattaatgtatatgagaatacatacatgaagaataagctggtgttcgttgcagatgaattattctttcttgcaggtgcgaacatgaagagcatggctaagttctatagttcaatatatgataattttgatatggacagattcacagagcttacgaaaacatttggacttgatccgtctaagagtatatcaaacttttcaaaaggaatgaagagacaggcagctataatacttgcactttcaaccagagccaagtatatgttctttgatgaaacatttgacggacttgatcctgttatgcgtaatcttgtcaagaagttaatatgtggtgatgttgcagataataacgctactgttatagttacatcacattcattaagagaattggaagacttatgcgatcatttgtcacttcttcataaaggcgggctggtgcttgacagcgatgtatttgaactaaagacgagtcagttcaaggtacaggtagcttttaaggatgattttgatgagagtaagtttgagggcattagaattacaaggtaccgtcaggagggttcagttgccaacatgatagtaagtggcgacagggaacagaccatggacattataaatgccatgaatccggtagtatttgatgtcctcccgcttacgcttgaagaagtatttacttatgagatggaagcactcggttatacatttgatgtgaagggggataagacgcatgaataataagaaagtattcagctttcatatgtttttacagacattgaagcagacaagacttgcgggctttataatgatggcggtaattacacttatatcagttgtaccgattatttcatcattaagctatattaaagaatataaacaggttaataatgtaggtggaatttcagggaattattttctggtattagtattcataattgttgtacctgttatatcattgatagtatggagttttcttaataagagaagcggcagtgatttttatcattcaattccatatacaagattgtgcatatatcttagcaagacggcagcaatacttacatggattgccggaatacttgttgtgtcatatgtatcacaggcagttttattcatggctaacaggcagtattttaatgtggattatgcaacaatgttccggatgtatctttcgatatttatatgcagccttttatgcatggcaattataaatgtatcaatatccattacaggaaacatattaaacaatatatgtgttacaggacttataatgtttcttccaagatttattatgttaatggttacagaactgactgtgtttcatggagaagcttacatgataagcaacagtggtgtggggttactggattcttccagcaatatgattgttggctgggtattttctgtatttgatatgtacaatggttcatcaggaattgcagatatggttctcagccttacaagtaacttatatacacttgtgcttgcacttatatatatagcacttggcgcacttctctttgtaaagagaaaaagtgaaacagcgggaaaagcagctaatggaaaggttctgccaatgattatcagaacacttatcggcttttcaattgcgtttataggtgtaatgatagcatatacaagtatagatagtgatgagacaatagcagttgttgtgatgtttattgtaagtgcattggttgtgtttgtttatgaatgtatagtaagtaagaagatgaatgttataaagcagtgtattccatcaattcttcttggatatgttcttgcagtggtaattggaacaggagctaattcatttggcaaatatgaggcatcgtacgaaccggatgcttcaaaacttgcatatgtatcaattcagtcaatggatatgtactatgcttcagataacggatatttcagttctatatcatcgaaggttcagtttacagatgaagagattcttaaatatgtatcggagaaatttggggcatataaagataaatgtatatcaaatggtgttcataattatatttataacggcagaggttcagtgactaattataaggttggtttcagacagaatggtgttacacattacagaaggattcagcttacagacagtgatgccaataaacttgcaagtctgttaaagaaggatgagaattttgttaaggcttatatggaacttccggatagtgacaagatttctgttaattatataacaggtaatatggaggattctgactgtaaggatatatatgaaacaattaaaagtgaaattaaacagattggttttgagaaatggtatcagatagttacttcagatgctgatactttcttgatgtcagtacggttttcaaaaaatggcgttacttatgatatggttcttccaatcagtaagaatatgccacaatcttataataagtatattagtatacggaatgaatatgccattaagaataatgaaaaagagcttggaacaatgagcgacattttaaagcagtatttaaatgacagttccagaacatgggataaatatactagtggatatgaaactctttcagcagttcttatatataatgataccagaacatatattaatctggattcgtatgtaagaaaagatgaagaaagagcacaaaaagtattaaatggacttatagagtcccttgacaagaagaattttaataaaaatataaatgcagataatccttgcattgtattgaattatgaaaagtataatcctgacaacggtaaatctgttctggcagacgctattatacagttagatggttatacaagggtagaagattatatatctgatattgattattattaattacttcttatgttgaattaatgtaatataataagtataattaatggggtggtgcggtcggcatcatcccattatttaagatagaaaaggaacaggattatgtatgattatttaatagttggagcaggactttttggttcagtgtttgcacatgaggcagcaagagcaggaaagaaggttcttgtaatagataagagaaataatattgccggtaatgtgtatacagagaagatggaaggtattaatgtgcatgtatatggtgcacacatttttcataccaataataagaaggtgtgggagtatctttcacagtttactacatttaacagattcactaattcacctgttgcgaattataagggcgagttgtattcactgccattcaatatgtataccttcaataagatgtggggtgttgtgacaccacaggaggctgcagaaagaatcgagcagcagagaaaggaagcaggaatcacagagcctaagaaccttgaggagcaggctataagtcttgtcggaactgatatatacgagaagcttattaagggatatacacagaagcagtggggcagaccatgcaacgagcttccatcattcattatcaagagacttcctgtaagacttacatttgataataattactttaacgcactttatcagggaattcctgagggtggatatactaagatggttgccaatatgcttaatgacagcgagctttccggaagcattgaggtaagacttggtgttgattatcttgcatctgctgatgctaaggaagaattagacagtcaggctgaaaaggttgtatatacaggtgcgatagacgcatactttgattataagcttggtaatcttgaataccgttcagtaaggtttgaaacagagactttggatactcctaattttcagggtaatgcagcagttaattatactgatgccgaaactccatggacaagaattattgaacacaaatggtttgagttcggtaaggatgagaatggcgacgaccttccgaagactgttatcagccgtgaatacagctctgagtggaagccgggtgatgagccatattatcctgtaaatgatgagaagaacggcgctttatatgcacagtataaggagcttgctgacgctgaaagaaaagttatattcggcggacgtcttggtgagtacaaatattatgacatggatgctgttgtggcagcagcacttgactgtgccgcaaataatatataattgcaggtggtggggtgacccataataaagtcacccctgaaaattgtcacttgccttgcggtcacataactgactatatatatcaggaccaagtcctgtctgtaattctgcatatgcttttcttaactgttcgtcagtcatatgctcacgtcttctttcgattgcattaatgctgtcgacaatcactttgtcctgattatcgtgagtttcccaattatacatggttttcccttttacgatagatttattgttgttgtctgttggaagattttctgagttattcataaattcacctcattataatatataagatagtttttatataagatattatctgcattaatttcctgtctatacttgaaaaacatggcatagcattgtaatattaaaaagtgtgtaaacatcagagggagagtataaatgttaaatctaaatggtatgctgtctattgttatgccggcttacaatgaggaaaaacttatatatcacagtatcatggaaacattgagaattgttgaaaagtttgttcctgaattggagattattgtggttaatgatggcagtaaggataataccaaagctgagatagaaagagctatcaagcaggatagccgtgtgcgtatggtaagttctgaaaagaacagaggcaagggtaatgcaataattgccggagtgtcgcaggttgaaggaaagtatgtcgcatttgttgatgcagaccttgaacttaatccatcacagttagaaggttatcttaagaaaatgcttgatgataataaagatgttgttataggctgtaagttccttaaggattccaagcttgattatccgtttaagaggaaagtgataagcatgggctattatataatgcttctagtcttgttccatcttaatgttaaggatacgcagaccgggcttaaggtattcagggttgaggcaatcaaaccggttgcacatcttataagaacatcagggtttgcttatgatatagaacttttagtggcgattcacagaaggggtttttcgatagcacagatgcctgtggaggttgtatatgtcagggattccggtgtaaagcgtatagggatgaaggatatatggcaggcattctgcgatacatgggcaatattcgggagagtttacttcaaacattattatgactaatcaggagatgcatgtaggatgaaagaattattaaataccatagcaggaaaattatcaggaatatgtaagtctgtatttgtggcacatgcaaaggcatgtattattgcaggctcagtcgtggttgcaggaagtgcagcaactgtaacaacagtagagtatgttcatcatcatagcagcaaaatgcaggtacaggcacaggagacagaagtagagactgagacagacagtaatcttgataagctgagtgagattcttaccgaaacacaaacagaatcagagacagagatagagactgcaacacaggaagagatagcagaacttgttaaagaggctgttgcagatgagaatacaagcagtaaagaattatatgagataattgataaggcagcagagaacagcagtgcaccgattccggttaaagatgttgaggaccttgagatagtagaagataattcgtcagaaccatcaagagaggagactgaggttgaggagcctgaaccagatcagccaagctcgaatgatgtatatgaaatcagccagttgacatatggtgtagatgtttcaagatggcagggagatatagactggtcagcagttgctgctgatggcatcacatttgcaatgataaaatgcggtggcggagatgatggtttatatgaagacaggaaatttcagcagaatatacaaggagcacttgctaacggtatacaggtaggtgtgtatttctattcaggtgcttctaatgcaagagaagcatacgatgaagcaagttactgtataagtcttataagggattaccagataacatatccggttgcatttgactgggaactggatggtgattatgattcagtaacagaagcctgtgagacgttttgtaatgttatatccagctatggatatcagcctatggtttattctaacagaaacagatggtataacaattttgatggggaaaagattgcaagtaagtataaagtttggatggcggcatattttggtaagttttattatgattcagtaagatggacttatggagatgatcttccaaatttcagatatcattatgatatgtggcagtatagttcaagatgttatgttgatggtatcagtggacaggtagatgtagatatagcatttttcggctatgctaactaccatgttgatactaaggacgctgtgcttacggttactaacaaggagattaagcgcacatacggcgatggaatcggaagactgacagaggaacttaacctgcttgacggagttaagggaattaatactatcggatatgatatggatatcgagtattcaatatatgatgaatcaggcaatgaatacagcgaggaggaagcaatatcaacggccgggaaatacacagtagagtaccgttttaaagaccctaagtctggctggataaagaacacagcaaagcttgagattgaggttataacagaggaatttacaggaaatgatattgttgtaaagaataacactatgtcaaaggattataatttcaggacaggagtcagttgtaagaataatcttggacaggaagctgaattaaccggagttgtaataaagaggattaatatagaaacagaggaagaagatgtactgacagagcagcaggcaatagaagaaaagtacgactttgataagtacacctatgtagcagagtatgcttttaatgtgccaggagaaggagaagttattaagaaagcagctattgtcagaggtgcagaggaataacaggaagcagatatgtgtgattcagataaagaagtagaagacataaaaacagaagaaaatgtggagaatgacgaagcatctacagagacagaagactgtgagaagaaggacttgccagaagaaccgcagtatgagattcttgatgttgaggaacttcagagaaatttcagggaaaaggttatcgatttcttcaaggttaagagtcatattgttgtgacatcagtatctgcagcagttattatagcaggagtgataacagggattgtagtaggtataagcgtaaataaagcctctaaacatcagccggcgattgtagaagcagcagagacccagactgaaatgcagactcatacacagcctgaaagtactgagccggaagaagaggaatctacagaagaaacatttgaagtgattgatgatatcatggaaaaggttgttactgacagtgctgtgactcagaaggaagatcctttgaaaaacagaaataatgcaacagctggtgaagttataaagcctgtgttatatgttgataatgcagtttcaggaagtgtaagtgtttcatcagtaaagaagtcaggaacagatgttatatacagcttaaaaggcagaaaaatacaagatttcacggcatcccagcttgataaatgcagcaagggcagtattcttgttgaagaaaacggaacacagaagcaatatacaggatatgtatatgaaactggaactgtcagtgttacaggtggctctgaaaatgttgtaaccaaatttcttataaaagatgacaatacagaaacttctacaaagcaggaagaaagtacttctgcaaaggcacctgataattcacaaaaagaaagtgtctctaatatagaagaaagttcaaaatctgagacagaaacttcaactgaaataaaaacagtttcgtatatagttatggaggttgaggcacagattgaatatatatatgctgatggatggcagaatataaaaggaaaaaattattattttgaaaattccaacgctgtaacaggctggaagaatatagatggagtgcaatattatttcaatgctgacggttcacaggggtcatcgcttgttattgatgtttctacttataatggagatattgactggaacagtgttaaagcttctggtattaactatgctatgataagagttggatatagaggatacgaaacggcaagacttgtacttgataaaagatttcatagcaatatgagccaggcaacagctgcaggaattaaagttggagcttatattgtaacccaggcagtggatactaccgaagcggttgaagaagcaagctttattgtatcagcctgcagtgaatataatatttcacttcccttggcaattgatgttgagagtgcaggtaatggaagcggacgaggagataagatatcatcatcacaaagaacagccgttataaatgcatttgcacagacagtaagaagctgcggttactcagcaatactgtatgctaacaaggactggatgaataaccgtatatatgcagggaatgtaggttgtagtgtatggcttgcacagtataacagcaaatgtacatatacaggaccatttacaatgtggcagtttactgagaaagcacgtgtgaatggtatatcaggtaatgttgacatgagtgcatggaagcattaaatgatgtgactatataaaacaactgaaaaatcgtgacatttctttaacagagtggtataatcaatcggaatgtatattcacgaggagataaaatatgagtaagaatcaagaacagatgaaggaactgattaatgatgtaaggactggaaagactgataaagaggtcttatgcaaggagatacagaaagatgtaaactgtcttatatatccggtttttggagaggattacaagaaactttctccaagagcgattattgatatatgtactaatcttgatagtatcgatgttgataagaatattatgcgtcagattgcaacaagagtttcagtatttatgtttaatcttatagataattctactattaagatagatgatgattacgagtatgagtatggcagaattaaggaagataaagaattatttgacataataaaagataattccagaatatttaaagattttaaggcatatgacaatgcacctgataatattaagtcattatcaagagtccagactattatgatggaactttacggatatgagatgcattcagttgatgagatagaaactttgctcgatatagacagtgcatttattcttaagcttattgcaatgatgaaggataatatactcggtatatcatcagttgtagagaatatgtcagattatgcttcgtttgatgaagaagagacagatgattctgatattaagatatatggtgcagagcagaaagcagcggaaacagaagctgccgacgagtacgaggcttatgagcctgaaaatgcagatttacctgataatgaatcagatgaagggacagaaaatgatgaatcggacgatgaggattctgatgaaggtgtgttatttgaatatgacatgaatggatatgagaacaatgattttgatgatgtccctgtaaggggtgtttcacttatggacaagcttacagcatttgttggaagagtgtttccgggtgtaccaagagcaagaagacgtaatgttgtatatgcgtcaatggtggtaattcttgtagtgattatccttatagtgtcaatagcagcaatggctggtggtaacagaagaaaagccaataataagaataacagcaatgaatggaaaccgatggaatatacaaccaaagcacctaaggagactgcgacaagtaaggatagttcaactgcagcacactcatctcgaacttcagcagcagaaagcactagcagcagggaagagacaacagcagctaatgagagaacaattgccgaggataagaataataaaccagcaggaagaaacgacagcgataatacctcatcaggtggagacgaaagcggagataagccatcaggtggagatgaaagcacagataagccatcaggtggagacgaaagcacagataagccatcaggtggagacgaaagcacagataagccatcaggtgnnnnnnnnnnnnnnnnnnnnnnnnnnnnnnnnnnnnnnnnnnnnnnnnnnnnnnnnnnnnnnnnnnnnnnnnnnnnnnnnnnnnnnnnnnnnnnnnnnnngaaagcacagataagccatcaggtggagacgaaagcacagataagccatcaggtggagatgaaagcacagataagccatcaggtggagacgaaagcacagataagccatcaggtggagatgaaagcggagataataagccagcaggcggagatgacagtagcaatacaccagcgggtggagatacttcagcagataactaataaacatattatctataacagatattttaaggaaggattgctatgaaatgtgtaatattagccgggggtagtggtgatagtttatggccattgtccagaaggcagtttccaaagcagtttatgaaaataaaagaaggccgttccatattacaggaaactgtagtaaggaatatgccattctgtgaggaatttataatagttaccaatgagagctataagaatattgttaatggacagatgaaagcgttccagagtcttaagtacagagttatcctcgagggtacaccgaagggaacaggagcagctgtattgttagggactatgtttgccaacccgtcagaattagttctggttgttaattcggacaacctgattgagggtgatggttataaagattcaataattgaggctaaagaatatgcaaaagaaggatatcttgcggtattaggaattaaaccagaatcacagtcatccacttatgggtacattctccgggataaagagaatgttaagaagtttattgcaagaatagatttcgatgaagatgagacagaaggtctgcttggatatgattatgatgaggggtatctgtggaacagtggaatacttgtattcagggcaggggatatgattaatgctgcaagacgtcttgcatcagaactgtacactacctgtaagacagctaagagaaaggtgccggcaataagaaggtctgtgagattttcagagacggttatgcaggctatgccacatggcagtattgaaacacttctccttgaaaaatgtgattcaataaaagtagtcgaagcacatttcgagtggatggatgtcggcaacgccagcgatttagctgaatttggaaacaatattaagtcagaatgtgttatcaagaatgactgcgataatgttaatattataaataatgcaccgaagagacttgttgtcgccaatgatttaagagatcttgtagttgttaatacagatgatgcaacatatatatcatcaaagaaatctgctgataatatcaagcagattatgaaagataatatggatacttatgaagcatttttcgattataacaggactacttataaggaatggggaatacaggagatacttaattattcacagggatataaagtcagaaagcttactgtttttccagggatgtcaatgtctcttcaccggcatgaaaagagaactgagcattggtcaatagttgaaggtattgctacaattacacttggtaatgaaactgctgattataacaaatatgaaagtgtgttcattccagtgggaacgaaacacaggattgctaataagacagacaagaatgtggtagtaatagaggttggtattggagataatatatcagatacagatcttgttaagatatataataaggataacccacaggcatctgctaattatgtaagactggataagagtcctattgcgaagcttgaacctgcatttaaggataatctgtggggtggaaccaagattcgtgatgtatatggcaagaaatgtgattatgatgtcatcggtgagagctgggaactttcagctcatcctgacggtcagagccgtatagctgagggaagatataaaggaatgctctttaatgagtaccttaatattataggaaaagaagcattaggctggaaatgtcaggcacaggacagattccctatccttataaaattcatagatgcaaagcaggcactttctatacagattcatcctgatgatgaatatgctcttgagaatgagaatgaatatggaaagaatgagatgtggtatgtagtggacagtgaaccgggatcatatctgtactgtgggctttcaagagatgcatctaaggaagaaattcttgagagaattaataataatacaatcacagacatacttaataagatagaggttaaagcaggcgatgttgttatggttaaggcaggaacaatccatgcaataggcgcaggtgtattcatatgtgagatacagcagaattctaactgtacctaccgtatgtatgattatgacagaagggacaagttcggtaatccaagagaacttcatgttaagaaagcacttgatgttgttgataaccataaatatatcaaggacaataagacagaggttgttattgcaagaaatgaacatttcacagaagaaagacttgtccagtgcaaatactttgaagtatataagtatgatgtcaatgacgaggcaaagattactgttgatgaggcatcctttgtttctgtacttttcattaatggctcaggaactattgaaactgatgattatgaaaagactatggagtttaaagcaggtgacagtttctttgtaagcgcaggtcttcgttcaataataattaagggacaggcaaccatggttgttaccagagtataaaaaaatgttttactttgttgtatattgatgtataatgacgagagaattctttttaaaggagagtatgataatgttatcagtagtaataccaacatttaatgaaagcaagaacatcagaaatcttgtagcacagattgatgttgctttgaagggtgttgattatgaaattgtctttgttgatgacagtaaggacaatacacctgatgtgattatggaagttgctaaggaatatccacaggtgagaatggaacatagaaagaatggtacaggattagcaactgctgttcttgatggttttaagcttgcaaagggcgaatatatggcatgtatggatgctgatttacagcacccaccaatcgttcttaaatatatgtatagggctatggaaagtggtgcagacttctgtatacctagccggcttattccaggtggagatgatggcggacttaactggtacagaaagttcgtatctggaacagcaagaaagataggacaggttatgttgccttgccttagaaagatatcagatcctacaagcggactctttatgttcagaagagaagttattgagaatgctgaccttcagccaattggatggaaaattatggttgaggttcttgcaatgggtacatatagcaaggttgtagagattccatacaaattccagcagagaactgaaggtgaatcaaagctttcaggaaaggttacgttagagtacttaaagcagctcaagaaccttagaaagagatataataagagcaacaggtacgaggttgaaatatggtcaactgagcgtatgatgaaaggcgacaaataatatcgtaacataagacatataataagccacagaacgagatgttatatgaagttttgtggctatattagtatagaacataaaggagataacaatggcaatattagttacaggcggtgcaggctttattggaagccacacagtagtagaacttcagaatgcaggttatgatgttgtagttgttgataatcttgttaattcaagcagaaagtctttagaaagagtcgagaagattacaggaaaggaagttacattttatgaggcagatatcaatgacgctgcagcattaaatgagatatttgagaaggaaagtatagacagtgttatacattttgctggacttaaggctgtaggtgagtcagtagcaaagccgcttgagtattatatgaataatatatccggttcacttacactttttgatgttatgagaaatcatggtgtcaagaatattatattctcatcttcagctacagtttatggagatcctgcatttgttcctattacagaggaatgccctaagggtgagattactaatccttatggaaaaactaagggaatgcttgaggagattcttacagatatccagaaggctgacccggaatggaatgtaattcttttaagatactttaacccaattggagcacatgagagcggaacaataggagagaatcctaacggagttcctaataatcttatgccatatataacacaggttgctgttggaaagttaaaggaacttggggtatttggtaatgattatgatactcatgatggaacaggagtaagagattatattcatgttgttgaccttgcacttggacatgttaaggccatagaaaagctcaatgataatccgggaattgtaatatataatcttggaacaggtaatggatattcagtacttgatatagtaaagaattttgaggctgctacaggaatacatataccatatgtaattaaggcaagaagaccaggtgatatcgcaacatgctactgtgacgcaggtaaggcagagagagagcttcactggaaagcagagcgtgatttaaagactatgtgtgctgattcatggagatggcagaagaataatcctaacggatatgatgattaaggagtagattatgggtaagtattttggaactgacggattcagaggagaagcaaatgtaactcttacagttgaccatgcatttaaggtgggaagattcttaggctggtattatggaaaaaaccatgagaatggtaaggcaaagattgttattggtaaggatacaagaagaagcagttatatgtttgagtattctttggtagccggtcttacagcatcaggagcagacgcgtatcttcttcatgttacaactacaccaagtgtttcttatgttgcaagaacagaagattttgattgcggaattatgatttctgcaagtcacaatcctttctatgacaatggaattaagcttattaatgccgcaggtgagaagatgaaagaggatgttatcgctgaaatcgagaagtaccttgatggtgagcttggagaaattccatacgcaacacgagaaaacattggatgtacagttgattacacagcaggtcgtaacagatatatgggatatcttatgagtcttgcaatttattcattcaaaggaataagagtaggtcttgatgcttctaatggtagtgcatggacacttgcaaaagctgtatttgacgcacttggagctaagacatatgttataaatgctgctccggacggaactaatattaatgcaaactgcggttctacacatattgaaggacttcaggatttagtaagaagagagcatcttgatgtaggatttgcgtttgacggtgatgctgacagatgtctgtgtgtagatgagaagggcgaggtcataacaggtgaccatattctctatatctatggatgttatatgaaggacagagataagcttgtcggaaacaaggttgtaacaacagtaatgtctaacttcggactttacaaagcatttgatgcagtaggaattgagtacgaaaagactaaggttggcgataagtatgtatatgagtgtatgtcagagaacggctaccgtataggtggagagcagtcaggacacattatattctctaaatatgcaacaacaggtgatggaattatcacagcccttaagatgatggaggttatgcttgcaaagaagaagacattgtcagagcttgcagcaccacttgttatatatccacaggttcttaagaacatcagggttacagataagacacaggcacaggatgatgcagatgttaaggctgcagttgaggcagttgccaatgcacttggcgcagatggaagaatcctcgtacgcgaaagcggaacagagcctgttgtccgtgtaatggttgaggcaggaagcacagaagagtgtgaaaaatatgtcgaccaggttatagatgtcataaagagcaagggatatgctgtgtaaggtttaaaaaatcttactatctattatttacgctcattcggaatatgtacaatcagctcccagtgtccgtctatggcttatgcttgaattatgacgagctgtgtaggagttaatgtcgctatatacataagttcagtgtgcgaaagctcgttcaaacgaagtgcgtttgctttcgcatactgtaataaactctgtagatagcggcatttactcctgctaagcgcaggaatactgaaagcataagccatagacggacactgggagcgtgcctgttcatatggtgaatgaacataaacaataactttatatgaatattttcaacacctccacataagattaattaggtcttattgtgggggtgttttttatgtgtggaaaattatggggaaaaatcatgacgtttgtgttggcattgttgataattatgcctgcgtgtgccatgacagggtgttctggcagcaaagagccagataataagaccagtgttgattatacagtggttgaaaatgcagacctgccagaagagcttaagaagcttattgaaagcaaaaaagataaagtgatgaggcttacatatacgactaaggattatacatatgttgtggccggttatggaacaagggaaacaagtggatattcaattaaggtaaatgatgtatacacaggagataatgcactgtacattgatcttaatctgataggtccggcagcgggggaagctgtaaatgaggttgacacatatccggtaatagtgcttaagatggagagacgtgaagaaagcgttgtttttaaaatgtagaatgtataggaggtcagtctgtgagactcagaacagaaaatattcatgaatatcgtttgaaatgtaatacagtggcacagattacgcttgatgatgattttaatgtgccggacacaaaagatgatattgaacttatagtgaaagaatggggaaatgtccagaccgacagtgtaaaagtaaataaggataaagctgcagttgatggggaattaaaattttcacttctttatataggtgcatcatctgactcagaaagaatgcaaccggtcaaaatgacagggaaaatgagtttttctgaaaatgtcaatctttcgggtgactgtacaggtgattatgttacatgtcaggcatcaatagaagatcttagtattaaagcaattaattcaagaaaaataagtgttaaggcgatagttacccttaaacttatatgcgagagtctgcaggatatacagatgataacgggtgtggatgagacggagaatacggacattcagcagttaaaggaagaattggaatttgtgcagcttgcagttaatcagcgtgataatttcagaataagagaaaatgtatcacttccggcaggaaaaccagagatacaagaaataatctgggatgatgtagatgtaagaaatctgaatacaaggcttgcagatgatggacttaagcttgctggtgatttagatatatttgtaatgtatataggaaatggagaaacaggaaatgtgcaatggtacgagacaacagcatcatttgaaggaagcctggatataagtggttgcaatgcagatatgattccatatgttaattttcagataattggaaagacagttgaggagcggcccgacttagatggtgaaaaccgcgatattgcagttgaagtggttcttgatatggatgtaaaagcatatgaggagcgtaagaaggatgttatagcagatatatactcgccttcatatgatatggaaatagagaatgcagatacacagctgcgttgccttgttgtacgtaataatgtatcaagccgtgtttcaggtaatctccagcttgagaattatgctgaccttatgcagatatgtaactgcacagctacggtgcagcttgacgatgtgacatataaagaaggagagctggttgcggaaggtgttgtaagtgcaaatgtattttacataacttcaagtgacagtcagccgcttggcagtgtgcatacaatcattccgtttgcaggtacagttaagattgatggtgtcagtccagattcacttgaatacaacataaagccgtcagtacagcagctttcagccacaataaacagtgcgggtgtaatagaggttaaatcatcagtttcactggatgtaattgtttttagaaactttgagtatagtggcataaaaagtgcttatatgtcagaagaaaaatgtaatctgtcaaagatgccgtcaatgactgggtatattgctgatggcactaaaacattatgggatgtatctaaaatgtatcatacaacagcagattcaataaaggcaagtaatcctaaatgtgctgatggactgtcagagtctgtgattataccacggggtaccaagcttcttcttgtgaaggcatagacataaaaagaggtacagtctgtaaagtctgtacctctttttatgtctgattatgaattcttaccggcaaagtaatcgtcgaatttcttaagaacagcatctcttgtgttctgggaaatatcagggagtttcttgccccatgttttagtggcttctttaaaacctttttcaaatgcttctttcatcttagtcatcttttcttcatcatcacctgcgagtgcctgtgcaaatgagaagattctttcagatgtctgtttaacaccccagtaaccgttttcagaaatatcttccttagcctgtgcaatagtgtcagcgtctgctgtgaagttaccgcctgcaagtgctttccacatatcatcagcagttccaatagttattccctgtttagagaacatcttagtaacgaggctttgcatctgagccatgcgtgtttcctggtcagcctttaactgggcaacaatagaagcgttagaagctttcttgttaacagctgctactaaaccttcagactgtgaagcatgttcataagttgccgctacacctgaataagctgtagtcttagaaatctctttagttgaaaccttcttatcagaaccagaaacagtatttgtttcataagcctgataatttgaattaactccgtttaatgacattatatccctccttggacttttattgtagtgtttctatagtgtatatcggtaaatgtatttctttaattaaccttctgttttttcaatttttatagtagatttcttccatattcctgtccagtagaggccataaagtatggcagcggatgttccattactgattacgacagcataccatacagattcaacccccatattaagcacattggcacatacccagagggtcagcagacggaatatccagattcttgaagcgtcgacaatcatggttatcatggtgtgaccgcttccctgaaaaagtccctgagtgacattgtaaaatgcgttgctccagcaccagaatgccataagtgagagaaaatctgttgccagcggaataactctttcatcagtcgagaaaaatgttaccatagcctgagatataaatcttcttgatagaatcaaaccaaagaataacagaaacagtgcacccatacggagtgcgtaatggtaagccttgtctgctctgtctttctgtccggcaccaatattttgtcccactatagttgatatggcggagccgataccatttgcaggcattgtaatgatgctgtttatcttgtttccgataccataagcgcttgttgcaataaatccgtaagcattaacatttttagtcataagaaggaaaccaagctgcatagtgcttccgccgattgctgttggaagtccgatttttacaatcgaacccatcttgcttttatcaaacttaaatcccctgaaattaattcttataagctgttctggtcttgtaagtacaataagtgcaatcactgcacatggaattttggcaatgagagttgcaagggcagcaccagcgataccccatttgaaaaccataaggaataacgggtctaatataagattaataacaacgccaaacatattaagaagcattggttttactgtgtcgccctgagactgtttgactgatgtgaagaggttaatggtaaacagaaaaggcagatcaagtactacaattcttatgtatgtaagtccgtatttatatatacttccttcagcaccgagccatttcacaagtcccggagagacaagccagcatataagtgcgcataatactgaaaatgcaagtgaagtaaggcagatgtggttagccattgaattagcctgttcatcctctcttgcaccgaggtactgtgatataagaattgcacctgcagttgttatgccgttaccgaaattaatcaggatattctggaaaggtgaaacaagcgtgatagccgactggttctcagtacctattcttcccagccagaaagtatctgtaagattgtacattgactggataaaactattgatcataactggaatcgcaagcatgagaattgcacgaaagagattaccattaagaatcatatttcttttatcttcacttattggttttgccatgataagcccccttgttttaataaatgtgttgagaatgtttctttaaatacagaaaaataatcaaaatactgattatttgttgacatttcaaaatcctttatacataatataagcataaaaaacagtgatttctacaattaaacgaaaaaatattctttataatacagaaaaattactataatagacgcaaatgtgtttgagataaggaggggttatatgtttcaggatatgtcgaaggattttgatatcaagaggataaaaagaagtaataccagttgtagtacaggggtaggggcacatgtgcatccgtttaatgagatattctatctttcgagcggagagtgtacaagttttattgaccacaacatttataagtttggaaaaggtgatcttgttattgttccaagcggatgtcttcacaggacaacttataatggaaaaggaatgcatgaaagaattgttataagctttagaaatgatgcaactgaatggattcagaaccagactggtaaagaacttatggaaaattgcatgaagccgggagttgttaatattcctgaaaaaagaagagattatgttgttgctctgcttgacaaactgctatttgaaaatgattctcctgatgagctgtcgccggcatttataaaggttgggctaattgaacttctgctgtttattatccgctgtaagaattatgaggaaaatgttattaaggaaattgatgtggataacaggattattcaggaggttgccacatatatatatgaacattatgcagataatctgtctttagagtatgttgcagataaatttaatcttagcaggtcatatctttcaaagaaatttaagacagcaaccggatttggattcaaggagtacattattaatgtaagaattcagaacgcctgcaatctgctgcttgaaacaaacaaatcaattactgatattgcatttgaatgtggctttaatgacagtaattattttggagatgctttcaggaaagcaaaggggatatctccacataagtaccgtaagaatgaaactttttaaaagtgcattttaaatattgtacttgatttcatacaatatctttaatataatagttttgaaaatggattttgtatacaaggttaggtaatatatggaaagtatcagattaaaggcaagagccaagattaatcttggacttgatgttattggaagacgcgagaacggatatcatgatgtaagaatggtaatgcagacggttggtttgtatgaccgtattataatgacaaggattccggaggaagagataagaattaagactaatataggatttctacctgtgaatgagaataatcttgtttataaggcaattatgcttatgaagaataagtataagctggatggtggaattgaggttgatcttaataaattcattccggttgcggcaggaatggctggaggttcaagtgatgctgcatgtgcattatttggaatgaacaggcttttcgaacttaatgttccaatgagagagcttatgaagcttggtgttgagattggggcagatgttccatactgtcttatgagaggaacagcattagctgaaggaattggagagaagcttacaaggcttccggatatgccattttgtcatattcttatagcaaagcctccggtaaatgtatcaactaagcttgtgtatgagaaactggataacacagatgttaagctgcatccagatatagatggaataattgaggctattaagttaaaggatgttgcacttgttgcttcaagaatgggaaatgttttagagtcagttacagtgccgttgtatcctgtcattgacagcattaagaaagatatgatagaacatggtgcaattaatgccatgatgagtggcagtggaccgacagtttttggaatatttccagatgaacaatcaatgatagcctgtcagcagttcttaagacagaagggtgaggcaaggcaggtgtatacaacggaaacatttacaccataatatatgtggaaataatacacattcagagtaatagagaaaggcaaggttttatatgaaaggtgaacttaagatggatgttaatgactatctcccattaagagatgtggtttttaatactttaagacaggcaattctccgtggtgagatggagccaggtgaaaggcttatggaaattcaactcgccgataagcttggagtgagtagaactcctataagagaggcaatcagaaagcttgagctggagggccttgttataatgattccaagaaagggagcagaggttgcccatataaccgagaaggacatgagagatgtccttgaggtaagagcagcacttgaggagcttgcagcaacacttgcatgccgtaacgttacaccggagcgtattgaagagcttaagatggcaaataagagattcgaggcagcaattatatctaaggatgtggttgcaattgtagatgctgatgtgaatttccatgatattatatatgcaatgacagataatcagagacttattcagattattaataacttaagagagcagatgtacagatacagactggaatatgttaaggatgcaagagcacattctattcttatcagcgaacataatgacatcattgataagctttctaagaaagatgaagaaaatactaagattgtcataagacagcatattactaatcaggaaaagggtattatcaggcttcttaacaaataatctttagattacacggaggctggctgtatatgccagcctttgttagtttgtaaatttctgtttattatgcaaatatatggatataatcccagatatgaagatatatcagggggtaaatatcatatgaatattaaaaagaaacttggaattctgcttattgttataatagttgtcagtggactggttggttattacagagtgtcttatgcaggaaatttagaggcagttacagaaggcatatctgagagtattataagattccatgtgagggccaacagtgattctcaggaagacc

SEQ ID NO: 153 - DNA, 8610 bp, unidentified
  source 1..8610: mol_type = unassigned DNA
ccctgcggcaagctggccaaaaagctgtgcaagcgcaccggcatgagcaaggtgtttttcggaaattccggtgccgaggccaacgagggtgccatcaaggccgcccgcaagtacagctttgaccactacggcaagggccgcgatgttgtgatcacgctggtcaacagcttccatggccgcaccattgctaccctgaccgccaccggtcaggaggtgttccacaactactttggccccttcaacgagggctttgtctatacaaccgccggtgacatcgagggcctccgggaactggtggaccgccatacctgcgccattatgctggagctgatccagggcgagggcggcgtgatggcgctggaccctgagtatgtgcaggctgtgcgcgccctctgtgatgaaaaggaccttgtcctcatcgtggacgaggtgcagaccggcgtgggccgcaccggcaccttcctgtgctgtgagcactacaacctcaagcccgatatcgtcacgctggccaagggcctgggcggcggcctgcccatcggtgccgttctgctgaacgaaaagaccgccgagggcatgggccccggcagccacggttccacctttggcggcaacccggtggtctgcgccggtgccaacgtggtggtggatcggatggatcagagcttcctggccaatgtcagtgagcgggccgtccagctgcgtgctggtctggccaagctgcccatggtcaagaacctttccggcattggcctgatggtgggcatcgagttctttggcggcatccaggccgcggacgtgctggccgcctgccgcgaaaagggcctgctggtgctcacggccaagagccgcctgcgcctgctgcccccgctgaccctgaccgcccacgatgtggaaaaggctctgggcatcctgaacgaggtgctgaccgagatggagcagaaggctccaaaggagcaggcatgaaacatctgctgaaaatgagcgacctctcccccgctgagctccaccacatccttgatgtggcggaggagctcaaggcagagcagaaggccgggacgaccccggcgctgctcaagggcaggagcgtggcgctgatgttctccaaaaactctacccgcacccgcaccagctttgaggtgggtgtctaccagctgggtggtctgggcaattacatgaatgccgccaccgagctgcagtccggccggggcgagcccctcaaggacaccgcccgggtgctgggccgctactacgactgcgtggtctggcgcacctaccgtcagtgtgatctggaagagtttgccgagctggccggtgtgcccgtgatcaacggcctgaccgactacgcccatccctgccaggtgctggccgacctgatgaccatccgggaacgccggggcacgctggagggccagaagctctgcttcatcggcgatggctgcagcatggcaaacagcctcatcgtaggcggcctgctggcagggatgcgtgtgacctgtgtctgccccgagggctaccgccctgccgctgacgtgctgatgttcgcccacaagtatggcgaaaagtttcacctgctcaccgaccccgccgagggtgtgaaggatgccgatgtggtggtgaccgccgcatggaacacggcccccggtacccccgaaagtgagcgccgcctgcgggatttcgcgggctttcaggtgaccagcaggctgatggagggcgcaaagcccgatgccatgctcctccactgcctgcctgcgcaccggggcgaggagatctccaccgctgtctttgaagagcacgccgacgagatctttgacgaggccgagaaccgcctccatgtgcagaaagccgtgctggccatcctgctggcaggtctgtaaaaacgagaaagagccccggggctgcagaaaattgcagccccagggctcttattgtttctctcagggtctgcggctcaggccggggccctcatcagacaccagagtaggcggagaagccgccgtcaatgggcaggcagataccggtgatgaagccggcagcctcgttgttcagcaggaacagcagggcacccaccagatccttttcgctgtcgccgaagcggcccatgggggtggcagccaggatcttttcggtgcgggcggtgggggtgccgtcctcgttgtagaggagccgtgcgttctgctcgctggcaaagaagcccggggcaatggcgttgacccggatgcccaccttgctgaagtgcactgccagccactgggtgaagttggtgacagcagccttggagccggagtaggccgggatcttggtcaggggcaggtaggcattcatgctggagatgttcatgatgttgcagccggggcggcccaccatctgccgggcaaaggcctgcgtgggcagcagggtgccgatgaagttcaggttgaacaccatctccacgccgctctcgtccagatcgaagaaggtcacggtgtcatcgtccagatccgccatctcgaagaattccttgtcggtgttggcccgggggttgttgccgccggcaccgttcaccagaatgtcgcagggacccagatccgccatcacctcctctgccacctgcaggcagttggccttgttcataacattgcaggtgtagcccttggccacgccgccttctgcctcgatcgcattggccagctccttcagcttctccatgttgcggcccagcagagccactttggctcctgcccgggccagagccttggcgaaaatggaacaaagggtgccgctggcaccggtgaccacggcaaccttgccggacaggtcggtgttcagaacattcttttccacgaggatactccttttttgatcagatggttgtggtgatacggatgattattttcaggcggacaaagcatcagaccctgccagcgcccttgtccaggatcttattgaactggaggaagaaggtggtggcggtcacggtagcggcgatgatgtcactgacgggctcggcaaggaacacgccgaacacggggttcgcgaccacatggggcaggatgaagatgagagggatgagcaggatgagcttgcgcaggcaggccagcagcaggctgaccttggcctgacccagcgccataaagctctgctggcaggcgatctggacaccggtggagaagatgcccgccatgtagatgcgcatggcccaggtggtgtaatcgatcagggaggcatccgaggtgaagatgcccgccactgcaccgggaaccagcatcatcagcagccagaagatggtggtgtagctcaggcagagggtcagctggaagcggaatgcctgcttgacgcggtctttcttgcctgcgccgaagttgaagctcatcaccggctggccgccctggcagatgcccgagatgggcatggtgcacagctgggaggcgctggtgatcacggtcatggcacccacggccacgtcaccgccgtagcgggccaggctggagctgaagctgatggacagcaggctctcggtggagagcatgacgaaggtggaaatgcccagtgccagcacgggcatgatgatcttcccttccagcttcatgtcctctttgcggatcttgaggatggtcttggggccggtgaggaagcggatgacccagatggcacccactgcctggctcagcacggtggcaatggcagcaccctttacgcccatgcccagcccaaagatgaggatggggtccagcacgatgttgatgaccgcgccgataacggtggtcagcatactgatcttggcaaagccctgcgcagtgatgaaggtgttcatgccaagcacgatcagcacgcagatggtgcccagaatgtagatgcggctgtaagccagagcgtagggcagggtggtgtcactggcaccaaacagccgcagcagggtgggtgcggcggcgtaaaagacgatggtcaggacaatcgagaagagcagcagcatggtaaagctgttgctgacgatcttttctgcctgcttcttgtcgccctggcccatggcgatggcggtgcggggcgcgccgccggagccgatgagcatggcaaaggcgttcagaagcatcaggatgggggtaaacaggcccacgccggtcagagccgccgcgccgatccccgagatgtggccgatgtagatgcgatccacgatgttgtacagcaggttgaccacctgcgccacaacggcggggatcatcagctggagcaggagctttttcacgtcacccgtgcccatatcctgctgttttttctgcgtttgtgccatggaaagtgtctcctttggtttgagcgagacggagagggctgccctcagaacgtcaggccgaagttcatctcgtagtagttgcctgcggcatcacggtaggcgtaagccttgccgttctcgtccttcatgctgtcgggcatgtaggcatcctttgcaaagccgggcacgtcgttggggctgatgcagacaccgtccgcgttcacagccagcacctcgtcgcccttgggcagggtcaggggcagcttgccaacgggagcaaagcggccgaacatcacatccagcgttgcggaggggtaggtgtcaaagccgacggtcagagcgtcggagaccttctccacattgccgacctcccaggccagcgggcagttgatgttggaaacgaccttgccgccgtgggcgtggaccgcagcagcgataccggccagacggtttgcgcccaccagagtggtctccttgtgggtctcggtggtgggtttgccgctctcgtccacgttgcagacagtcttgtcctcgcagatgtccaactccaggtagcccggggtggcgttgaagtatgcaccggactgggggctgaccatcagcagggccacctgggcctcatcgggggtgtccaccagagtgacattgcccagcatctcgcgcagggccttggtggcggcctcaccggcctcggcactcttgccaaaggcctcagcgtagaccttggtgccgtccttcaggggcagggtgccgtcgttcttcagcaggacaacggactcgcggtgcacgcgggaagcttcctcccagtcggccttggtggcaacgacctcggcggccttcctggggtcggcgtaggtgtcctcgaacataccctgacggaacagctcggtcagggtgcggctgacagcgcggttcaggctggcatcggtcagcaccagattttccttcctgaagccggcgggcaccgcgtgggtgtcgtagtagtcgttggtgccgcgggcgtagctctcctcgcccagctcgttgtccagcaggccggagatcaggtccacgccgctctgggtgacagcatagccgatgcgctcgggctcgtccagcatgtcaacgccccagcacatgttgtggacgatgccggtgtcggagttgatgtagcccttgaagcccatctggccgcgcagcaggccgtcgatgaacaccttgttgtaggcaaatccgtagggctggagctcgatggggttgccgttgaagtcctcctgcggagcgctcttctcggcgctgggcttggagtagtagggcatgatggactcggcattgtggcggatggctgcgcggaatgccgggatgtggtacttctgcagggagccgggggtagcgtagatgttccactggcctgctgcatagtgggggtcaaagccgttctcacgggcaccgccgccggggaagtgcttcacagtcatggaaacaccctcgggggtaacgccgttgctgccgccctggatgccggggatcaggtggtcgaagatctcctcaatgagctcgggatcctcgccaaaggtgccgaaggtgcgctgccaacgggggtcggtgacgcagtcggccatgtacatgtagcccttcttcaggccgcaggcattccactcgcggcggatggtgtcagcaaacttgtcgatgatgtcgatgcgtgcagtgcccttgacggcagcagcaatgcccagggtgccgggataggtggcaaacacaccggtggcatcgttcatgccgaacacgacctcgccgttctcgttgcggctgttggacatgacctgcatgggaacaaagtgatcacaggtctcggtcaggtactgcagctggttcaggtaatctgccagatcctcgggcgtggggctctcgcgcaggatgacgtggcggttgaagctcttcttgaccatgtcagaggtgctgggcagggactgggagccgaagatgctgtcggagacgttcacgggtgcctcgtccagcaggccgctttcgtctgccacgggcttgtggccgttggctgccagacggggggaaggatacttggggcccatgcgccagtcggaggtgaagatctggccgatcttctcgctggtggtcagaaccttgacataggcctcggcgcgctcagccggggtcaagcgccagtcgttgactgcgctgacggtgccggtgccgtcgatgtccttgaaatacaggccgtcctgctcgatgaccttgcgctccacggtgctgatggtggggccgttggggttctggtagcgctttacacgctcggatgctttcactgccatagtgttttctccttttcttttgaacgcagcggcccatgccacagagccgcagatgctatacctattataataggccgccgcgcggaacaactagaaaattttttggatatttccgcactttccttgtattctttttttgtgcgcggttagaatacaagcccgttttgtggaatgtgctgtactagtatcttgcaatcatgtgcaaaatgacgaacgctgttttttaaaactgttgatttcgcccaaggagagtaaaattgtcctgttttcccacaaaattttactaacagaaatttgagggatagttcataatgtatacataaaaatcccccggttcgcgatgtggcagccgcagcccacgggggaccgaatgaaaggccggagtgagtggcagcacaccggccgcagaattgaaaggagagcttctctatggcaaaggtcaaacagccgcttgaagaaaacggcatccacagagcgaaaatgtgggagatcatgatgtacgctctgaacaacacctccaccaacacctacatgatggtggtcggttacatcagctacttcctgatcggtatcgtcggtctggcatccgtgctggccggttccattgttaccatcatgcgtatctgggacggtgtcaccgacccgtttgttggtatgatggtcgataagaccaacggcaagttcggcaaaaaccgtccgttcattgtcatcggtcagatcatcatgttcgtcaccaccttcgtgatgttcaacttcatccccaagatgggcactggtgtccgctttgttgcgttcatcatcatctacatgatctacatcctgggctacacctgccagtgcgttgtcaccaagtctgctcagacctgcctgaccaacgatcccaagcagcgccccatcttcgcaatgtgcgataccgtgtacaacatcatcctgatgaacattgtcatccctgtcatcgttaccgacagcctggttcccaagttcaccctgactgctgagaacaacgctgccgagatcgcttctctggtggcacagaaccccgctctggcaggcatcgtggagaagtccggcggcagcctgtccgctttctacaaccccggcctgttcaccaccatgcagctgatgttcggcggcctgtctgcagtgtttgcagtctgcgccatcattgctctgtggcgtaaggataactccaagtacttcggtctgggcaccgcccagaaggtcggcgtgaaggattacgttgacaccctggctcacaaccgcgccatccagatgctggtggtctccgcatctaccgataagctgttcatgtccaccatgagcaactccactgttatgatctgcctgttcggcatcatcttcggcaactatgccgcattctccagctactctcagatcacctctatccccatcgctctgatctccatcctgctgatgaacaagatcgcacgtcagatgggccagaaggcatccatgatgaccggtacctatggcggcattatcggttctatcatcatcaccctgttcctggtctttgtgaaccccaagggcgatgctaccaagtttgcgctgcctgcattccgtatcatccgtcctgacacctggggcaccctgttcaacggctggactgctaccggcctgatcttcatcctgctgatcatcgcatggcgcggtgtgcaggctctgtcctcctccatcgttatcaccatgaccgctgactgcgccgactacgaagtctaccgtaccggcaagtacgtccccggcctgatgggtaccctgttcagctttgtggataagctggtctcttctctggcaaccactctggtggccctgttctactccatggtcggcttcaaggacgctctgcccgacaccctgactccgtactctgacggcatcttctgggcaaccatcggctgctttgtcctgctgcccatcgttggctggctgtgcaacgttgttgccatgcacttctatcccctgaccaaggagaagatggaagagatccaggctgagatcggccgcatcaaggctgaggctgctgcaaagcaggcttaa

SEQ ID NO: 154 - DNA, 13501 bp, unidentified
  source 1..13501: mol_type = unassigned DNA
  misc_difference 2498: note = a, c, g, or t
  misc_difference 2499: note = a, c, g, or t
  misc_difference 2500: note = a, c, g, or t
  misc_difference 2501: note = a, c, g, or t
  misc_difference 2502: note = a, c, g, or t
  misc_difference 2503: note = a, c, g, or t
  misc_difference 2504: note = a, c, g, or t
  misc_difference 2505: note = a, c, g, or t
  misc_difference 2506: note = a, c, g, or t
  misc_difference 2507: note = a, c, g, or t
aaataccccatcattcagggcggcatggccaacattgccaccggcgagtttgccgccgcctgctccaacgccggtgcactgggcatcatcggtgcgggcggcatgaatgccgataccctgcgccagaacatccgccgctgccgagagctgaccgacaagccctttggtgtaaacatcatgctcatgcacccgcaggcagatgcgtttgcccagatcgtggtggaggaaaaagtcgccgtggtcaccaccggcgcaggcaacccgggaaaatacgtttccatgtggaaagctgccggcatcaaggtgattccggtggtggctgctgccgtgctggcacggcatttggagccgctgggcattgacgccgtcattgccgagggcaccgagagcggcggccatgtgggcgagatgaccaccatggcgctggtgccgcaggtagtggatgcggtcagcgtgccggtcatcgccgcaggcggcattgccgatggccgtcagctggcggctgcgctggcactgggtgcttgcggggtgcaggtgggcacctgcctgctggcaagcgaggagtgccccattcaccccaactacaaggccgcgctgctcaaagccggggacagtgacaccatcgtcaccggtcgcaccgtgggtgcaccggtgcgtgtgctgaaaaaccgcatgagccgggagtatgtccgtcaggaaaaggcgggcgccgataagatggagctggaaaaatacacgctgggcagtctgcgccgtgccgtctttgagggcgacacggtaagcggcagcctgatggccggtcaggtggccggaatgctgcacgaggtgcgccccgtggccgacatccttgccgacctgtggcagggcgggaggcagcgcatcgccgcgctgaacaccgaatgctgacccttggcggcaagcccctgcaagtacccattttgcagggcggcatgggcgtgggcgtctcgctgggcgggctggccggtgcggtagcggcctgcggcggcatggggtgcatctccaccgccgatgcaggctaccgtgagccggattttgcccgtgacccggcggcagccaaccaccgcgccctgaccgcagagatccaaaaagcaaaggccattgccggaggtatgggtctggtagccatcaacgcgatggtagccacccgggactatgccgacgctatccgcaccgccgtagcggcgggggtggatgccgtggtctccggtgcgggtctgccgctggaactgccgggcatcgtgggcaccaaagaggtggccattgcgcccatcgtatccagcgcccgggcggcaaagctcatcctgcgccgctgggcaaagggctttgaccgtaccgccgattttgtggtcatcgagggctgcaaggcgggcgggcatctcggctttgccgaggaggacctgctggccgaccgctgccagactttggacgagattctgcccggggtgctggcggaggtaaaaccctacgaggagcaatacggccacgccatcccggtatttgtggcaggcggcgtgtacaccggtgccgatatggcacattttacgaagcttggcgctgcgggtgtgcagcttgctacccgcttgatccccacctatgagtgcgacgcctcccagacctacaaggacgtgctgctggcggcaaagccggaggatgtgcgcatcatccacagcccggtgggaatgcccggccgcgcgctgaacaccccgctggtgcaggcgctggccgagggcaagcgcttcccgcccaagcactgcgcccggtgtctcaagacctgcgaccccgccgccgtgccctactgcatcacccacgccctcatcgaggcggtgaagggcaacgtggaggaagggctcttcttctgcggcgaaaacgtgggtcggcttgaccggatgcgcaccgtgcgcgagctgatggacgaacttgtgaccgaatggaggcagaacttatgaagcttgccgtactttacgccggtcagggtgcacagcaccccggcatgggcaaggaattttacgaagcatctcccgccttccgggcggcctttgacagcgcagcgctggattttgacctgcaccgcgtctgctttgaggacccggacggcgttttgaaccagaccgaatacacccagccctgcatggtggcctttgcctgcggcgtgaccgctgtgctggccgaaaagggcgtaaagcccgcctatctggcggggctttcgctgggcgaatactccgcgctgcaggcagccggggtgttcaccgcaaagcaggccatcgagctgaccgccttccggggcaaggccatggccgaggctgcaaagggccttgcctgcggcatgaccgccgtgctgggactggacagagaaaagctgtctgcctgctgcgaacaggcggcagagacgggctgtgtgcagatctgcaactacaactgccctgggcagctggtcatcggcggcgagaaagccgccgcggggcaggctgccgcgctgnnnnnnnnnnccggtgcccgccgctgcatcccgctgaaggtcagcggccccttccacacaaagctgatggctcccgcaggggatgcgctggcacagcgctttgcgggcgagagcttcggcgccatggagacgccggtgctgttcaactgtctggggcatgaaaaggccgagaccgacagcatcccgcagctgctggtaaagcaggtgcagagcagcgtctacatggaggacactttgcgccgtctgggcgagctgggcgtggaccacattctggaagtcggccccggcaatgccctgagcggttttgtgaaaaagaccctgcccggggtggtctgcaccgcagtggagaccccggaacagctggatgcggtgctgaccgcatggaaggaagcagaatgagcgaagaaaagctgacccgcgccgccattgttaccggcggcagccggggcattggccgcgcagtgtgcgtggcactggcaaagcagggctgcaatgtggtggtgaattactgccacggcgcagggcctgcggagcagacggcagccctctgccgcgccgagggcgtgcaggcggtgactgtgcaggcggatgtatccaccgccgagggctgtaaggcactgttcgatgccgctgccgaggcctttggccgggtggatgtgctggtgaacaacgcgggcatcacccgggacaacctgattttgcgcctgaccgagcaggattttgacgcagtgctggacaccaacctgaaaagcgcctttctctgctgcaaggaggccgcccgccgcatggtgcgccagcgctatggccgcatcgtgaacctttccagcgtggtggcgctgcggggcaacgccgggcagaccaactacgccgccagcaaggcggggctcatcggtctgaccaagagccttgcccgggaactggccgcgcggaacgtgaccgtgaacgcggtagcacccggctttatcgacaccgacatgactgccgtgctgccggaggcggtgcgcaccggcatgacgcagggcatccccgcaggccgcgcaggccagccggaggatgtggcacaggcagtggcgttttttgccgcagaacaaagcagctatctcaccgggcaggtgctctgtgtggacggcggcatggcaatgtaaaggagaacccttatggaaaaacgcagagttgtgatcaccggccttggcacggtgaacccgctgggcaacaatgtggcggacagctgggcagcagcccgtgccggtaaatgcggcatcggccccatcacccagttcgacaccaccgacttcaagtgcaagctggccggtgaggtaaaggattttgaccccgagaccgtggtggacaaaaaggaagtccgcaaaatggcgcgcttcaccctgctggcactgggcgctgccgccgaagccattgcagacagcggccttgataccgaggccgagggcaaggacatcggcgtcatcctgtccagcggcatcggcggtctgcccacgatcgaggagcagcacgcccgcggcgaggaaaagggcatggagaaggtaagcccctactttgtgcccatggccattgccaacatggcagcggcgcaggtggccatccgcttcggtctgaagggcatgtgcacctgcccggtcacggcctgcgccggcggcaccaacgccgtaggcgacgccttccaccgcatccgggacggctacgagccggtgatggtctgcggcggcgcggaaagctgcatcagccccttgggcatcggcggctttaccagcatgaaggcactttccaccgccaccgacccggatgctgccagcctgccctttgacgcccgccgcggcggctttgtcatgggtgagggcagcggtgtgctggtgctggaagaactggagcacgcaagagcgcgcggcgcacacatctacgccgaggtggtgggctacggtgccaactgcgacgcctaccactttaccgcgcccgctcccggcggcgcaggtgccatcgactgcatgaagctgaccctggtcgatgccgacatcgcaccggagcaggtggaccacatcaacgcccacggcaccggcacccacatgaacgatgcctgcgagactgccgccatccacgccgtgtttggcgcacacgcaaaggagatgaccgtggtcagcaccaagagcatgaccggccatctgctgggcggcgcgggcggcatcgaggccgtgtttaccgcgctggcactgcgggaccagttcgccccgcccaccatccactacgcccagcccgacccggagtgcgatctggactatgtgcccaacaccgggcggcagcaggaaatgcagtatgcgctgagcaacagtctgggctttggcggccacaacgcctgcatcgccctgcgcagatgggagggctgacccatggcagagccccgtaccgtgcgtgaaaacgccaacactctgagcagcgtgcagatcgcggagatcctgccccaccgctacccctttgccctcgtggaccgtgttctggactacgagccggggcagtgggccatcggccgcaagtgcgtcacccgcaacgaggaattcttcaacggccacttcccggcacagccggtcatgcccggcgtactgctgctggaagcactggcacagaccggcgctgtggcagcgctgagcctgccggaaaacaagggcaagcttgcgctgttcggcggcatcaagagtgcccgcttccgcaagcaggtcacccccggggacgtgctcaccctccactgcgagctggtacagcagcacggcgctgtgggcgtaggcaaggcctcggcatgggtggacggcaagtgcgccgtcaccgcagagctgacctttgtgctgaccgacgcagcagaataaaatgaatgaaaaagagataggcgatccctttcgggaaagcctatctcttttttgtgtctgttccggtcggtttactctgcggcagctgtcccggcgtctgctgcagcagcgggggcaggctctgccgtggcggtttctgtcggggcggtcgctgcctgttccttctccatccactcccgcacgcggtcggggcggttggtgatgtaggcatcggcgctggtgcgcagcaggctgcggacggaatcttccgtgtccaccgtccacaaagacaccttgatgcccatctcgtgcagtttgtcaatgaaaccggcgtttttgtaggcggtgtggtactcacagctgacccactccggcacaaagtccagactgctgatataggcgggcagatcccgttgcgacaacaggtttttatagatctcgttcaggctctcgccgggaaagtttgcccgcagcatacttaccttatcgctcatccagcgggtcatccagctgcaattttcctcgtctgctgcgctctccggcagggcagcgtccatggcatccatgtcgtctatgccgttggtcagtcccagatccttccagatgatgggcggcggcagcagcatgctttccagctcgccgtataccagtgcacccacccgcagttcgggcagcagctgctttgcctgccgcagcagcgcgtggttgaaggaaacaaggatcacctgttctaccatctcggtctgctgcagcacctccagcacccggggcacaaagtccgggtcgttgtccatggtggatttcagttccagatgcacggtgcatcccggcatctgcctgcacagttccatggcctcctgcagggtggcgatcttctcgtcctgaaagatggcgcctttccagctgccaaaatccagttcctttaaatcgcccatggtcatatcgtagatcttgccggaaatatccgtgtgcagatcgatcatatagtcgtggtggatcacaagcccggcgtcaatggtctgctgtacgtccatctctacgccgtccgcgccaatctccatggcttttttaaaggcagtcagggtgttttccggtgcaagataggaagcaccgcggtgtgcaatgatttgtggtgtcataaattttctccgttatcggttcgtcctcacacgtttacgccccggcgctgccataccgcaaacagtgccggggcgcttgctcaggtcaggtcctcgccgtctgaagcgatgacctttttataccagtaaaaactgtccttccggctgcgggcaagggtgccgttgccgtcgttgtccttgtccacatagataaagccgtaccgctttttcatctcgccggtggaggcgctcacaaggtcgatgggcccccatgtggtgtagcccatcaggggcagaccgtcctcgttgatggccttttccatctcctcgatgtgcgcccgcaggtagtcgatgcggtagctgtcgtggatggagccgtccggctctacggtatccaccgcgcccagaccgttctccacgatgaacatgggcttttcgtaccggtcgtagatggtgttcagggtcacccgcagacccaccgggtcgatggcccagccccactcgctgactttcaggtaggggttcttcaccgatgcagacacggcgttgccttccgcattctctgccgccatcagctccttatccaccgtgatgcagcggctggaatagtagctgaaggacacaaaatccaccgtgccctcccgcagcgtgcggtcgtcctccgcctgtgtgtgcagctgcaccccggcgcgctccatccgctttttagcccacacggggtaagcgccgcgcacctgtacgtcagtaaagaagtagttgtcccggtctgcctcctgcgccgcccgcacatcctccggggcgcaggtgcgggggtagaactgacccgccgccagcatacagcccaccatagcgtccggcattttttcgtgcgccagctttaccgcctttgcgctggccaccagctcgtgatgggcggcctgatacttgacctgctccacattctcgccggggtggaataccagcccggcgccggtaaaggacaggtgcagcagcatgttgatttcattaaaggtgagccagtacttcaccttgcccttgaagcggtcgaacagcacctcgcagtagtggacataggcgtccaccatgcggcggtctttccagccgccgtattttttgatgagggcaatgggagtgtcaaagtggcagatggtgaccagcggctcaatgccgtacttatggcactcgtcaaaaatgctgtcgtagaaggccagtcctgcctcgttgggctgagcatcgtcgccgttgggcaggatgcgggtccatgcaatggacagccggaagcacttgaagcccatctctgcaaacagggcgatatcctctttataatggtgatacaggtcaatggcctcgtggctggggtagaaatgtgcgtcatcgcagcccagcatttccatatagcccgttgccaccggaaaacggtccgggccgaagggggtcacgtccaccgttgccagacccttgccgtctgcctgccatgcaccctcgcactggttggcggcggtagcgccgccccacaaaaagcccttgggaaatttgcccatactctttacctccttgtttacttttgcgcccctgcggagcgcagatatacgcatactactatgataccgcaaccggcggcgcttgtccatgactgcattttgcaaaggtgcgtgcatttggggataaagtacgacttttatcgtcaaaacgccgaaatttcctactgttttttgcgcacttttcacgataaaaacacaaaacttgcctgtttttcttttattctgttccttttaaaccgcgcggcagtatggtagaataatagggtaagaactgcgctgcgctgctgcgctgctgagaacatggaaaaatggagtgtttgattatgactgagttcaaacccatcaaagaaggcaaagtccgcgagatctacgacaatggcgacagcctgatcatggttgccaccgaccgcatttctgcgtttgacgtcatcctgaaaaacaaggtcaccaaaaagggcaccgtgctcacccagatgagcaagttctggttcgattacacccgcgatctgctgcccaaccacatgttgagcgtggatgtgcaggatatgccggagttcttccgccagccccagttcaccggcaacagcatgatgtgccgcaagctgaccatgctgcccatcgagtgcatcgtgcgcggctacatcaccggcagcggctgggcaagctaccaaaagaccggcaaggtgtgcggcatccagctgcccgagggcctgcaggagtccgataagctgcccgagcccatctacaccccctccaccaaggcagagatcggtgaccacgacgagaacatctcctacgagcagagcatcgacgtgctggagaagaagttccccggccacggtctggagtacgccaccaagctgcgcgattacaccattgctctgtacaagaagtgcgccgagtatgcactgtcccgcggcatcatcattgccgacaccaagttcgagtttggtctggacgaggacggcaacgtggtgctgggtgacgagatgctgaccccggactcctcccgcttctggccgctggagggctacgagccgggtcacagccagccctccttcgacaagcagttcgtccgcgactggctgaaggccaaccctgacagcaactacgacctgccgcaggatgtcattgacaagaccattgccaagtatctggaggcctacgagctgctgaccggcaaaaagctgtaagcgtatcccgtatccataaaaatcaaggctgcttcggaaaattttccgcagcggccttttttgcgccccgccctcttgacaaggggcggggagatgggtaatatatgtatcgtatcaaacagttttacatcgaacaatttgaacagaggaaaaccattatgtgtacacagcaccctattgaagagccctgcaagctggacccgccgtgggaagggccgcaggtcatccccgcccagctgcaccgggtggataacctgatcttccgcaggctgaaccagttttcccgcgccaacggggtagagcagaccacccccatgcacgggtggatcatcgagtatctctaccgccaccgggacgagccggtattccagcgggacatcgagcgggagttttccatcacccgctccacggtgacgaacattttgcagctgatggagcgcaagggctacatccagcggctgagcgtgccgcaggacgcccggctcaagcagctggttttgaccgaggagggcatccaacggcacgaaaagaccctgctgtccttccaccagaccgacgactatgtggccggactgctgaccgaggaggagaacgcagaactgctgcggctgctgaacaagctgcgggaagcactgaaataacgatcttttccgtcaaagcgccgaaaaaggacttgctaaattagcaattatgaacattttacgaaacgtcttgacatttaaattgttatgtataaaattgttttgtaccaaacaaataaattcaacaggagggaactcagatgatcaaaaagcttgtgtcgtatctgggcgagtataaagccgcctcgatcaagacaccgctctttgctgcgctggaagccattatggatgtgctgctgcccaccatcatggcctttatcatcgaccagggcattgaaaagggcgatatgaacgccatcatccgctacggcctgcttacctttctggtggcagccattgcgctggtgctgggcgtgctggcgggcaagtacgccgccgaggcatccaccggctttgccggaaatctgcgcgatgccatgtatgaaaacatccagcattactctttttccaacatcgacaaattctctacggcaggtcttgttacccgcatgaccaccgacgtgaccaacgtgcagaacgccttccagatgattttgcgcatgtgcgtgcgcgccccggtgcatctggtgtttgcaatgttcatggccgtggtcatcggcggcccgctgtcgctggtgttcgtggtggcagtggcctttctggtggcggtgctggctgccatcatgatccctaccttccgcatctttgaccgtgtattcaagaactacgataacctcaacgcctcggtgcaggagaatgtctctgccatccgcgtggtcaagagctttgtgcgcgagggcttcgaaaacgaaaaatacactgccgcctgcgagagcctgtacaagcagttcgtcaacgcagaaagccgcctgagcttcaacaaccccgctatgctggtggcggtgtacggctgcaacatcgcgctgagctggttcggcgcaaaatatgtgctgcacggtgctattaccaccggccagctgaacgccctgttcggctatatcatgaacatccttatggcactgatgatgctgagcacggcctttgtcatgattgccatgtccgccgcctctgccaagcgtatcgtggaggtgctggacgagcacaccgacctgcccccggcaaagcagccggtgcagcaggtggcagacggcagcatccagtttgaccacgttaccttcaagtataagcacggcagcggccagccggtgttgaacgatatcagctttaccatccggcccggcgagacgctgggcatcatcggcggcaccggcagcgcaaagtccagtctggtgcagctgatcccccgcctgtacgatgccgagagcggcaccgtgcgggtgggcggcgtggacgtgcgggattataaccttgacgtgctgcgccgcgaggtctccatggtgttgcaaaagaacgtgctgttcagcggcaccattctggataacctgcgctggggcgatgccaacgccaccgaggaagagtgcatccgcatggcaaagctggcctgcgcggatgagttcatccagcgcttcccggataagtacaatacatggatcgagcagggcggctccaacgtgtccggcggccagaagcagcgcctgaccatcgcccgcgccctgctgcgcaagcccaaggtgctgattttggacgactccaccagcgccgtggataccgcgaccgatgccaagatccgcaaggccttccgggaggagatccccggcacgaccaagatcatcattgcacagcgtatctcctcggtgcaggatgcagaccgcattctggtgctggagaacggtcagatcaacggtctgggtacccacgcagagctgctggcgaccaacgccatctatcaggaggtctacaacagccagacgcagggcggcggcgattttgacaagcagggaggtgcgcagtaatggcagtaaaagaagtacatggccccggcccgcggggcgcacgggggccgcgccccaaggtggaaaacccgggcaagctgctgaagcgcattatggatgaggtgttccgcaactatctgccccactgcatccttgtgcttgtctgcatcgtggtcagcgcgctggccaatgtgcaggccagcctgttcttgcagactttgatggacgattatatcgtgcccatgacccgccagcagaaccccagctttgcaccgctggccggtgcattggtgcggatgtgctgcatctaccttgtgggcattctggccgcatgggccaacgcccgcattatggtcaacgtgacgcagggcacgctgcgcaatctgcgcaccaagctgttcacccacatggaaagcctgcccatccggtattttgacacccatccccacggcgatatcatgtccgtgtacaccaacgatgtggataccctgcgccagatgctcagccagagcatcccgcagctggtgtccagcgtcatcaccatcgtatcggtgttcttcagcatgtgcatgctcagctggcagctgaccatcgttaccatgctcatggtggcgctgatgctgttctgctccaagcagatcgcaaaaagctcctccaagtacttcatccagcagcagcgggatctgggcaaggtgaacggctacatcgaggagatgatggagggccagaaggtggtcaaggtgttcacccacgagcagcagacccttgccggcttccgtgagttaaacgaccagctgaaggaaagcgccaagcaggccaacgccttctccaacatcatgatgccggtcaacgcccagctgggcaacatcagctacgccatctgcgcgctgactggtgcagccatggccgttggcggcgtcggcggcatgacccttggcaccgtggtggccttcctcagcctgaacaagggcttcaatatgcccatcagtcaggtgtccatgcaggccaacagcgtcatcatggcactggccggtgccgagcgtatcttcaagatgatggacgagcccagcgagaccgacgagggctatgtgacgctggtaaacgccaagtacgaccgcaacgaccagctggtggaaactgccgagcgcaccggcctgtgggcgtggaagcacccccaccacgacggcaccgttacctaccacaagctggcgggcgatattacctttacggacgtggactttggctatgtgccggaaaagacggtgctgcatgacatcaacctgtatggccgtccggggcagaagatcgcctttgtcggctccaccggtgcaggcaagactaccattaccaacctgatcaaccgcttctacgatattcaggatggcaagatccgctatgacggcatcaacatccacaagataaaaaaggccgacctgcgccgctcgctgggcatcgtgctacaggacacccacctgttcaccggcacggtgatggagaacatccgctacggacggctggaggccaccgatgaagagtgcatcgccgccgcccgtctggccaacgccgatggctttatcaagcgtctgccggagggctacaacaccatgctgaccggcgatggtgccaacctctcgcagggacagcgccagctgctggccattgcccgcgcagccgtggcagacccgccggtgctgatcctggacgaggcgacctcctccatcgatacccgcaccgaggcgctggtgcagcgcggcatggacggcctgatgtacggccgcaccagctttgtca

SEQ ID NO: 155 - DNA, 10488 bp, unidentified
  source 1..10488: mol_type = unassigned DNA
tcaacctcttacatccaaaaattgtgcctgtccgtgaagggtcagtatctcggaatccgccgggacaaagatgcagtcacctttatagaaagtgatgctgccgccgtcgtaggaaatggtcccgcagccgttgacacagagcagcacacggaacgcaataccatctgcccggtagtgtactttctgccgccgttcggtattgacgatcatgcggtagacctcaaaatacttgcagcgggtcagcagttccgaggcgactccctgccggtatttcagcacacgcagcggctggcggggttcggcgctgcttttcaggtttgccacatccagcgccttgtcgatgtgcagctcccgctttttgccgtccttgcccacacggtcataatcgtacaggcggtaggtcaggttggagttttcctggatctctgccaccagcgcacccgcaccgatggcatggactgttccggcctgaatgaagaacagatcatccttgtggatggggactttttgcagatatttcatcaccgtgccgtctgcgatcgccctgcgcatctcggcctttgtgcagttttgcttgagtccgtagaccagcttcgcatcgcgtccggcatccagcacataccacatctcggtcttgcccagctgtccgttttcattttcctgcgcatactcgtctgtaggatggacctgaacggacaaatctttctttgcgtcgatgaatttgatgaggatgggcagagtgttttcgcctttgtgccgttcgcccggatactccggatgcgctctcagcacctctgccagctcctgcctcccgaactcaccgctcaccacatagcttgggccgtccggatgggtcgaacactcccaggtctctgccagcgggtccatatcgatgttcttttcaaattcgtcattcaaacggctgccgccccagagataatccttgccggacggtcggagcaaaagaggcttattcttgttttgcatagacgcctcccacagcacctcagtattccagttcgaacttctgcttgtcgtggacgtcgatggcttcgccaagctgcacttcgatgagcttcagctcggtctcggcgatgatggtgtggcggcagcctgcggacatggtgatgacgtcgcccgccttcacattctgctccatgccgtccacgacggtcttgccctcgcctgcaatgaccgtccagacctcgtcccggtgctggtggctatggtagttcatccggtggcctgcattcagggtcactttgatggtcatggaagccttgtcgatgtcgatgaccttgaagctgccccaggatttttccgcgaacatgacccgatggtcgagcatgttgacaaagggcttgatgtagctggactgctccttatcggacaccagaatgccctccgggctggcagagaccaccacatccttcaggcccatgcagaggatgggaacgtccagttcattgaccacgtggacattctcgcacttctcattgagcattgcctcgcctacgacgtggctgtccatcgcctcggtcagggtgttccaggtgccaaggtctttccaagtgcctgcaaagcgcatgacctcgatctccggctcatgctcgaccaccgcgtagtcaaagctgattttattgagggtgtcatacttattgaacaggtcctcgtagtccacgaaatcgatcagctcatgggcgcggttcagcacatagcccagcttgaacgcaaacacgtcgccgttccagagagcaccctttgcaatgtagtcctttgccacttcctgcgtgggcttttccttgaacatggacaccttgctgacctgctccttgccgatggggatgatgtagccgtatttctcgctggggtaggtcggctcaatgcccatcaggaccagatttgcactgctgacagcggcacggtctcccagtgctttcagtgcctcaaagtagtcgttctccacataggggtctaccgggcagacgacaacggattcttcctcaccgacgccctgcacgtccttcagataggcagcagccagcgcaatagccggggaggtatcccggcggcaaggctccacactgatgcccacttcctcgcccagctgattgcggatggccgagacctgagacttggaggtcgcaatggtgaccgttgcatcggtatcgaccgtcttgatttgacgatatacgcgctggatcatagattccagctcaccgtcttctcggtggaagatcttgatgaactgtttggagcgaatatcgttggaaagcggccacagacgctgaccggaaccaccggacaataacaccagattcataattttttctcctgtcatctagcaaaaaaggccgtggccctgcacggacacacgaccctttcaaatcgtttattttaacgctctgcacgcatcgggttgttcaggaagtcctcataggacaagcgcaggccgtcttccagctcggtcttgtaggtccagcccagattggtggccttggacacgtccagcagcttgcggggcgtaccattgggcttggtgctatcccacttgatctcgccggtgtagcccacgaccttggcgaccagctcggtcagctccttgatggtcagctccttgccggtaccagcgttgaccgtctcgttgccggagtagttgttcatcaggaagacgcacaggtttgcaaggtcgtccacatataggaactcacgcagcggagaaccatcgccccagcaggtaacgctgggcagattctgctccttggcctcatggaaacgacggatgagcgccggcaccacatggctgtgggtgggatgatagttgtcgttggggccataaagattggtgggcatgacggagatatagtcagtgccgtactgacggttcaggaactcgcagtacttcaggccgctgatcttagccagtgcataggcttcgttggtcttttccagttcgctggtcagcaggcagctctcctgcatgggctgaggagccatgcggggatagatgcaggaggagcccagaaattccagcttcttgcagccgtttttccatgcagaatggatggcgttcatctccagcgtcatgttgtcatacatgaagtcggccagagcctcctgatttgccacgatgccgccgaccttggcagctgccaggaacacatactccggcttctcctgcgcgaagaactcttccacagcgtcctgacgggtcaggtccagctccttgtgagtgcgggtgatgatattggtgtagccctgacgctgcagctcacgaacgatagccgaaccgaccatgccgcgatgacctgcaacataaatcttagcattcttttccatcataataagattgccttctttccaaattacagaactgccttgagtgccttttcgcgctttgcacgctcacggtcgtgcttggccatgatctcgaccagctgctcgtagctggtcttctgcgggttccagcccagaacggtcttggccttggtggggtcgccccacaggttgtccacatcggtgggacggaaccactgaggattcacgcagaccagcatcttgccggtggcaacatcgtagcccttctcatcaatgccggtgccttcccagcggagggtgatgccgttggcggcaaaagccttctcggtgaagtcgcggacagtgtgctgcacgccggtagcgatgacgaagtcctcgggcttatcctgctgcatgatcagccacatgcactcgacataatccttagcgtaaccccagtcgcgcagagaatccatgttgcccagttccagatgatcctgcaggccctcggcgatacgacctgcagccagtgtgatcttgcgggtaacgaagttctcaccgcggcgctcggactcatggttgaacagaatgccgttgacagcgaacatgccataagcatcgcggtactccttgaccatccagaagccatactgctttgcaactgcatacggagaatagggatggaacggagtggtctcacgctggggaacttcctccaccttgccgtacagctcagaggtggaagcctgatacaccttgcaggtcttggtcaggccgcagacacggacggcctccagcacacgcagaacgcccaatgcatccacatcgccggagtattcgggtgcatcgaaggagacttgaacatggctctgtgcggccagattgtagatctcgtcgggcttgatctcgcctaccagacggatgaggccggaggaatcagacaggtcgccgtcatgcagatggatagcatttttctcgatcaggtggtcgatgcgggcggtgttggagatggatgcgcggcggacaatgccgtggacttcataccccttctccagcaggaactctgccagataggagccatcctgacccgtgatgccggtaatcagtgcttttttcatgtgttttattcctctctcaaaaaacgatttatcttttgatgtattgagtatatttttatcgtacaattatattttatagattttggtggcttacctgaaatgctaaagcagtgttctattagcacaatattggtttttgtcaatcagctggtcggattgcttcttagctcgtcctgtttcactggcacctcactttgaaaggccaactgcctttcaacaaccttttccttgatttcagcgtagcctattgctattttatcactttctagtttattcgcttcctgctctcgaatcgccttctcgtttgcaacaatgattgtgttgaaatgctgattctcaacatagtcatttatacagcccagaccatcatgccgccactgaaagtttgaggtagacattccaccacctctaattcgccggaaaaatagcaacagggtggagtataattttcatttttagtcttatgtaggtacattttcgatttttccgttcatttttaggcaaaaaggaaagagccaccgaccatcagatcagtagctccaagagattcatttttctatttaattttcaaaaagctcactttttcgcttataagtgattttattcacttttctgggttcataagtgattatgttcacttatttcgttttatgtaattatcatggggtgacagaaaaactcacttatttaccatttctatacaagtgattataatcacttttttattgagataagtgagaaaaatcacttattctcctgccccggcgtttcccttcctgctggctgcgtttccgtagccgactggattctaaccaagctggcagcttaatcccctgctctttgcctgccttgcccacacgcccctcagacagcccctctgttggcttttactgccgaactgggattgttttgcgatgggctggcttctgcctgacgtggggcaactgtggggcttacagccgcctccagtatttttccgttttctatcggaatcgcatccaaaatgggaaaactcacaaggttctgttccgggaataattttccgtccagtctgtatgatcttttcatattccaatgggcatcctgatagatcattctggaaaaggccacacacttgatctcacagctgttggtttcattcagtcttgtcactcgatgcgcccctgcattctctgccttacatgcctggactgcaatctgccccatcttccagttgtacaaaaatcggtaatacgttggccatccaagtgcctccagcatgctgcgaaagatagtgattcttccttcattcgcattgaatgtcactcccagcatcccggaataccatttttgttctctttcctgcaatcttctcacctccaaaaaagggcgtactttcccccttgatattataaaattattttttagtcaagcccggtatcggggactgtccttcctgtcaaaactcccattgatacataaccatccatctgtcggacttctgattctcttaggtgttcttctacaggcacgccaaaagtacccgcaatatcatccgggtaaaatcccttccgagtatccacaggcttagtctcctggtctgctggctgttctgctacagtttcttcctttcgcttttgcctctcatggaagatttctggcacaagcaggtcaaaaacgtacagagtttccccttcaaaagtaatcctgtaccccagcaccttatatctacattcactgtcccagtccatttccttatagaccgactccgcaaaaggcttgcaactcatctttcggctcttacgcttatccggctttgcaatacaccagcgcagagcatccttatcattttcatcgcagccacgcacaacaatgcgcttcaaatcattattgaacataacatgcacataaaccacatcctccagacctgtgatacaagccgtgttgaatgtgatactgtccttacggattacgatcgcagggtcacgaagatgtgcaaacagttcctttcgcacgacctggtatccgtcatatgaaaaagtgttctgccgttcttctgttcgtgcatccctctcattttctactgtctgctccgtcagtgtggtcgtacttgtgtattcctcattcattcgtgtcagtccatccttccattatttcttccgcctcatggagcagtttattcaaaccatctgcggtaaatgtattcatttctttaatttctgctgccggccggagtacatcccaatttcctgcataatgctcctgctgcaaaatgccaacctgtgcaatacttgtgattggctgtccaaaagttcccgcccattctggtggaaaaatgtaaatcatctgtttgaccgttttgccctcggcttcctcttctttcgatggcagaacgatttcctctattttgatcatctccggctcatccagttcaaaaagcatcagcttattgtccccttgttccacaaactgcccccggaaacgatacttcaaaccctcttcccattccataatgtcgaaaagtgtcttagccaggccacgacagccaagtgtacttgcacaccagcgtccctctttcagccttccccagtgaatagcattcggattgcccttttcgcatggccgaatcgcaacacagcggtcaaccgagttcagaagcagttccacatactccacatcctcaaactttttcagacaggaagtattgaaccgcagcttaccattggagattgtcattgccgggttctgtagtgtagaaaaatactgagcccgtactacctcatatcccgatagattcagtcggttcatgacctctgcgttattctcttgctcttcctgcattacactttcaggaagcctcccggtattcctctgccgagaaaccagtccagtccttatcaaaaggcacatatcctcgaagaataccatcatccaccacactcagaaccgacaacggcctatttttttgtatagttgcgggatgccctcagatgattggctgcattataaacctctctggatacaatcgcctcatggtgatccctctgtcgatactgcgtccggtcattgttatttttctttgacttatgtgtaagaaagtttggcgtgaaagtctttcttgccagcacatccccacagtggcgttcatttgcaataacgccaactatggtacccggattccattctgtattacccagcttggttttacggccgtactcggtcaaaagttctgcaatctcagtatatgaaaagccattcaggtacagataataaatgaccctaaccgtctgtgcctcactttcatttaccacaagattgccatcctcgtcctgatcgtatcccagcaatgccggtgtcaaaaacagacctcggctgaaccgccggtcaatagaccagttcataataattgatttggaatgaggttcttcctccgccacagatgccagaatggtcaggatcatgcggccattgctgtccagcgtatagatattgtctgcctcgaattttacacccacgggcggatcaagatttttcagcgtctcaataactgaaaggcagtcaacaatgtttcgggcaaaacgagcgatggattttgtaagaaccaggtctatctttcccgccttacagtcctcaatcaactgctgcattcctttgcgatgctccagtgaagtgccactgatgccctcatcgtcatagatgccgacaaattcccatccgggctgtgcctttatatactctgtatagtaatttttctgaagttcataggaagaagtctgctcatcattgtcagtggaaacacggacataagccgcaacacgccgaacagaggtgctttctccaaacccctccaccgcctttgccgggataacttccaattcagaagcatccacccccttatatctgtctctgattttctgcttgcggtctaccgcctctactccactgcttcccatgtacttcctctcattcttccggccttatgctccaataccactggcccatcttccgataacttcggataccgaactcttttttgtattttctgctgtcctgcgactgataccttcatcgctcatccgcatatagatttctctggatctcatatctccatcggaaagcagtttcttgatcagatccgctgccttctcagattttgattcaaacttcggaggctccgactctgcttccgggtcagttggaatcttacactctagccatcgaaagccctcctcggccgttattgagaaacgaatctctccatcagatggagccagattgttcttaatctgtcgcacaatgcgaatgtctttgttttccggagcatgctccatttgcagaacacttctggctgctgccacaacatccacactaccaatgctccggtacaaatcttctgtcccctctttcttgttgaggtgaccaatcaatacaactgcacagtcatacgcagatgcccacattccaagacgctgcatcagctttctcgccctgcctgcaatctgaaggtcagaatcactccccagatatgcctgtatcgggtcaatgaccaccaactttggacgaaattgtataatcgcctttctgatacgttcatcatcaagcgtcaagccactattcatttcttcatttataaaagccacattcctacaatctgtgccacatgtttccagccttggcttgatggtatccgaagcatcatcttccgaacactggtaaatgaccttctgcggtatcccgacttgcttaccgtccggcattgttccaccttttgacaactccgcaatcagattcatcatcatggtagactttccgtcaccggggtcgccttgcagcaatgtgatcttcccgactgcaatgaacggataccacaaccaacgaacagctgttgcttctacatcactatataatgtgaaaattcctgtttcctctttacctgtcattccctttgcctttcatttgcagtctttttctacatttatattataagagctgtatgatgttttgaccgctacctattatgtagcaaaacagccttagaccacataacagatagggggataacactttgcgatcttaaaactctctatatattcagttcccccctgaaaaactgacacggtagaccgcctgaaaacaaaaaagccgaggtagactttggacaaccttatataaggtcatctaaaagtctacctcggcttactacgtattcgagcagcacctacaggcagtatcgaaaaagtcatgctggctcacacatcctgcggtgagtcaagctcgttacattttttgtcagatacatttttcctctgacgaatctgtaaaattcattcgcggcccagaatagaattgggatgcaaaatcatccatataggcataggattgcaaatgtccattcttcacataggctatcgcatctctcccattcaccgtggctcggtttcccagcagcacctttttaccttgggtcgtataaattccgtaatccatagccgtcctccaattcacaacttttcattgtttattctacatctcgctcttgacaagttgcgctccatgcgttaatataaatatgcaagttgcgtttgcgaacacattatacgattcaacttgcgtcatgtcaagcgcaacatgaaaagaatttgcaatcatcatggaggtcatcattatgaaattcggggaaaaggttcgagctgcgcgcctagcagcccactattctcagcgtcagcttgccgatatgaccggcatcgctttacgcaccatccagaactacgaaagcggcgaacgccttccgaagcagaaggaaagctatgagctgctggccgctgcacttaacgtggaactggaatccctgaaagatgacaacgcagactttgtgatcaaggctaccgagaaatacggttcccgcggacatgagcaggctgaacgacttattaaagaagtatctggcctttacgctggcggtgaactcgccgaagaggacatggatgccatgatgaaagcgattcaggaggcttactggattgcaaaagaaaagaaccggaagttcgtgcccaaaaagtacagaagcacttccgacagcaattccgattcataa

SEQ ID NO: 156 - DNA, 12464 bp, unidentified
  source 1..12464: mol_type = unassigned DNA
tgttcgggacttacacccgttagagcgcgcccatggcgcgcaaacaaagaaaagccccggaaattcaatatttccaggacttctcaatatcttatattatcttagaaattcttaattagcaagcatagcctcagcacaggtattcagtattcatggggatttcaaacatttttgtatattacgcgtatactactatctcactctgaaataaactaaatccaacttccacaaatttatgtcttgaaaatttacccacctcatactataataaatataaagagaagcaaccgcccacaaagtggttagcctcgtaaatggttatttaataagccactcgtccgccaagacaggagtggcttatttattttcgcttgttgttcctatctatgtaggcaagcagtgcgattagaaatgaaccgcctaaaaataacaggcttaaaacttcatacatatccatcagcaccacctcccctctatctctagtctgggaggctaccactctgtacacgattacttctcatgtcggtaatgtatcacaatttacataaactgacaatctccatttcaaaattcttgttcaaaataaatcgtaatttcattgattatcctgtgctatgtttttaccctattttataaaaatacattttagtcgaatcatccttgtatattatgcaaaaccgtttgtatactacgcgtatattatatgtatattacttgtaacttatctccttctctcatgtataaaccgcttactttactgcattttcatgcatctggcaaaacacaaaaaccctacacttttgcgttttcctgcaatgtgtagggttctcaatttttgaataattatttatttgttgctaatttattagcacacgccctgggcaatcatagcatccacgaccttctcaaagcctgcaatatttgcaccggcaacataatctgtctgtccgccgactgttgcattgtatctcttagcggcatcagaaatgttagcgtagattgtctccatgattcctttgagttttccatcaacttcttcgaatgtccagtgaagtctctcagagttctggctcatctctaatgcagatgtagcaacaccaccggcattggcagctttaccacctacgaataatacgccgttctcctgtaagtattttgttgcctctaatgtagtaggcatgttagcaccctctgttacagatgtaacaccatttgcaactaacatcttagcatcctcaatgtctaactcattctgagttgcacatggaagggctaaatctactttgtactgccatacaccgtgctcaccattctgttttgcatgatattctgcagatggttttgcagcagcgtactctgttaaacgtgcacgttttacttcttttacttcttttaataatgcaacatcgattccttccggatcataaatccatcctgtagaatcagaacatgttacaacttttacacctaactgctgtgctttctcaattgcgtagattgcaacgttaccggaaccggaaactgcagcagtcttgccttcaaggctcatgccgtgatctttccataatgcatttgtcaggtataataaaccatatcctgtagcctgtgtacgggcaagagatccaccgtatgtaagtcctttaccggtaagaacaccttcgaaagaaccacggattctcttgaactggccaaacataaatccgatctctcttgcaccagttccgatatcacctgctggtacgtccacatctgctccgatgtatttagaaagttctgtcataaagctctggcagaatgccatgatctctctgtcagatttaccctttggatcaaagtcagaaccacctttaccaccaccgattggaagtgttgtaagggaattcttgaaaatctgttcaaatcctaagaatttgataattccaaggtttacagaaggatgaagtcttaatcctcccttgtatggtccaatggcattgttgaactgtacacgataacctctgtttacctgaacctgtccgttatcgtctacccaaggtacacggaacatgatctgacggtctggttctgtgattctctcaagaattgcattttttctgtacaattcctcatttgcatcaataacaggtcttaaagactctaatacctcttcaacagcctgtaaaaattcaggttctgaagcatttttttcttttacttttgcgagtacttcatcaacgtatcccattttttttctcctttaaaaatatatttacaaccatgtgaaatcagatatccggcattttttaaatgctccggcattgattccggctgcagatttctcatcaacacgtacattttattataaaatgacggcggacgcaatatttttttctttattcctttaatttaatgaagttttctaatgattagtctatttttttgcaggattcgacttcaaattattcattttgcataaaaaaaatcaatgaattttactttttatattttcaggttataattaatatcatttcaacttataacaaaacaggtcatcgcataaaaaatagttttttcgatgcaatgacctctgttctttattctttctcacccttgtatacaaggtgaaaataatcggcaagtttcgccagcgcataaatcaggatcggcgtctcctgctcggtaagctggcttttgatctgagcgatcatctcgtgatgaaactcttcatgatgtttgtaagcagctttcccggtgtctgtcagataaacccataccacacgtttatcctgcgtactgcgctcacggataacatacccttttctggtcagtccatccattgccttggtcaacgttccggttgtgacacccatcagctttgccaccgttgtcatcgtttttggttcattgactccgattgcctcgatcacatggaaatcattgtaactcagatttttgaattcttctgtcacaagacattttccctcaatctccatgatgtctttaaacaatctgaccaataattcgtttaatgtttcatctgttgtcatccgatctactcctatttctgcggtcagcgcctgattttaccagtttatcaccgttgctccccaggtgaggcctgctccaaatcctgccaacacgattttcattcctttcctcatcataccatgattattgacattatcaagcaaaatcggcacacttgccgcagaaatattcccgcattcttccagattggttggaaacttttccataggctgaccaagtcttttcgaaaccgcttcgatgatcctgtaatttgcctgatgaagcaggaataaatcaatctcttccagatgtaagtctgcctgttccaccgcatctgtgattgcctttggcacagtcttcactgcaaacctgtacacctcctgcccattcatggaaacataggaaagtgccgtgtcactttttttataagggttgttcacttttctcgccatgcagtttaagacatcgcccctgaaaccatccgagccctgcaccatggataaaatgccatcttcttcacttacagaaagaactgctgcccctgcgccgtccccaaaaagcacgcaggtgctccggtccgtccagtccatcatttttgacagcgtttccgctccaatcacaagcgcatgctgatatccgccatgttctaaatacagcgccgcagtatctagtgcaaaaagaaaaccggaacacgctgcattgatatcgaacgcaactgcattttctgcaccgatatttttctgcacctcacaggcaagtcccggaagatatttatctgcagaaacagttgccgcaatgatgatatccacatcttccgctgaaatttctgcatttttcaacgccttgtctgctgcttctgtggacatgccggtggttgtctcctctaccgcaatatgtctggcaataatcccggttctcgaccggatccattcgtccgatgtttccatgatctgaccaagatcatcatttgtcacgcgaagcttcggaaggcagcttcccgttcctgttatttttaccttcataatattcctctcttctctgtccggtcacaaaacgattcgtactctctgtgcacatagcctctgtgattttgctaaaatttccggaatctcgcatagcgctcggacgcaaactgttctcctgtcctgccattttgtttctcaagaaacttttttatatttcctttcagatagcgcgagattgattcacaggcttttgcgtctgccacaccatattccgggatgatctgttcaatgacacccagcgattttaaatccatggccgtgattttcataatctcacttgcctcttttgcacgttttccgtctttccacaaaatggatgcaaatccttccggcgaaagcacacaataggttgcattttccatcatccatacttcatttccgaccgctaaggcaagcgctccgccgcttccgccttccccgatcatgatgcagagaaccggtacttttaatgctgacatctcatagagattccgggcgatcgcttccccctgcccacgttcctctgcctccattccacagtatgctcccgctgtgtttacaaatgtgatcaccgggcgtccgaatttttctgcctgtttcatcagacgtatcgctttccggtatccttccggcgacggcattccataattgtgtttcatgcagtccttaaaatcttttcctttctggattccgatcacggtcacaggctggccgtcgagatatgcgactccacctacgattgccggatcatcccgaaagtatctgtcaccatggaactccataaattcatcaaaaatattttccatataatcagtggcagaaggtctgtctactttccttgcggcttttaccttttcccacggcgtcagtccttttgcccttgccgcgcgctcccgcatcaactctgtcggctcgtagttatcatccatgcgcaatggatcaaaatcagcaaatccttccctgctgtgatgcatttttaaaatacggtttaaggttattttcagatttttccgctcaacaatggcatccacaaatccatgctctaactgaaattccgcacgttgaaatccctccggaagtttttgtccgatggtctgctcaatcacgcgggggcctgcaaaaccgatcaatgcgcccggctctgccagaataatatctccaagcattgcaaaacttgcggtcacacctccggtcgtcggatctgtcaataccggcacatacaaaagccctgcatcagaatgcctttttaaagctgcggaagtctttgccatctgcatcagggaaataataccttcctgcattctcgccccaccggagcagcagaacaaaataaccggaagctttaaatctgtcgcccgttccacaccgagcgcaattttttctccgaccacatgtcccatgctgctcatcaggaatctggcatcacagattccaagaaccgtctcttccccatatattttgcatcgtccgatggtcactgcctcatgcagtccagtcttttccctggctgcctccaccttctgggtatattccggaaaatccagtggattttctgattccagatattcaaaccatggttcaaaggttcctgcatctgccaccatgcggatcctgtttttagtccgcacgcggaaatagcttccacactcatagcagacatacttattcttttccacttccgccttgttcacttctctcttacatgcggggcagaccactgtacttcccggtattttctgctgatccgctgccggtggtggtgtcataacttccgcctgcacttcctctttgcggtaagttactgcattttttcgttcaggttttatggatatcagctttcttcttctcaaaattgctggcataatatttcctttctgttacagcttctatgtaatgcctttctattctgttactcaactgcaaaggtgagttctgcaatgcatgcaatttcatctccgacttttgccgtcgcttttcccaccccgatcggtccttttacttttataatttccgtctccagcgtgagaatatctccgggaactacttttcttttaaattttgcagaattgatggacgcaaaataagctgtttttccacggttttcatcttttccaaggattgcgaccgcaccggtctgcgccagtgcctccacaatcagcacccctggcatcaccggttcttccggaaaatgtcctgcaaaaaaaggttcattgaaactgacgcatttcttcgccactgcacggacaccatactcaatttcttctaccgaatcaatgagcagcattggctgtctgtgtggcaggatttccatgatctgactgatgtttaatactgacatcgctgcctccttatctgcagccattgatatctttgtccgatacaatggtgtatttttttaatagaatacttgcattatgaccgccaaatccaagggaattgctcagtgcatactgcacctccatcgaaaccggttctttacaataatcgagatccagttcctcatccggcactttatagccaactgtggcatgaatatagtcttcctcaatctctttcacacaagtgataaactcgatcgctccggcagctcccagcatatgtccgaccatggattttgtggaattgaccttcatttcaccggcatgcgccccaaatgcaagtttgatcgcacgcgtctcaaagagatcgttatggtgcgtggatgttccatgtgcattgatgtaattgacctcatccactgtgatccctgcatcctgaacggcatttaacatagctcttgctgcgccgctgccatcttctgccggagatgtgatatgatacgcatccgaagaacagccataaccgacaacctctgcatatatctttgcgccacggcgttttgcatgctctaattcctctaacacgaccaccgctgcgccctctcccatgacaaagccgctgcgttctttatcaaacggaatggaacatctctccggatcggtttctgctgtgagtgcggtgagtgacgtaaaaccagcgattgcggtcggacagatacttccctcggttcccccggaaaccataatgtctgcctcaccatactgaatggcacggaatgcctcaccgatcgtattcgttcctgtggcacaggcggtcacaacattgatactttttccttttaatccaaaatgaatggaaacatttcctgctgccatattagagatcatcatgggaacgaataaaggtcccactctccccggtcctttttctgtcagccttgtatgttcgcgctcgatcgcctgaaggcttcccacgccgcttccaatggcacagcctgccatatacggatcttcctgatccatttcaagcccggcatcctcaattgcctccttcgctgccgccacggcatactggctgaatagttccatgcgccttgcttcttttgcatccatataattttttgcatcaaactcttttacttctgctgcaagcttacatttataattagtggtgtcgaattttgtaatttcagaaaacccggttttctgtgcttttacattctgccagaattcatccacactcagtccgatcggtgtgactgctcccattcccgttaccactacgcgtctttttgccatattgttctcctcatgatatatattctttacatgtgcatgccgccgtccacggagatcacctgtccggtgatataatctgccagatccgatgctaaaaatgcagccacaccggccacatctgacacctgccctgtccgctgaagcggaatctgtttttttaccgcttccctggcagcctccggcatcgcctctgtcatctctgtctcgataaatccgggtgccactgcattgcatgtgattcctctcgacgcaagctcccttgccacacttttggtaagaccgatcactccggctttgcttgcactgtaatttgcctgtcctgcattccccatgacaccggaaacagaagaaatgttaatgatcttaccggatttctgtttcaggaaataacgcgaagcatggcggatcgtatggaatgcacctttcagattcgtatcaaggaccctgtcaaaatcttcctcactcattttcatgatcagtccatctcttgtgattcctgcattattgaccagaatatccaggtgtccatagttgtttatgatcatttccatcatttttccgcaggcatcaaaatcagaaacatcacattgtacaggtgctgccattccaccctgttttatgatttcttttacagtctgttctgctgcttccggcgaactgttataattgacaatgacaaacgctccacatgatgccagtgtctttgcaatctcttttccgattccgcggccggctcctgtgacaagtgccactttattttttaaagaatctgttaacatgctcctgcctccacatgacttccgataaactgaataaaatcttccattttatcaatgctgctcacttttacatcccggttcacttttttcacaaatccactcaatgttcttcccggtccgatctctacaaattcatccgcaccatctgcaagcagccgctctatggtctgctgccagcgcacagaagaagatacctgactggcaagcaatggtttcacttcctctttttttgtgacatagtctgccgttacatttgcaatataaggaacaaatgaatcactgatctctactttttttaattcttcttttaacttttctcctgcgccctgcagcattttcgaatgaaacgggccgctgactttcaatggaacaacgcgttttgccccagacgccttacatgtttctcctgccagatgcactgcttcctcctgaccggaaataacgatctgtccagggcagttgtaattggctatggaaacctcgctccccgtctgctctgctgtctctctgcagatctgctcaattgccgctgcatccagtcctagcactgctgccattgctccaccggccgggacagcttcctgcataaaaatgcctcttttccgcaccagttcaaatgcttcctcagcagtcatgactccggatgcgatcaacgcaccatactcaccaagactcaatccggctgtgacatccggctgataaccgttctgttccaatgccatataaattgcagcttccgtagccagcatacagatctgcgtgtactctgtgatatttattttttcgttctcctcaaaacacagtgccgggatatccaatccagtcacctctgaagcaagatcgtacacttctttacaaatagggatctgttcgtaaaattcttttcccatgccaatatattgggatccctgtcccggaaacataaatactgtctttcccatcctgataaccacacctttctcaaatcttcaaatctgcgcctgtcaggtcattttctccctgcaagcagcgctctggcatctgtgacaacttcctctatgatctcctgacaggtctgctcttttttcacaagcccggcgctctgtcctgccatcagacttccatgaactgcatccccttcgatcaccgctttacgcagagagccgagtgtcaactgctctaactcctcaaaagaggcaccttccttttctaatttcagataatctcttgtcatctggtttcgcagtacccggatcggatgcccggtactcatacctgtcacttcagaatcgatgtcttttgctttgataatgcgttccttataattctggtgtacgatcgattcttttgcgaccacaaaccgtgttcccatctgcacaccttccgctcccagcatcatggctgccgccattcctctgccgtccgcaatgcctccggcggcaatgaccgggatggtcactgcatccacaacctgcggcaccagcgtcatcgtggtctgagaaccaatgtgtccgccggactccatcccctctgcgaccacggcatctgcccctgcgcgttccatcatttttgccatggcaacacttgctacaaccggaattacggtgacgcctgcctgtttccacatctccatgaattttcccggatttccggctcctgtcgtcacaatttttacgccctcttccacgaccacttttgcgacttccggagcatttggattcaaaagcatcacgttgactccaaacggtttatccgtcagttcttttgtttttctgatctgttctctgactacttccggcggagcactggctgcaccgatcagtccgattcctcctgcctctgaaactgctgctgcaagatgatactctgcaacccatgccattccgccctggatcacaggatactgacagccaagcaaatccgtaattctcgttttcattgtttcctgcctctctttgaatatctgtaaatggtcttaagcttccacacctttttctttgagataaccgataatatcgttgactgttacaatcttttcaagatcctctgatgggatctcgattccgaactcctcttccagagccatcaccatttcaaataaatctaaggaatctgcgcccagatcgtctttgaattttgtttccggcttaatctctgcctcatttacatttaactgttctgcaataatcggtttcatcttttctaacattttgcttttcctcattctttcccggctttcgcctgttgtttttcatattattttgtttgactttctaattatttgattgtcaaactattcgataggcaaagtatatgcatttctgttttatttgtcaagaggatttttattttctatatacagaacgaccgatctgtgctatattaaaagtgcttcaatgagtcatgaatgattgcattttatatgcaaaaattggaaatgaaagtgaggtaggatttatggatattacaggtttagacgcagcattaagtacggtttctgcatatgacatcggttcttccacaagccctgttacattacaggaagatatcggagttgcaatgctcggaaaatctttagatatgacacaggcattaggtgccggcatggttcagatgatggagaattccgtcacaccatatcttggaagtaatatcgatctttatatctgaaaagaaagtcgcagattttgttctgcggcttttgctttgcccacaaattgttggaatctttgtgatctttgtgagtctttgtgatttcaagaacttttatgaaaatttcaggttgactttcccgctgcatcttgctatattgatactcgttaaggcatcatagaccttaacagtatttataacagaatcaaaaacgctaggggcgcaaaaaatgctgcatttgccagacattccaacgctgagagatgatttttcatcaacccttattacttgaaccggataataccggcgtaaggaagcttttatgatatttctcatcagacgatagaatatagagttttttcctcctggcgcaaaagatctgaaacgcaaggaggattttattttatgaaagaattttttactaccacgatcggagcctgggatgatggctctgtacgtcttactgcacctggaatcgcagttgtagtagtcattatcgcacttctcgttgttgtcgcagcagtgatccgccacagaaatgcagagaaaaaaacaattctcaccacaaaacagcttgtctactctgccgttgcgattgcgcttgcagtagtatgctccatgattaagtttgcgaatctgccaatgggcggttccgttactttattcagcatgttgtttatcgcactgatcggttactggtacggtccttatgttggtcttatgactgccgttgcctacggtcttgttcagtttgttatggagccaattttctataccgttccacagatgattttagactaccctctggcatttggtgctttagggctcgccggattttttgcaaacaaaaaacacgggctgcagattggttatatcgttgccgtgtttggacgttatgtatttgcagtgatctccggtgtcgtattcttcggtgcatatgccccggaaggaacacctgccattgtgtactctttaacttacaatgcaacttatatcgtaccggaagcgatcgctactttgatcgtgatcagtctgccacctgttgcaaaggctttggctcaagtcaagaaaaacgcgctgtctgcataaccggagtttaatttgcgtagtgttgcagattctgcggtgctttcttagggcttgaagggcagatataagagtcctctcgcaagtcgtggttttataggtttatgaaaagaaaaatggtataaacgaaatattatgtttctgttcgctgggcattccgataagcctctgaagagtcttatctccatagctcacaaagaaaataatatttgtttataccgttttgctttcattcacgttatggatgacttgtgagaggacgcttatactagttcattacatattacttgctatccatcataccttattctttctaccagcgtttcctttttcagattact

SEQ ID NO: 157 - DNA, 8637 bp, unidentified
  source 1..8637: mol_type = unassigned DNA
gttgcggtttaccgtttcgtgaacctgatgggacacagccgccccaagtacaatagtgccgtcagcaccttctgctgggcagttgccaatgatgagcccttcaccgtcaacgaccgcagcaccgagctggagctgttgtacatcgacgaccttgtagaagggatgttcgacctgctggaaggcaaggagcagcactgtgaatttgacggcgtggagactgttctgaaagcggatggtcgctactgctgtgtgcctgttacccataaggtaacgctgggcgaggtcgtggacttgctgcaggagttcaaggcacagccgactacgctcatgatgcccaaaatgccggacggctccttcgccaagaagctgtactccctgtatctgacctatttgcccaccgacaaattcaagtatgctttgaagatgaacgtggacaaccgtggctcattcaccgagttggtccataccgccgactgcggacaggtgagcatcaacatcagccgccccggcattaccaaagggcagcactggcacaactccaagtgggagctgttcattgtagtggctggtcacggactgattcaggagcggaacatcaacaccggagaaacggtggagtttgaggtttccggggacaagattgaggccgtccacatgatccctgggtggacacacaacattatcaatttgtctgaaacagaaagcttggtgacggtcatgacctgtaacgagatttttgacccgaatcatccggataccttcttcgagccggtgtaagaagagatttataataaacataaaaaagatatatcgaagctttctaaaacattttcgtccgtatgagtatatggagaaagttgggataaattttccacggggggttcatatttacggaaaagtttcatggaatactgaaccgtggttaatcacttttggaaataatgtgcatataacagacggcgtaaaatttattactcatgatggtggaacattgatctatagacaatatatcccagatttggagattacaaagcctatcacaattgggaatgacgtctatatagggaataatgtgataattttgccaggtgtcacaatcggaagcaatgttgtgattggtgctggggctattgtgtctcataatataccggataattctgtggctgttggtgtgccagcaagagtgattaaaacagcagatgaatattttgaaaaaataaaaggtgaatctttgcatttgggtcatttaaagggacaagaaaaagatttggccttgatgaagtattatgcttatagcggtgagtcaaaagggatttatttctaattgtgtaaacttaattgaatttttccatggaggaaagggcagatttaatggctgattatagcaatgtatcttttaagaataatggcaagctgaagctgctgattatcgtcggcacacgtccagagattatccgtctggcggctgtcatcaataagacccgcaagtattttgatgtcattctggctcacactggtcagaactatgactacaacttgaacggcgtgtttttccatgacttgcagctggctgatccggaagtgtacatgaacgcaatcggtgcagatcttggcgagacaatgggcaatatcattgcagaatcctacaagctgatggttgccattcagccggatgctgtgttggttctgggcgacaccaacagttgcctatccgtgattggcgcaaagaggctgcacattcccatcttccacatggaggccggcaatcgctgtaaggatgagtgcctgccggaagaaaccaaccgccgtatcgtggacatcatctctgatgtgaatatggcttattctgagcatgctcgtcgttatctggctgatactggtttgcccaaggaacgcacctatgttaccggttccccaatggccgaagtgctgcatcagaatctggccaagattgaggcatccgacatccacgcccgtctggggctggaaaagggcaagtacatcctattgtctgctcaccgtgaggaaaacatcgatacggagaaaaacttcacttctctgttcactgctatcaacaaaatggccgagaagtacgatatgcctattctgtactcttgccatcctcgcagccgcaagcgtctggagcagagcggattccagctggacaagcgtgtcattcagcatgaaccgctggggttccatgactacaactgcctccagatgaatgcattctgcgttgtgtctgacagtggcactctgccggaggagagcagcttcttcaccagtgtgggacatccgttcccggcagtatgcatccgcaccagcacagagcgcccggaggcactggataagggcgacttcattcttgctggtatcgatggtgatcatctgctacaggcagtggacgttgctgtcgagatgaacaagaaccgtgattttggtatcccggtgccggattatgtggatgaaaatgtgtccgataaggtcgtcaagattatccagagctacaccggtgttgtcaacaagatggtgtggagaaagtgatgaaatgagaaaattgctctcgacaaaacgaaaaattcctattgaagcaaagtcggcagctgtatatacactttcaaccttgttttcaagaggtctagctataataacagttccgatatttacacgattgatgacaacaagtcaaattggtgttgtaaatctgtataattcatggtattcgatgataagtgccattgctacgctatcgttaacttcaggtggatatgttgtggcacttaaagaatacgaaaatgaaagggatagatatcaatcttccgttctttccctcacctcgctcattgcatttttaattgcatgtatctatgctttagctccgcaactatggagtagtatattaggacttccaaatgaactgattattcttatgcttataggatttctatttgctccagcgagagacttttggcttgctaggcaaagatatgaatataagtataaattgtcaggcttggttatgatggggtcagcattaattgcgtcggctctttctattgcggctgttatagaattaagcgccgtaaatgaatcaatagttgctgaaggacgcctattcagtaactatctggttatatatggcgtatcggccgttatatggatatgcacttttgtaaggggaaagactctttataatagagaattttggaaactatctcttacattaagcttgcccttagtaggctattcggtagcctctcaaattcttaccgtttcagatcgaatgatgattagtcagatggtgggaaacagtgcggttggaatttatagtacgttatatacagtgagttctttgtcacttttggtatggcaggctgttcattcttcctttgttccgtatatattcaggaatatcgaaggcgataataaaggaattaaacgtgtttcggttcaattgatgtctttttatgccgctgtcgctgttctgatgacattcttggctccagaaatagtgaaaatactagcaacggaggaatactatgaagcaatttatattatgcctccgattgcagcaggtgtgttttttacatcatttgccaatttatattcagatattgccatttattataaaaaaacaaagtatgtaatgtatcccgcgattattgcggcacttaccaatttggttttgaactacatttttataaatctgtatgggtacatggccgctgcatatacgacactcttctcctatattttatttgcactttttcagggaatctgggcgagaaaaatatgtaaagagcatggaatgagaaagggtactatttacaatgacaagtttatgattgttcttgctataattacgacgcttatttccttgtcaggtattctgttctatggaaatacagttttgagatattgtgcaattgtttttatctttacggtttgtatcgtcgttggcaagaaggtcttactgaataaaaaatctgaaaaaaagaaggaagcacaatgaaaacaattttcataaccggttcgtccggcttcatcggttcaaaccttgccaaacgtctactgactacagaacctgatactagggttattggtttggacaacatgaacgactactatgatgtccgcatcaaagaagctcgtcttgctgaacttcagaaatttgaggactatacctttataaaaggaaaccttgcagacaaagccctcatcaatagcatctttgagcagtaccatccggacattgtagtcaaccttggtgcgcaggctggtgtgcgttactccataaccaacccggatgcctacatcgaaagcaatatgatcggtttctacaacattctggaagcctgccgccattatccggtggagcatctggtgtacgcctccagctcctccgtctatggctccaacaagaaggtgccgtactccacagatgataaggtggacaacccggtttctctgtatgcagccaccaagaagtccaacgagcttatggcacacgcttattcaaagctctacaacattccctccactggcttgcggttcttcacggtatatggccctgcgggtcgtccggatatggcttactttggtttcaccaataagctggtcaacggtgagactatcaagatttttaattacggtaactgcaagcgggactttacctatgtggacgacatcgtagaaggcgttgtccgtgtgatggcaaaagcgccggaaaagaagaatggcgaggacgggttgcccattcctccctatgcggtttacaacatcggcaattctaacccggagaacctgctggactttgtgcagattctgtcggaggagctggtgcgtgccggtgtgctgcctgcggactatgatttcgaggcacacaaggagctggtgcccatgcagcccggcgatgtgccggtgacctttgcagacacggaaccgttggagcgcgacttcggctttaagccgcatactccgctgcgcgaaggtctgcgaaagtttgcagagtggtataagaatttttacatggcctaaagccattagcgcaggggctccctgtggggaaggaatccaaaatgaagtgcgtagaagtgtatgaagacctctaccatcaggaaccgtatggagtcgctttttgtccatatcgcatcagcccgttgggggcacatattgatcaccagtatggcaaaatcaacggtctggcaattgataaaggcatccacatggcctatcatccaaagcagaacggtgttgttgaattacagtctttgaactttccgaagcgtgcacagttctttgttggcgatgtgccggaagaaaagcagggtgactgggcggatcatctgcgcggtgcagcaaaaatgctgggtgagaagtatcgtcttaaagttggtctgtcgggcatcatcgaaggtagcttgccgattggcggcttgtcctcctccgcagcggttatcatttgtttcctgtcagcactgtgtaaagtgaacggcatccatctggaaccgttggagatgattctcacggcaaaggcagcggaaaaccagtatgttggcgtttcctgcggcaagctcgaccagagctgtgaggtgctttccaagaagaatcatctgctctacctcgacacgaaagacgatagttatgaacttatccccacaagcgagaagatgaaaccctataaagtggcaattttcttctccggtttggagcgttctttgaagaactctaagtacaatctgcggcaggacgagtgcaaggcagcggcctatgcattgatgggctatgcaggtatggactatgacacctttgcaaatactcggctgcgggatgtgccttttgaggtgtttgagagttataaggacagactgccggagttgtggcgaagacgcgcggaacattattacagcgagtttgctcgtgccgaaaaaggtgcggaactgtggcgcaaaggtgatttggatggttacggtcaactcgttttcgaaagtggcaagtcctctatttacagctacgaatgcggctgcgatgaactgaaaaagctgtatgagattatggctgataccgatggcatctacggtggccgcttctccggcgcaggcttcaaaggctgctgcatggcactgatcgacccgggcaaggccgaagagattgaagctaaagtgggttctgagtatctgaaagtgttcccggaactggaaggaaaatacagcttccacctgtgcaagagtgctgacggtgtggaactatgaagctgaattctgtccatcatattgcaatcatcgtttccgatatcgaaaaggccagagaattctatatccagaagctcggttttgaagtgattcgtgagaattaccgtaaagaacgagacgattggaagttggaccttcgggtggatgaacacacagaacttgaaatctttgctgagaagaatccaccgaagtgggtgaaacgaccggaagcttgcggtttgagacatctggccttccacgtagaaagtgtagaaggaactgtgaaagaactggccgagatggacattgaatgtgaaccgattcggacagacagctatacaggggagaaaatgactttcttctttgatccagatggtttgccactggagatacatgaataggagaacaggaagatgaaatgtttgattctggcggcaggttatgccacacgcctttatccgctgacggagaattttccgaagccgctcttgaaagtgggagaaaagtccatccttgattggctggtggatgatctggtggacaccaccgatattgacgaatttgtggtgatttcaaaccataagttcgcgcatcactttgaggattggaagaacaataagcaaaaggtacgaccttatgcgatcacggtgattgatgatggtaccagcaccaatgaaacgcgactcggcgcagtcaaagatattcagctggcagtcgaaaagctgaacttgacggatgatctgctggtcatggctggtgacaatgttctggattttagcctttctaagttcgtggagttcgcaaaggaaaagaatacctcctgcgtgatgtgccacgaggaaaatgaactgaaaaagcaacaaaagacggcgattatcacgctggatagtaatgatttaattgccagctacgaggaaaagccgcaagacccgaaaggcaatctggcagtgccgccgttctattgctaccgcgcctgcgatgtaaagtgcattcaggaagcattggataacggatgtggttacgatgcaccgggtagctttgccgcatggttgagtaaacagacggaaatgcacgcctatctaatgccgggaaaacgctatgatattggggatatcaacagctatgagtatgtgaaaagcgtgttttctaaataaaaaaagaggaggaagaacaaatgaaaattgcagttgcaggtaccggatatgttggcctatccatcgctacgttgttgtctcagcaccacgaggtcatggcagtggatatcatcccggagaaggttgagctcatcaaccacaagaagtcgcctattcaggacgagtacattgaaaagtacctcgcagaaaaagatttgaatctgacggctacgctcgatgcagaagccgcttataaggatgcggacttcgttgtcatcgcggctcccactaactatgacagcaagaagaacttctttgacacttctgcggttgaagcagttatcaaactggtcatccagtacaatccggatgccattatggtcatcaagtccacgataccggtcggctttacggcctctgtgcgtgaaaagtaccattgcgataacatcatcttcagcccggaattcctgcgtgaatcgaaagcactgtatgataatctctatcctagccgcatcatcgtcggtaccgatgtggagaatgctcgtctggtgaaagctgcaaatacttttgccggtttgctgcaggaaggggccatcaaggagaatattgatactcttatcatgggcttcaccgaggccgaggcagtcaagctgtttgctaatacttatctcgccctccgtgtgtcctacttcaacgagctggatacctacgcggagatgaagggcttgaatacccagcaaattatcaacggcgtctgccttgacccgcgtattggcagccactacaataacccgtccttcggctatggtggttattgcctgcccaaagataccaagcagctccttgccaactatgcggatgtgccggaaaaccttattgaagcgattgtggaatctaaccgtactcgtaaggattacattgcagaccgtgtgttggagattgctggcgcatacgaggcaaatgaggactatgatccgagcaaggagcacaatgttgtggtcggtgttttccgcttgaccatgaaatccaattcggacaacttccgccagtcttctattcagggtgttatgaagcgcatcaaggccaagggcgcaacggttattatctacgagccgactctggaaaatggcagcaccttcttcggtagtgaagtggtgaatgaccttgaggagtttaagaaacgtagtcaggccattattgccaaccgctacgatagctgtttggatgacgtgcaggataaggtctacacccgtgacctgttccgcagagactaa

SEQ ID NO: 158 - DNA, 40294 bp, unidentified
  source 1..40294: mol_type = unassigned DNA
ggcgggctgtggatcaataacctgcacggtttgctgtttattcacgctcttcttgaatggattggataccccattaccttattcgccgtggtatttattatcaatgccatcaatctgatagatgggatagacggattggcttccggattgtgtggaatggctatgcttttttatggattggtgttttttataataggcgaatacatttatgccctgctcgcttttgcgacacttggagtgctcgtcccctttttctattataacgtatttggagatcctgccaaaaagaacaaaatattcatgggtgataccggcagcttgacgattggtatgatgacttgcattttaagtctgaaactgcttaacgggtttccggtaaatccctctatgcaacagcctaatgctttctttttagcctattcaccgcttatcattccctgttttgatgtggtacgggtttatttgcaccgtgtgcgaaacggaaagaatccctttttgccagataagaaccatatccatcacaaaatgcttgccattggtatgaagcagcgtacagccatgattaccattgtgcttatatccgtctgttttaccctgtgcaatattttgctttcacgttatataaatgtaaccttacttttagtactggacatctttatatggaccttgggtaatctatggttaacccgtagaatccatatagctcattcgaaactatagttttatatcaatatgaatttttgcaaaaatttaattggggcaatattactcctgtttttaggagcttgctcaacttcaaaagaagtcgtttattttcaagatttacgtccgggcgaaagtgaattggcacttactgatccggtagagattaagattcagccgaaagacaaattgtctattttagtcaacagccaggatttgcgcctaaccaacctgtttaacttgccgattgtttctcaacagatcggcatggagggctcttccggttctaatcgtggtgtgtccggttatacggtagattccaaagggaacattgactttcccgtgttgggagaaattcacatagccggtatgacccgtgaagaggtggctgcctatattaagaaagagctacagtcgcatgatttgattaaagaccctgtcgttacggtggaatatatgaatctcagcgtagccgtaatgggtgaagtgaacaatcccggccgttttagtatcgacaaggataaccttacaatcctggatgccttaagccaggcgggagacctcactatctacggaaagcgggaaaaggtattggtgttgcgtcaagaagaaggaaaacaacgggtttatggagtcaatctttgctctgccgagcatctttacacttcgcctgcttattatctgcaacagaatgatgtggtatatgtggagcctaatgctaccaaagcccgtcagtctaccgtaaacgggaacaatgtgcgcagcacctctttctggatttccctggcttctttattgacctccatcgctgtacttatcgctaaataaaaaagagaaatggctactattcagaataaatcaacagtacaaaatacgcaggatttcattaccatacaggatttattttacctctgtctcaacaaatggcactggtttgccatttcattggccttatgtttgggggttgcgaccttttatctgttgagaaccccatcggtatatgtcaggactgcctctattttgattaaagacgattccaaagggaaatcttcttctacggatatggagtctttttccgatttgggactgtttacgaccaacaccaatgtctataacgagatgggaactttgaagtctcccgacatcatgcgtgaagtggtgtctcgattgcatttggaaatgaattatcagacagacggacgttttcataaacagactgtgtatggaaaccaacttcctgtccaggtggtgattcctaatctttccgagaatgaatccgcaactttcgaactgcatctggcaaaggatggtgcagtggaattatcctcttttacacggaatggaacagaaatagaaaatgatggttttgtgaaaggcaatttgaatgacagtattcaaagccccctaggccctattgtcgttattccatcggctgcctattcagataaaacggtaagcacaatttatgtaacccgccagtctttgtctgcggcatcagctggctgttctgctcgcttgaatatatcccagaacgatgagaagtccaatatcatcacgttgtctttccaggatgtgtccacccaacgggcggaagatgtgctcaatacccttatatccgtttacaatgagaactgggtaagggacaagaatcagatagcggttagtacatccatgttcatcaatgagcgtttgggtgtgattgagggtgagcttggcaatgtggatgatgatatatcttctttcaaaagtgagcatttgctgccggatgtacaggcggcggcaaatatgtatatgactcaagccaatgaagccaatgctgcaattcgtgaattgaacaaccaggcatatatggcccgatacataaagaactatttgaccaatgaaaacaataaacatcagttactccctgccaattccggcattgaaaatgcaagccttgccacacaactgaatgaatataataccaagttattggagcgcaatagcttggtgtctcacagtagtgtcaagaaccccttagtcagggaaatggacaagtcgttggatgatatgcgaagcgctttgatcacttccattgacaaccaaatggtagctttgcgtgcacaaatcagaagtttggaggccattgggggacaggcaacctcgcagattgcctccaacccgaagcagtccaaatacctgcttagcgtggaacgccaacaaaaggtgaaggagtcactttacctatatctgttacaaaaacgtgaggagaacgagctttctcaggcatttacggcctacaatacccgtattataacaaagcctggaggaagcatgattcctaccgctcccgtaaagaagaacattttcctggtggcttttgccttgggtatattgataccggtagtcattgtgttcatgcgtgaaaacatgaatacccgtgttcgtggaagaaaagacctagaaggcttgagcgttccttttatcggagagattcctttgtctatacgtggtaagaaaagagtaaaatcacatgaggcacataccattgtggttaaagaaggaaaccgtgacatcatgaatgaggcttttcgtgtcttgcgtaccaatctggagttcatgattggcaaagaccaatcctctaatgtgattgtagtcacctcgttcaatccgggaagtggaaaatcgtttttgaccatgaacatagccatgagtcttgccatcaaaaataaaaaagtattggttatcgacggcgaccttcgccacgcctctgcctcagcctatatccattcgccggaggttggtctgagcaattatttaggaggacaggtcgacaaactttcggatataattgttacggacaagcaacacccttcattcagttttatccccgtcggcaccattccccccaacccgaccgaactgttgttcgacgaccgtctacaggacgcaatccatactttaaagcagcaatatgatgttgtattgatagactgcccaccggttgaattggtggccgatactcaaatcatagagaaactggccgaccgtaccgtttttgtggtacgtgcaggcttgctggagcgtagcatgcttccggagttggaaaacatctatcgagagaagaaatacaagaatatgtctgtaatcctcaatgggacagaaggagccggcggaagatacggttatcggtatggctaccgatacggttatggaagcggttcttattacggcagtagctccaagtaatcatgtggccgttccgtaaaaaacagactttgaaagaaagtggatttttccgtggcttcaccgactggcattgccatatcctccccgatgtggatgacggcgtacagacgatggatgaagctctgcaaattttaggggaatacgaacgactgggagtaaaggaagtatggctcactccgcacattatggaggatatgccaaatacgacccaacatttgagggcacgtttcgttgaattacaaagcgcataccaaggtaatatagcattgaatcttgcttctgagaatatgctggacaacctatttgaagagcgattgaataagaacgacctactgcctattggtaaagctggcaaacacctgttggtggaaacaagttacttcaatcccccgatggacttgcagaatatcctgctccgtatcaaagcaaaaggttattatcctatattagctcatccggaacgttatctgtatatgaacgagagtgattaccaacagttgaaatctataaatgttcagtttcagcttaatcaattttcgcttctatgtttgtatggtaaagaagttaagaaaaaggctttaatgctccaaaagttaagaatgtacgactatactggtacagatttgcatcgattgaatacattgaacagagcaatttgtttataaataatttattgcgtaagaagtatgaatataaaatatgatgatctaactaaattatttgccattgagcaagctaaagaaacttcatataggagtacgttacggcaaagtcttgcctcattcttaagtttatgtgataaagctgacatctccgttgatacgaagactgaattgaagtacatttgcaattacataaatgatattgttaagtattttgaaaaaggacttcacagtaccgctttttcaaaaatgaaaaacttatttgcaagaacaaaaaatcataaggtattaaacaacagtatgccatattcaaccccttgctgcaggaagttcattgtatagaatttgagtgaaaggggattacgaaatatagaagagtttcctctttatgaagtccatggatagtctgaatctaaaaacatattttgtgctgtcagaaggcttcgacgcacaattctaacatgtccccaaaggatgcattaatttgttttggaaaatgcaaatacaatagatgactagcgatgaatgaaaaatacccctttaacacattaatatcgaaatatcgcatatcggcaatgggaatatcaatggtttccattatgctataccatcaaaattggattaccaacggtattttctttgaatgggtgcgaatgttaggatacataggtgtagaggtgtttttgttcatatcaggctttggtattgcgcattcgcttgcgaaaaactcgttaggacagtattacaaaaatagggtaatcaggcttataccagcttgtattctgttcgatttatgcaagattgcattgagttatattcccacgatgcctcctatgcaagacttctttttggacttgttttctctgtcacattggtacatatatgccatagttgtttactacctgcttgcccctgctatttacaaaataatagacaaacgggggggattgcatttttagcaataattattgccacatatataacaatttgtttttggcaatatgatgccgatgctccatatttgataaaatatgggcgttgggttgtgaaacggttttctgtgttcgtatttggaatgttcatagctattaggctgttgagatttggaatctacaaagtggttttattgggagtattggccacattggccaatgtgggcgtgttccactatacaatattagccaatagtgacccaacgagtcatgatttcttcacaaagttggcgatattgctaccggacaggtcagttattcccgataacggacgtttcatattggatatgtttaatgtgttactactgattccgttattcgctcttattgcctttcttatgaagaaatctcatatattattcattattaatcgaataggaaaatatttacttgaaatatatttgtgccatcaatatatatttacagtgatttcagaacattttgccatgcctcctatggcggctttagctgtgggcatgtgcttgtcgtttgctatggcatacttgataggtacaacagcaagctcaattaaaacgtttgccacaagatatatttgaaaaatactgcaaccatgccgagtgaatcaaccaataagcgcatagccaaaaatacactgctgctgtatgtcaggatgctattgacaatggccataggactgtacacgtcccgtgtggttcttgcggaattaggaatatcggattatggcttatacagtgtagtaggcggcatcgtaacgatgtttactttcatcaatggatcgttgaatgctggtacacagcgtttcttgacatttgaattggggcgaggcaacattgttcaattaaagaaaatattttcgacagctattgtcatatatactttcttggcattattaatattgtttcttgccgaaaccgtagggttatggtttctgctgaataagatgaattttgagccaggacgactaaatgcggcaatttgggtttatcaattctccatcatagcctgcatggtaagcatcatccaggtgccgtttatggcggcattggtagctcatgagaagttcgacatatatgcctatatgagcatatatgatgcagtgatgaaacttgttattgtctttttattgacatttgcaccatttgacaaactcatattctatgcctcacttattttactggtcaacatttcatcagctattatttacaattggtattgcagaaaacattacgatgaatgtcgattcgtgtgggggttggacaagaacgttttcaagcgtatgttttcattttcggcttgggatgtggtcggtagtttggcttcaataggtcaattacaaggcgtgaacattgttattaatatgttttgtggaactattgtcaatgcagcatatggaatagcaacgacagtcaacaacattgtcatgggatttgtgaacaatttcatgatggcatccaatccacaaatagtcaaaacttatgcacagaatcaacttaaggaaatgttctcgctggttataaacacggccaagatggcatcttacttgcttttgattatcggtatccccgtatttattgaagtagagtttttgcttgagttgtggttgggcgagtatccgccctatgcgccattatttttacgcatcattcttatacaatcgtgggtgcaaactctcggtactcctactatccgtgccctccatgctactggcaatatcaaactgatgaatatattggtaggttcattattattgatgatattacccgtgacgtattttcttttgcgttcgggagcttctcctgaaattgtgctttgtgtcaacattatcccttgggtaattgctattccaatccgtctggttctactctacagatattgtaaattcccgatattatcctacataaagaaggttattcttttgggtgcagcaatagctatcctatgtttttttataccgtacattacgcacactttttttatcaatgatgccggttggagagagtttttagcggttggattcgtaagctttacaacgtctgttatcattattttcacaataggcatacccaaaagcattcgcttacaaatcatcggcaagatgagagagtatttcaaattttaaaagatataaacaatgaagaggtcaaaagtccttgttctaatgttgattgcttcagtgatactgaatattacttgtttcctgccatatataggtggatattacgacaggttcaaggagaagatatttccgacacaatattttaaatccaacaccattgatagtgtggtaatcaatgctgttgttgaagcgtctttgaaaatggatggtagcaagtttgagactcgacatcccagcttaggcttagtacctgatgttaaactatttttaacaaacggggggggtaataaggagcaacgccaaaataattatgcgatggcatatctctatgctggattgtcatattacgctttgaattgcaatgataaagaagttatagattttctgttgttgaagtccaatgaattctcttcaaatggaaagttggaatatgaacttaccgaagttgaccaagtccctattggtattatgtatatcaacctatataaaatatcccgaaataaagaatttctcgatgttgctcgttctgttttcgattacttgaacgaaaaaagaatcaatggaagcaatcttatttcataccgtgcggaaagtgcaaaccaattcagcgatggtgttggaatgatatgcccattcttgatggaatactttcatgcaacgcaggactcaacagctttgatgatggcgaacgataacttgaacgaatttaagaaatggggatgtgatatcgcaacgggcattcctacgcatggctataataaagaaacccatataaaagttggcagtgctaattggggaagaggtataggctggtatttacttgcggctgcttatatgccacacttggatgaccctcttcttgacaagagcattgaattgttgaattactctcaattcccattgtcgagcaaacaatttgactcctcaactgcactaatgattgaaatttacaaacagagccgcattcctaacgtacaacggcctctcgattttatcaaacctcatatcactcaagaagggttggtaatgaaatgtagtggtgatacgtatgatttaaacaactattctcatttctttggtcctgcggaattgaccaacggactttttctcatactaatttcacatttccaacgatgaaaatcggaatacttacgcatccattacgtttcaattatggagggctgctacagaactatgcattgcagaccgtattaaggcgtttgggacatgaaccactcactttggatgttccccacgtgatgaaggttaacaagacgacctttctaaaggatgtgcttaaacgcttatattaccgctatatactccatttgcaagtatatattttcaaagaatggaggtacaataggctttaccctataatgatgcaaaacttgcagccttttatcgacacgcatataaaaaagattgaagtgaacgacttcaacgcgttgaatcctaatgattttgatgcgtttatagtgggtagcgaccaagtttggcgtaggttatatatgcccgacatttatcgcgagtatttgagttttgcggagggatggaacgtaagacggattagctatgctgcatctttcggaacagaagaatgggaatatagcccattagaaacgacagaatgtcgaagattactacaaaaatttgatgcagtgtcagtaagagaagcatctggtgtctcgttatgtaaaaaacattttggagtagaagctgttcatgtcgttgaccctactttattgcttgatagagacgattattgcaatttgtttgaggggaaagatataaaaccccaccaaaatggattgcttgtttatctgcttgaccaacgcgaggagaatgagaagatgataagctactttgcgaatactttgggattgccccctttcagtgtaaattccaaatatgagacccctgggtttcacccagttgaagaatgtatccaaccttcggtagaaacttggttgaaagggttttacgatgctaatttcgtactgactgattcgtttcacgcttgtgttttttctattattttcaataaaccatttgctgtatttggaaatgcaaagcgtggactgtcacgtatcgagtcgcttctttcttcatatcgacttacagataggatagtatattccaccaaagactgtgaaaagttagatggggtaatagattggaataatgcaaataagagtgtcgctgaaaatagagaacattcacttagattcttaaaagactcattgggaaaatagcttagacggataattaatttgtcggttgtgtaatcattacaccacaaataaaagcaaacatatatgaatatactataccaaacttgtgggaaattaaactcgacaagtggagggacagagcgcaccactatcactatggcagaagcactggctcaactttacggagttcgatgcttctctatctatgaacggattgccgacaccccaaaggaaaattgcatcgtagccgaattccaatggtcggcgcagcgtgatgccgaaattaacaaaaaggcacttagaaaaataatcgtggagaatgatattgatttcgtcatcatacagggagccttcattcatgtttcacgttttaagactgccgcagaagggacaaagtgcaagataatattcgcccatcattttgagccaagatgggaacttgtgtttggacatttcggcagtttgattcattatcgccccaaatccgtcatagactttatgcgatggatgaaatggattgtcacttatccacgcacagcgatgaaccgagaaaaagtactttcggctcaataccgtgcggcttatgaatgtgctcacagggtagtgctgcttagtaaaggctttattaaaccgtacagtgaatttgccaaacttcaagatacttcgaaattcactattatccctaatggactttcttttaatttatccgcacactatgaggatttgaccaagcataaggtggtactaatagtttctcgtcttgacgaaacacagaaaagactatcattggcattacgcatttggaagaaggtcaagcaaaatcctgtggcagatggttgggtgatgaagattgtaggtcatggtggggactacgagctatgtgagaatataatcaagaatgaggatattccggctgttacccttgaagggaggcaggatccgataccttactataaggaagcttcaatcttcatgatgacttcgcggagcgaagcgtggggattgacgctcaccgaggcgcagcagatgggcgtggtgccaatagctttcgacacctacgcctcgttgcgggacataatcaccgatggcgtggatggcgagataatagccgaaggcgatgttgatggatatgtgcgctgtgtgttaaacttgatgcaggatgatgtcacacggcaacgtatggcaaggcaagctattgcatcatcgcaacgtttttcgcaggaaaagattgcagggatgtggaaggcactctttgacaatttaggatgatgaaaataaattatttcacatggaaaattcgcagaagaatagcagattagaccctaatgtgtgtggagcaaaaagtatgccaaaatatcgcaaattcaaagaaaagacttgagtatgtcgatttaatgaaagggatatgtatcacactggtggtagcaacccactgtggagtatgtattccacactatttgcctttaggatttgaaataaacatggcactcataaacataaggatgtcgctgtattttttcttgtcaggaattttttttaaagaatatatgagtttcagcgatttcgttgttcgtaaggtaaataagctgattgtcccgtatgtgttttttgcaattttcccatacgcattgctgtttgtgatttggcccgaaacgattccacaaaacactcaaggcatatattccgttacgccttgttatagaacctatgaatggcacgctgtggtttttaagagcgttgttcctaacctatctgttgtattacgcatttcatctaatttcgcattcatggccagaagtggtgaaattgatggttacgctggcagtcgcattactcgcatatatgggaacagaagctgggaacaagcatttggaaaacaatacattgaatcaatggatatggctgttgaacataccgatggcatttatggctttgccatatttctatgtggctgagttccttcgtaaccacaacatcctatcgatgaaattcccgatatggaaaaccattgttggagtagtattatttttggcgatatgcttattaacggctcagcccgaagtgagcttcaaagaattgcagctccctaatctgcctcttatatacattgcatcgttgagcggaataatggtaatatggcttcttgcagtggctgttaataagctactatttgtgtcctattgtggccgatattcactaattattcttggaacacaaagtttcttctttggtgtggtaaaacagtattccaacagcgtatgggttatgtttttagtgaccatggcattggcaccggttactatatggatattcaaaaaatatttcccatactttacagcccagaaagacttattcccagtcggcgacaaggtattgaagagaaaagaataaaattgtattatgctagacaagaactcgatatcaaaagccattgacaacctgcgacttccgatggctattatggtggtagcaatccattgttacttctttaactcgttaaatatcaacgcattaccaagcaaatgggggggggtatttgttgagtggattataaatatttgttcgatagtactgaccgattgtgcggtgcccatgttttttgttataagcggctatctgtttttcttgcgtcaggatgacgggtttacgtgggcgcagtataaggccaagatgctgagaaaatgcaagatactgttattgccatttttcatttggaacatcttgggagcgttatcctatccaagtcgctttattgatgccacgttgactgaaaaattattgggattttggagtcagaggatggaatggggaagctgggcaggaccttgggacgggccattgtggtttttgcgtgacttgttcgttgtgatgcttttcagccctttcatttactggataataaagcgaatcggaatttggttcatagtcgtaatgttggtttggctatctttcattgacaatgagtctttgtgcccaggactctcaggcacagccttgttgtggttcagtctgggcagttacctgtcgatcaagaagcctacctcgttcgggaaaatacccatgaacattgtggtggttcttgctgctgttttcttcgtatgcaggttgttggtaatggggaatgtcatcgatggaatttggggggatatcctcaacataacatggattcttacatcaatggcattttactttagactggcttacctcatggcagagcgtaacgttcgagtcagcgaaacattaaagagattgggagcttcaagttttgtgatatttgctatgcacagcctgataaacggtcgtatatcatctgttttgcttttcatggtagggaaacagaatgtgggcgacttgcttaccataacattctatttcgctaccataattcttactgtggccacatgctattgctttcatttgatagtcaaaaggaataatgtaactgctctcctctttgaaggagggagaaaatgagataattatatatgaatacgcattacacgacagaccgcagcacccaaatggtattgtcggttttaaaagcttatgggataaagaaaattgtggtttcgccgggaacgacaaacatggcattcgtggccagtgcgcaaagcgacccgtgtttcgaaatgtattcctcggtagatgagcggtcggcagcttatatagcctgcggattgtcgcaagagtcgggtgaagctgtggtgatatcgtgcacaggtgccacagcttcgagggattatatgcctggactgaccgaagcatactatcggaaactgcccgtactggccataaccggctcgcatggagagtatctaattgggcaccttcatccgcaggtgatagacagaagcgttactcccaacgacattgttcgttacagtgccaatatcaaagaaacaaaatgtccggatgatgaatggcacaacaatgtggaaattaacaaagccgtttcagaacttttcaggcatggtggcggaccagtccatataaatcttgaaacgatgcacagtggtaattttgcttgcgaggaattgcctccgtgcagggtcatcaagcgtattacttcggttgcaagcataccctcgattccgaatgggaagatagccatagtcattggttcgcaccgtcatttttctcaaaaagagaccgatcttattgataaattttgcagtgagtacaacgccgtggtatttgctgaccatacgagcaattataatggcaaatattccttcaactcggcattgcttgggtgccaattccattacaattcatccatattcgatgtagatctcataatccatatcggcgaagtgagcgctgatgtgtattcctattcaaagttgaagagtccccgcacttggcgcattagcgaagacggggagatgcgcgaccgtttcagaaatcttgagtatgtgttcgaaatgtcggtagagcagttcatggaaggcattgccaaaggcagcagtgtaaacacattatataatgaatgtagccttgaatataaaaccatgttttcccggatacctgaaataccgttctcaaacatttggatagccaatactctccatgacaaaatgccagaaggtagcctactgtatttcagtattctcaatagcttgagggcgtggaacttctttgacatacacagttctataactacttcgtgcaacgtgggtggttttggtattgatggtcccttgtcaacggcattaggtgcagctattgcctgtcctgacaaaaccacatttatagtaaccggcgatttggctttcttctacgacctgaatgtgttggggaaccgccatatggacaacaacatgagaattctcctcataaacaacgggtgtgggacagagtttcgcaattatgaccaccccgcatcttattggggggaggaagctaacctttacatggctgccggtggacacttcggaaagcaatcaaggaaactggtgaaagattttgtcgagaacttgggttttgagtatttgtcggcttcgagcaaagaagacttcatggaggtatatcccaaatggattgtaaccacatctgacaagccaattatgctggaagtctttacaaacagtgccgacgagagcgtggcactcgataggtttaggaacatcgtgccaccccctaagggacagcaaatcaaagagcaaattaaaataacagtaaaagagctggtagggaatgatatccttacacaagttaagaaaataatcaaaaaataacatgtcactgattaaacgtattctgtggtatttcaaaccgttaaaaaccaccgtagcaaatatatcaattacagccccctctcgaaaacttgcaggtaagcgagtaatcgtcacaggcggtacacgcggactgggatattacatagccaaacgatttgctgccgaggggggggaggtattaatcacagggcgagatgaaactaagactgccattgtggcaaaggaaataggttgtaaatacttgtgtctggatgtaacccatcttgaatcgtttaagggcttttttcccattgcaaggaaggaactcggtgggcaaatagacatccttgtcaacaatgcagggataagccttcatgagggtaatatgatgaatgtgacagtagaagggttttccagccaaattatgactaacttgactggaccgtactttctcgctcaggaatttctgcggcagtatgaaaatcagattgaaaagtccaatgcttcaatcatattcatggcctcagagaaagggttatttcccgacgaattgccatacgggctgacaaaggctgcgattgtgagtctgacacaaggaatggctcgccggtgggttacaaaaggaatccgagtcaatgccctggctcctggagtgacagcaagcgacatgactggatataaaagggataacctatattgcgaaaacaattgcagtagaagggcatacctgcctgaggaggtagccgaagttgcggtattccttgcgtcggacacttctcgctgcataacggggcaggtacttaccacgaatatgggaaatcatttgcggtgtgactggtaacacagaaatgaatatattatttgttttgcaacgataccccgggtttggaggcatcgagtcggtgacacggatgcttgctggggaatttatcggacggttcggctacagggtcgcagttttttccacatcccgacaagataactcctcgcagttactcgacggcgacctgttttattaccaaacttccgacttgaaaggcgacgagctaaagaaggaatttgatgctttggttcatgatttcagtccaaactttattatctatcaagactcatacgttcccgaagattttttgctggaacatttgccgcagggcataaaaataatagtgtgcgagcataacacacccgattgcctcgaaaccgggcttgagagtgtgacgaaaaatctatcctgggccaatccaatgaatatcatacggaaactgcgtttgccacggcgtatgcgcaacctccacaaggcaaccaccgagcaccataaaaagatgctgcacgttgccgacaggtatttaatcctttcagatggcttccgcccgatacttcgtgattttttccatatcgaaagtccccaaatatctacgatgcctaatccaatagaagtgccaagagaaccgatcattatcgagagccgcccaaaccaggcattgtatgtcgggcggctgacagaccaaaaggggattaagtacttaatagaaatatggtcgaaaattgagccgcattgcaattggaagcttctcgtggttggagatggtgacaaacgacagtatatggaaaaagaaatacgttcccgccgcctcaagaatataaggcttataggttttcagcaacacacgtcaggctactttatggaatcgtcggcacacctgatgacatcgatatatgaaggtttcggcataaccaatttggaggccgccatacgtggaacaataccttttgctttcaacagttttgcatcggcaaaagatatcattgacgacggacaaaccgggtatcttataaagccttttgatgtggatgcttatgttgagacatttctggcatttaccaagttgccacagagcaagatgattgctatgcggcgcaaggcaatcgagagggcgcaagaattttcattgcaacacattgccgataagtggaatgaactttttaacaaacttagacatggagaaaatagggatactcacctaccacagggcttatagctacggagctaaactgcaagcctatgcattggccacatatttgacttctataggcttcgaggccgaagtcattgactacggaaatatcggggaggagaaattgcgcaaaataggcacaaaaagcctgaaagattttattgtaacaacattatgctatattgcttcgagcatcgctgaaccgcaaagaatacggcattttgacgagttcatggacatcatacctcactcgcccaagcattatgacaaggcaaatattgcagaggccaacgataagtatgattattttattacaggaagtgaccaagtatggaacccaaaatacaacgaaggcgacctgacctacttgcttgatttcgtaaaggataataaaaagatattttcatacgccgcaagtttcggtgtgtcacaacttcccgatgatatactccaagtttacaaacctttgctcaagaggtttaacaaaattcttatccgcgaagttactgggaaaactttgttgcatacacaattaggattggattcacaagtagtactcgatcccacatttttgctttcccgcagccagtgggagaagatggcaaattatccgttatcaaaacaacagaaatatatactgagttttcagattataaatagagacgttcactacgatgccatgcttgattacttgcaccgcaagctgggatatgaggtgatagaactgaaagattcgttccgctacaagccatggaagtggcccatttatgccaaagctggcccgaaagagtttttaggtttgataaagaatgccgaaatggtggtgaccaattctttccacgcaacagttttttccattcttttccacagatcgtttttttgctcacggaatagttttggattcaattcccgtatggaaaaccttacaggtggtcttggcttggcagacagaatgtttgattcttcgacatttctccactctatatccgatacagatgtggtatatgagaaagtggatgaaatactcgaagcaaaaatatcggcaactaaacaaatcatagaaaagacttttgcaaaatgaaaaccatttgtttcgtttccatgggtgaattgcttgtcaccaaggggggcattcaccgggtcacatactgcttgatgaatgagctgaagaaacgcggctatcgctgcatctacttgttttacccaatagatgaatcatgctattataccggcaatgtcgaagacgaagtacacaagctttctccagagcaagtggaaaattatcttacccaagagaaggtggatgtggtggttaaccaacaagctatttttagtacatcgttcacgaaactagtattaggctttaatttgcgtcgtttcaaatatatatcagtttttcacaatactcctgctatttacgaaaagacattaacattttcaagactttggtataacttcttacatcagcgtggagtctctgctaagatgtcgaattgcgtgagaatgatagtttaccctttatggaagcagagggttgttaaaggggcagggaagatgtatgctgtcaactacgatgccagtgacaaatgcgtgatgctgtcgagcaacgattggcctacacttggccgctaccttaaacatgacgtaagtgagaaatgtgtgaccatacataatccacttacatttgacacaattgagacagcagaatgtttatgccataagaaaaaaaatgtgttgattgtgtcaaggcttaacaattttgagaaacgtcttgaccgtgcactcaagatatggaagaagatagagaccggcggctttgatgattggcatttgtatatagtcggctgggggcttcaagaaaaaatgctccacaaccttgctcgaaaattaaaactaagaaatgtgcattttgaaggacggcaaccgtcggaaccatattaccataatgcttctatcttcatgatgacaagtgcggtggaaggctggggactgacactgaccgagtcaatgcagacgggtgttgtaccgatagcttttgacagttacccggcattgcacgagattatcaccgaccgctatgatggttgtataatccgcgacaacgatttggatgcatacgctgtttgcatggaggaactgatgcgcaaccgcaaagagcgtgagcgaatagctcggaacggtattgagagttgcaagcgatttgaaactgataaaataattgtacaatgggtaaaattgatagaaagtctataaaagtgttgtgggtatcattagtcaagttccctccgctgtgcgagcatttgggtgaaactattccggcacattgcggatggatgtattcctcggccaaggcattgctaaggatgatgcccgaagtacggcttggcgtgatggtttattcttacggcaggagttatgaacggtatgaaattgacggtgttacatactaccttattcctacgggaaggatagaccgaacgtcgaagaaacaaatcgagacttgccgcagggcgatacgtgattttgccccagacttgatgcatatccacggcacggaacattcactggccaaagctgcttgcgtggccaatgagaatggtacgcgcatggtggcaaacattcaggggcttgccgggccttatatgcgttatgccgatggtggactttcgttgtggaacaaatggacaaacatcactccgcttgacttctatcggggtacatttctactcaatgcaaaacgcaatttcaagcatcgagccgaatgtgagaattatgtcctcacgtatattactgacatcgtggggcgtactcagtgggattgtgaccatgtgatgaccgttaatcctcgactgcgttatcactttatgaatgaaacattgcgagattcgttttatgaagttccccgttggaattatgcccagtgtaaaaaacatacgattttcgtgagcaacagcggttcgccactgaaaggtgcacatcaggtgctgaaggcattgcctattatcttgcggcaatatcccgacacggtggtcaatttctgcggtagccgtgttatgagtaataatctgaaagacattcttcgtttccaaggctaccacctatatcttcgtcgattggtaaagcgattacaattgcaggagcatgtgcatttccttgggtctctttcagaagctcagatgaaacaacaattccttgacgctaacgtgtatgtcatgcccagtgccattgaaaactcgcccaactcgttgtgcgaagcgcaaattcttggcacgccggtggtggcaagctactgcggcggcatccccacgttgctcaccgacggactgacgggctacttctatcgctatgaagaatatgaacagctggcacaaacggtgatgaggttgtttgggcaagaaagtgacatcggactgtcggctgccgaaatggaagtggccggcaagcgacacgatagagaaaagaatgccctgcggcttgcggagatttataacgatataatgcagcattaaactatgtttgaaaagataaggccatatctcaattttaggtatttcctgtatttcttcagtttcatcgcaggctggccgtgcgtattctacctaatggggtggttgccccattatacggtgaactacgtgttgctgtttgtcatggcaatgtcgtatgtcataataaggaaatgtggccaatttgacaaaccaataaacgatctgatcttgattcaggtatttgggtggattttcttttcattaatccatatggatacttcatattatacaagaatcatattgctgctaactacctttgctatactaaggattcagcaagatgagggtggctcattggatttctgcaaaacgtatgatgtatggttggtggttcaagcaataagcggaacaatagggattttattagtactcggtggattattgcagcctattttcaaatttgttgagatggatatgcgacccgggtatttctttggattattcactacaaatacctactttgggggacttgtccgtaatgccggattttatgatgagccgggagccttggcgttttggggaatctatgcattgataattaataagatgtttgtaaaaaacacaaaaatagagatacttttaattgtcggtttgatatcaaccatgtctgtggcatatttcatacagttggcgatatatttattagtgttttaccgcaagcaatcttggaaactgataatgattgcggctgtgattctcataacgctaaagttcataacatcctataatgaagctatggacagtgctttttggggcaggtttcagtatgacgaatccacaggtacgatttcgggagataatagaagcgtcttgatggaacgatgctggcgcatcttctgtgactatcccatattaggcatgggagcaagaaatctggtgtcacccgaagttgcttcgaaatatggttttgtcggggctaacttttttttcaattgggctgcagacgggatcgtgggggcgattattacttacttgcctctgatatacttgttccatttaggcaggtatgataaaaagttgtatggcataggattgttgatgctgttaggtttcttgcaacgaccttatgacagcacccaattactgtaccctatgatgacttatacaatcgtatatcaagcttattactcaatcttttatagaaatgaataatctcgttttttgggcgcattcgtattgtcgctcaacccttaagttttattctgaattagctaaagctctttcaaggaattgcttcatatacacatggattgaaaacttagatttgagatcggctaccggatttagcaattctgagttttcggatttgaaaattgtgcatataggaaatgatattgatttagcagaaaaaacattggccaatcatattgatgattacaatatattttgcgcatatcaaacatgccctgtctatcagcatttaatgaatattttaatcagaaagaagacccggtatggaatgttttccgaagctccgtgtaatatggacgaatatccgaaaagatttttcaaggagctttatttaagatgctttttacctgtaaaattaaaaaatattatatccaatgctgattttatcttgaacgcttccggatattatgaaaagggattgttcaacctcggatggaaaccagaacagataatttcatgtgggtactacccgcctcgaattcccggcagcaagctaatggaacgaactgaaaacaattggcataactttacaattcttctgtcgggactacaccaatggcacaggtctccttggatattactggaagcattagacatattgaaaaaaaaaggcttcatgcccaagtgctatatcacgcagtctggaccatacctcggtaaagtgcaagattatgcgaagaaacggcaactgtcaaatgtggagttccttggttttgtagatatttccaaattgatagatttgtatgagtcatgttcggtttatgtgggttgcggaaattatgagccatggggaatgaggttgaacgactgcctacagtgtggcgcaccattaattgtcaatcgaggcatgggaggagttaagatggtcgatgagtataattgtggactcagcttcaaccgtggcgattatataggcttggcaaatgcaatggaaagactgatgactgacaaagcattgtatttgcaaattgcaaagaatgccatatatgcagctgaagaaattaggccggaaaaggctacagtaaaatatgccgctaaaataaagaaattcattcaataaagattatgagatatttcattacaaacgtacttccccatcatttatcaggaaagtataagatttcttatgcagccgccaactttagctgggcgctaatacacagttctgtctttgatgaagttttttctattgcgccccttaacgtttcaggagctatagatgatgttgacatgccagagcttgtttactctgattggagaaagagaggaaaaatccttcaaaagctcgcacccataaaagagagctttctgatttttagaaaaatcaaacgcaatagtaatgtctggttttataacataagtattctgaacattgttttatttttcctgtgcaaatggttcaaaccttcagcacattgcaatgtgataatattggatatttatattccgaaaagaaagttgtcgcttgaggctttattcctttgggcaataaatcatgcaaactcaacaattaagttgtcggattcacctctttttacttgcaaaaaaacagaatgcctgccgggtgtcgtaccttttaatgcccccctattcccaataatagaaagtgtgaaggccgaatttttactttcgggactattacgcgaagacatttcccagatttcgttgattatcagagttttttccaaaataaaaaatgctacattatatataacaggattttctgaaaaagaagaggagatgaaactggaatgtagcaaatatcccaatattcattactatggtgaattatctttcaataggtatatggatttactccataaggtctcatttctgttaagcacaagagatccaaaagaaaaaggcaatcaatgcaatttcccctcaaaaataattgaagggattctgcataaccgcataataatttcgacaataaaatacaagcaattggctggcttaaaatattttttcgtttcatctgatgaagatgaattgaaaaatcaaattgagggaatcattagaatggattccgttggacttatccggtatgccaaccaatcaaactatgccaaatcaatgttcaatcccaatagatggggtgaaataatgaattcattggaaaaggtttgacataataactttattttccatttcaaagatcataacaatgaaagtattacaaaccattgctggttttggggccttgtatggtggcatagccacctgtacgtatgatttgatttcggcgatgcacgacattggttttccgctcgacttgctgactttggaagtaaagaattcagctgacaagttgatgggaaaaggagaagactggattaaggcgttacccaacgatgcggtcacaccctacgagtattcaaagaggattgcccaatatctaaagagtcatgattacgacctgtaccacaccaacggcctgtggatgtattgcaaccacgtaacctgctctgtggctcggcatcgccgcaagccatatatcatcaccccccacgggatgctttatcccgatgcgctccatcgctcatattggaaaaaatggccgttgatacagctttgcttccgcaacgacattggctgcgccgactgtatgcacgtcacatgcaaagccgagatggaacatgtgcgcaacttcggttaccgaaaccccatcgccatcattcctaaccctgccaacctgcccgattatttagacgaagtggcgacagcgaaaccgccctttctggggtacgacttgccaagaaaatttggtttccttggtaggttgcaccccataaagaaggttgagaaccttctttatggggtagcgaagttgccatcgccgcaagattgcgaactcgtgattatgggcaagggagatgacgcatacgagcaattcctgcgcagcgaagtggctcgactcgggctgaaaaatgtgaaattcagcggtttcgtatcgggacgcgagaaatttgagcaactggcacagctctcgtgcctgttcgtgccgagcgacttcgagaatttcggcatgatagtcaccgaagcattgtcggtgggcacgccggtcatggccagccttggcacaccttgggaggaattgaacacggtgggttgcggctggtggactgaccgctcgcccgaaaacattgccaccgtcatgcatcaagtccttgaaatgccaatggaggatcttctcacaatgggcgaaaaaggacgcgagcttgtgcaccggaaatacactgcgccacaagtggcccggcaaatgcagcaattgtatgaatggttgacgggcaacggcagccaacctgtttttattcacgtttaatcgtaacttctaatggaaatacttacaaaaagacttgcatatatagatgcaatgcgtggattcaccatgattcttgtagttttcagtcacgttcaatattttggttatggtgaatttatccaatcggtgtataatttttgtgggggggtagttgcttgatatacagggatttaatcacgctattcttcatgcctctattttttttcataagtggattcgtcctttacaaacccgatgtagaatggaatggtattatgagcttcaaattcattgctaaaaaagctttacaactgcttgtacctacgttggttttcatttcactatatatctttgtgtataattcacctctgaacttgctttgtcggtcgggacgcttgggctattggttcaccattgcgttatttgagtattatttgctttatacattattccgatggatatgttacaggttgcatcgccacgaaggtactgactggctactattgtcaggctcggcaatattatatttcgcagttacacagtctgtcttaaaccgattgggcgtaaacaatgaaacaatcagtttgttggggttagatcagcttaggtttttcttttattttgctattgggtcgttagttaggaagcatttttcgtggttcaaagaacttttagagaatggtaaaataatcacattgttgataatagcatttttctcattattcttaatcgtgcaccgcagtggtttcacattcggtaatgctatgatgtaccatctttacaatttcattggtggactaatggcactttttatagtgctcatttttttctacaaatatcaatatgttttcgagaacacatgtaaaatgggtaaatggcttcaatacatcggtcgcaacacactggctatatatatgttgcattactttttcttgccacgaaatttacaattcatcggcaacttttttatgcagcactccaatccaactttggaactatttatcacaatgggtatagctattctcgtcatcatcatttcgttgataaccaatgctatgatatgcacaagcccttttttagcccattatcttttgggcgttaaaaaatagatgatttatgaaatcggtttctatcaaagactacgacaattcgtggtatcgccctggcggggcggtgaagaggttgttatggtatttcgtcaatgtgctgttttttctcaatccattcaatccgttctcgggtataaaggtgcggctgctaaggttgttcggggcacaggtcggagtgggggtgaacattaagcccaacgtgaacatcaagtatccttggctcctcgaaatcggagattactcttggattggagaaaatgtatggatagacaatttagttcaagtgaccatcgggaccaatgtctgcataagtcagggagcaatgcttctatgtggaaatcacaattacaaacttccaacatttgacctgattgtcaaacctataattatcgagaacggagcatgggtaggtgctaagtctactgtatgtccgggcgtgaccctccacacccacgccgtgctgggtgtgggttctgtagcaaatcatgatttagatgcttatagtatctatcaaggtaatcctgctattaaaataaggaagcgtgtaatggaggcttgatttatgaaggaaggattatttttgcttggtgctttcttgattacctttttcatggggttctttatttgcttaggagcattcccctatataatctcttattttaccgaaagagtaagaatggcttatgaaaaagcagaagacaaagaagtgtttaggtggtgcgtggctttcattgtagccttttctacagcaataataatatgtttgattaagaagtaacctaaagttacttagtcgttctttgacatcttatggatttcatggatttcagtttcagtaatagtacatatactgcactattggctctttttgcggctatctttggtgttgggtacccattaatcatacaagccatcggtgaaattgacaagaaatatgacagtacgctcctcctaaagtgttttgaagaggaacccgacttcaaacgtttcaataaaagggttctaacttgcattttcttctctataacaactccattcatattgtttctatctaatggagtgccatatattcagatattcatcttggctattgcctccattgcgatgctttcacttttaatgtcttcgataggattgtataaattatttctaagttactattatccaagccgattgtttgatatacttatttcaaaaccggatggtcggtatatggagattttagatattgccatttatgcggtcaagaaagataatatcggtctatataacgcttgcatgcaacatttatatgactctattagcttgttaagttccgataaacctcaaattaatcagattacggaaataacgaaaagaatattaaactattcctcatctaaagatgctcccaacatgttgaagtcggatacagtaggtataaacttttacttttccctgcccacactaaactacagattgatgtggattactttacagaggcacatcaacaatgacaattttgactgggtaatgaattattgggaatatgcagaccagtattattctttcaagctaatacatgataatgataaaccacaagtgcgcaatggtctaatagataataagcgtgaaaaattcaaggaatttcatattgcattaggagcatttctgctgtatagtggcaaagacggatggctaaaacaactcatgcgttttaccaatcaactccctccaaaatatgaattgacactttgctcgtttactgaaatatttgactggttgatacactttgacaacttgttgcaagatgcatccaaccaatttatcttggaagttgaatatcctttcaccaaacatggcggtgttcaagctgactacattgcatatggtgccattgtaaagtatttggcttattccatgctcttcttggatgaaatagactataatgttaggtatatggatcccatgacagctcctttaccatgcacatctaatgatgaagaaaatgggataaaaataatacctgccaataagagatacattcggttagcaatacaactgaaaaaatcaatcaatgaaattaaaacaatagtacaaagaccactagatgttgagagccgtgtattaaaggcactagatgactttattaaagaatgtaatgatgcaataaaaaagaaagaatggtctgaagaaaaagagaatttaattaaagaccaactcacatttgaatttaatagacaggtaaactctcttatccaaaaaaaggattcatcactcagctatggaatagaagagaaaaaaacggccaaaagcaaagtaagaattgattctaatgatatttatgaaggagattatagatactcaatcaatttggaggtagtgataatctcatcactcataagaaatattcaaatcgcttacaatcaccttttcttgttgaaccatacttctttaaactatacaataaggtatgctgacatagaacctgccttaaagaaactttgcttgtccgaacagtatacagtcatcggttttggagtagaaataccccagtccattgctcaaaaaattccagctaatgtaaagaatatagtggctcataattctgaaatcctgattcttaatagaggaatgttgccatatatatcctttatcagagataatacgaatgaactgacacctttagacgacaaaggaagttttctttacacaaatttagacaagctcaaagagggaagtccttcaagtgatgagaattcgaatttagaagtgatggtaaactataagctaatcgttccatcagaaatcataaagtacatacgcataagggtattctgggatataacaaacaaaacttttgatttagataaaatcgttaatgctgataactatttgaaacgataaagataccagtgataactgccactttcaacagtggcaagacggtgcgaagaaaaagattcttctgttcgtattttgattgatctccgtatcagcaatggtctcatttataactcctgtcgtagcaagaaatcgagcaaatgaatgtgtggattccttcgtaattgctgcctatagtccattcatcaaagctgacgacatatttggggcagtttcatgtattctattattaagtatgatttataaattgtggtaaatataccgacattgttagttatacttaacaatatagaagagagaacgcatagaagcccaaaacataacattacattataacttacatgaaagtatcagttattaccgctacatggaatagcggtaaaacgcttcgcacgaccttggatagtgtactcaaccaaagttatcccgatatagagcatattatcgtggacgggggaagtacagacaatacgatggaaataatccgggagtatgaacctcgttataatgggcgattgcggtatataagcgaaccggacaaaggtctttatgatgctatgaacaagggaatccggatggctacgggggaggtggttggtatcttgaattcggatgatttttatacttcatcggatgtagtggaaaaattagagaaagagcttgctaccaaccgggtggatgcagtatatggagatattcatttcgtggatggcaatgacctgggtaaatgtgtccgctattattcgtcaagacttttcaaccgtagctggatgcgacttggctttatgcccgcacacccaagtttctactgccgcaaaattatatatgataaatatggtggctttgatttgtcatacaagattgcttccgattttgaatgtcttttacggtttattttcgtacataaaatacagacaacatatatcccaatggattttgtaaccatgcgtacaggaggaacttccaccagcggctttgccagccataaacaaattatatccgatcatcaaaaagcattcaaacgtaatggcatatacagtaatgtctttttggaatcattgaggtatatttataaaattcatgaagtattactaacaaaaataacaagatgaaaacagctttaatcaccggaattaccgggcaagacggttcgtttcttgcagaatttttattggacaaaggatatgatgttcatggtatcatccgtcgttcatcagttgattatcgggaacgtattgctcatttagaggggaaacctcattttcacttgcactatgcggatatgggggactctatgtctttagtgaaattagtgggcaaggtacaacctaccgagatttataatttggctgctcaaagccatgtgcaggtatcgtttgatgcacctgaatttacagctgatgtggacgctgtaggagtgcttcgcatattggaggcggttcgtaccaatcatctggagaaaacctgtaagatttatcaggcttcaacttccgaactttatggcaaggtagaagaagttcctcaaaatgaaaatacaccgtttcatccttacagcccttatgccgtagccaaactctacggctattggattgtgaaagagtaccgcgaggcttataatatgttctgttgttcgggcatcctgttcaaccacgaatcggaacgtcggggcgagacctttgtaacgcgcaagattacgttggctactgcccgtattgctcaaggaaagcaggattgtctgtatctgggtaatctggattccttacgtgattggggatatgccaaggattatgtggaatgcatgtggctgattctgcaacaggacaaaccgcaggatttcgtcattgcaacaggtgtacagcacactgttcgcgaatttgctacattggcattccactatgccggcattgaactgcgttgggagggtgaaggtatagatgagaaaggtattgatgcaaagaccggaaaggtactggtagctgtcagtgaggatttctatcgtcctacggatgttgtcaacctatggggtgatcctacgaaagctaagaatgaattgggatggaatccgcaatccacctcctttgaagagttggtgaaaattatggtgtctcatgatatgcaaaaagtggctgcggaacatgtggccaacgtaatgcgtaccaacttggccgaatatctggagaaaggaatcgtgaaatgatggataagaacgcaaaaatctatgtggcaggacaccggggaatggtgggatctgccattgtccgtgaactgcaacggcaggggtatacgaatattatcacccgtactcatgcagaattggatttgacacggcaggaagctgttgaaaagttttttgcggaagaaaaaccggaatatgtctttttggctgctgccaaagtgggtggtatcattgccaaccaatctgcattggctgatttcatgtatgacaacatgatactggagatgaacgtgattcacgcagcctggaagaacggctgtaaaaaattggagttcttaggttcttcatgtatttacccacgtttggcccctcagcctatgcctgaatcttgtttgctaacatcagaattggagaaaacgaatgaagcgtatgccttggccaaaatatcaggtctgaaatattgtgagtttttgaatcggcagtatggtacggatttcattagtgtgatgccaacaaatctgtatggacccaatgataattatcatcctgaacatagtcatgtacttcctgctttgatccgccgtttccatgaggcgaaagaagcgggtctggatgaagtgacttgctggggtgacggcagcccgctccgggagtttctctatgttgacgatctggccaacctatgtgtattcctgatgaataactactcggggaatgagacggtaaatgcaggaaccggcaaagaattgaccattaaagcccttacagaactggtggctaaggttgtaggatttacaggcgaaatcaagtgggatacctcacgtccgaacggaacaccccgaaagcttttggatgtatcgaaagcaacggctttggggtggtcttaccaaactgaattggaagatggtatccgattggcttatgatgatttcctgcataatcccatgcgtgcagaaaggtaacgatttaaaacattatttatgcaaattcttttattatccggaggctctgggaaacgtctttggcctctatcaaataacagtcgttccaaacagtttataaaattactcaattctcccgatggtcaaaaagagtcgatggtacaacgggttattcgtcaattgggagaatccgatttaaaaggtcatgtaaccgtggctaccagcttgtctcaggctgatgttatttacaatcagctgggtgaatacatcgatgtagtggtggagccagaaagacgtgatacatttccagccattgccttggcagcttcatatctgaaatatgagaaatcatgtgccgatgaagaagtagttgttgttatgccttgtgacccttttacggaagcaggatatttcaaagttattgagcagatggtgcatgcggtggatgacaatgtagccgagctggttcttatggggattactccagcctatccatctgttaaatatggatatgtagtgcctgatgaatcgaaactgaaaggtggaatcttttcggtcaaacggtttacggaaaaaccgaatgtagctacagcggaatatcttataaaagaaaatgcattttggaacggtggcgtatttgcttttaagttgggatatatgatgaatattgtggagcaatatatccgggctgtttctttttcggaaatccgtaacagatatagtgaattccccaaaatcagtttcgattatgaggtggcagaaaaggccaaattggtagcagtagttcctttctctggcaaatggaaagatttagggacttggaatacacttacagatgagttggaagaccatgtaataggtaatgttatcacagatggagaggcagaaaatacacatatcattaatgaattggatcttccgattatgtgtataggaaccaaagatttggtgattgcagcatcgaatgacggtattttaatttccgaaaagagcaagagcgagaacataaaaaaatatgcagaccggctacagtgttgtccaatgtatgaggaaagacattggggagaatacaagattattcataatgttcaatattcagatggctttcagtcgttgacgaagcaattgattataaaggcaggaaaaagtctcacatatcaagctcatcatctacggaaagaggtatggacggttgttgacggagagggactgttggctatagaaggaaaaattaccccagttaaacggggagatactgtttgtatccttcaagatatgcgccacggtctaaaagccataaatgacttgaccctgatagaaacgcaaaccggaagcgatcttcttgaagatgatgtggaattgtttgattggaattggcaaaagtagatacaaagtttggctagaactttcagataatcaaatccgattaaatattttacacaaaattcagtattataaaaggcaagggcttttgtgattcttccattgattatgaaaatcgagtttatgggagaatcaaaatttatattgcattccaaaaatgcaaatgttcagtggacagtatcaaaatattccggtgttaatccattaagaatttatcttatgctatttcgtatgggaatgaagaaagaacaagaagtgttggaacaaactgcgtcttgtacatcactttttgttcttttgatatcttgaaaacattgattgtataacatggtttcttcgttatcggtttattatcgaaaacttgcttatcacgtaatagaatcggacggcttcctatgggtcggattcaagccgggaatggtacattttattgctaaagaggtttggaatattcgccccttgacccgaacggatgttgagagatattatgaggagtttacagtattaacccaaggtaaagggagtctttattttcggattgtagctcatggtggatttctgaaagaggcgttggcttatgagttgcatggtttgactgtttctgacgacaactacctcagaagccttaattccggcagacatgtagaactttacccgcataacgagaaagcttatcgtgctattataaaaggctttgaacagcatcgtatcggtaccgttgtgcaagcgaccgggacgggaaagtcatatctgctggctcgttatatatcagaccatgccacagaacgaatttgcgtatttgctccaaatgtcacaatcctggaggagatcaaaaaagcggtaggctttacctctccttatatctgctatcgaacgtttcagtcattgatatattatcgaaaaaatgataaacaactcaaagcagatcatattttgattgatgagtttcatcatttcggtgcagaaatatggggggctgctttgcaggaggtaattgaatccaatccgcaggcctatatattaggaacatcggcgactcctattcgcccggagggaatgattgatacggtggatctttatttcgagggaaatctgttttatgaacttaccttacctcaggcttggtattaccgtattttaccagtcccaatcctggtacaaagtgcctatggattagacggtgaactgaatcgtttacaaaagcgattggatcgaagcggatgttcaattcgacgaaaagaacaagtccaaaagaaactggatgtggctcgcgttgattttaaaggggcgttaggagctcctgaggtaatccgaaagttcttgcccaaagatgtatgtaaactgctggttttttgccgtgatcttaccgatctgaaacagatggttcctgaggtgtgtggctggctgacacaagccggacgggtaatcataccatttgagatccatcacactcaaagcgaacggactaataatcaaatactaaaggctttccaaaaagaatctgggaaattgcatgtattgttctctgtcaatatgctgatagaaggactgcatgtggagggcatagatgccgtcttgtttctacggcggacagaatcctatattgttaccctgcaacagctgggccgttgcttggatgccggaagcgggaaacagcctgtcgtattggattttgtgaacaacctatcgggcaaatctgtatatgacatgatggccttgcacatggaacgccttgcctgtcagccttcacccaagggatttgaaggggtgacctcttttctgaccacaggtttcctatcagacatacggcttcgtattgaggagatattgacagagttggaaccttggcagatcatgtatgagaggcttattgagttccgtaagaaagaaaatgactggccttcggttacagaggggaagctgggcttgtggtgcaatacgcagcgcatggcttacaaacggggcagactctcggaggagcgttacaaactgctggagtctgtcggctttgaatggaacctgctggattcaaactggatgaaggaattccaatcattgaaagtcttctttgcgactcaaggtcgctggcccaaacgggaggatggtgccttggctacctggtgttatactcaacgggaaagacgtaagaaaggacgtttgagcaaagaacgcattcgtgtgttggatgagatcggatttgtgtggagtcaggacttgaacggtgaatggatgaaaaattatgaagcgttgaaaatctttctcgacaaacagcagcgctttcccaaatcagccgaaggctatttgggcgagtggtgcagtacacagcggaaaatgcgcaagcaagggaaactttcccctaatcgtcaaacactattagatcgaataggatttgtctggtcggtggagcaggtctggcgaagctacttggaacagttgcaccagtttcatgtccaaaatggacggtggcctggatgtcgtgaaggggcgttggggcgttggtgtacggttcaaagacggaattatcgaagaggaagcttgtcggatcaaaaaatcgcccaattggaacaaataggatttatacccttgaaaggagacaagtaatacagaagaaatggaaatactctcatttcatacgaaacaatagagtttccgcagccttattatcgcagttcaaagtacactatgattttagaatacaatatacccaatcgttttcgtactaataggcatattaccgtttatacaagccacccttaaatttcggatagaaggactggttgctttccacatacatatagtgtctaaataaacagcaaatattgataaatgagtattcaatataaaatcatctttggatatatggtgttgattgtggctataatcggtatgattataatcatggtacgtgagcggaatagggttttggtgattgaaactgaggcacaaacaattcatcgggttcaacacaatggaaatatagtccagcatcacatcacgattctctcaacttatggtgaaacagccctttcttgggaagaggaggattttgcgaactatcattctcttcgtctgcatatcgattccatgatgcaggccatgcacaaggggtatgaggaatttgtcagccaaagtcaaatagactcgctgcgctatctattatccagtaaagaagagcatttataccaaattatgcaacttttccatagtcagaacagtcaggaaggtatgcaattctctcatttaccagcggaagctcaaccgcgtactgttattcgtaaaaagaaaggttttacaggatttttaggggcaaaagaaactctggagatagttccttccgcatctacaattctcaagacattgaacaaggaattgctatccatgcaggaagaacggcaggaaagtatcaatgcttataccgatagcctccgcaaccacaacaaggaacttaaccgaaagcttcgccatctgataaccacgatgaacaaccagacagaacgtgtacttgaagcgaaggaatgtcatcttagagaatcttacaaccgttccatatgtgtcatctcctggctgattatctccgccattattctgcttgtcatatcctatctgattattcaaaaagatttacgggaaaaggcaagaacaaggaagcgtttggaagatacgatacaacaaaacactgcgctgttggaaatgcgcaagaatattatcctgaccatatcgcatgacatacgtgcccctttgaatgtcattgacggcagtgccgatctggcaatggatacacgtgaaaagaaacggaggaatatccatctgaataacataaggagggtgtgcaagcatgtggtacatctgcttaacaacctgttggatgtgtaccggttaaacgaggcgaaagaaatacggaacgatgtcccattcgacctgcatgaattattggaacgtaccgctgccggtttttctcatataatcaataataagggtatcctgttcaattgtgattttaaggatacggaagtcaagttatatggtgatgcagaccgcatagaacagattatagacaatctgcttaccaatgcagttaagttcacggagaccggcacaatcaatttcaatgtgcactatctcaatggactgctggtcatggaaatagtggataccggtgttggtatgagtgaggagacactttcccgtatctttcgtccttttgaacgccagacctctgcaaccaatgcggacggattcggattggggcttccgatcacgcaaggacttgtcaatcttcttgatgggacaatagaagtaacaagtttgattaattgtggaagcacatttcgtgtgacccttcccatgccggaaacggatgaaccgttggaaagcgaaaaacatgtcccgacgcattccacacacctgcatcacaatgtacttgttattgatgacgacagtatgttgcaagctgtcattaaagaaatgttagagcgtaatggcatgacctgtacaacttgtaccacagtcaaagaggtagtaaaagccatgcgggaaaaagattatgacctgttgcttacagatatcctgatgccttacaccaacgggtttgaattgttgactttgttacgtaactcaagtattggcaattcaaagactatacccattgtcgctatgactgcacgtggagagaaggagaaagatgcttttttgaatgccggatttacagcctgtatttataagccgttctcatctacagagttgatcggtctgttgtcaactatagaaagaggttgccctgacaaaaagcatgatgtagatttcagcatgatgttgtgtgaggtgagcgataagataaaattattatgttcctttattgaccagtcgaaaaaagatgttgaagaactcaattcggccatagaaaattgtaataggaagaaattgcgtgaaacggttcactgtatgctgccgatgtgggaattattacataatgaagaaatgttgttcgcttatcgttcccttttaaaagatgaaagggccagtgacactgctttaaaagaatatactcaacggataataaatcataccgatatgttgatggcagcagcaaaaaatgaaataaaaagacagacaaatgaaacggaaaatactgatagttgaagacaatatcagcctgtctcagatgcagaaggactggtttgcacaagctggttatgatgtcgtgacagctatgaacgaaccgatagcccgttcactgatacgcaaaatacaatttgatctgattctatcggacgtacgtctacccgaaggggacggaatatctctactggaatggctgcgcaaggaaagaaaggatattcctttcatcatcacgaccgagtatgtgtcggttcccgatgtggtgcgcactattaagttgggagcgatagactaccttcccaagccggtacgcaaggaacatctgctggaactggcagaagatgtgttccgccccatggttacggtacggaaacaggaaaaggtactgtttcaccgtacaagtccgaagatcctacaagtggagaaacttgccagactggtagctccatcggaaatgtcggtgatggtacttggtgccaacggtacagggaaggagtcggtggcacagagcatccatctgggcagcgaacgccgggagatgcctttcgtggcggtgaactgcggggcactgccacgtgaactggccgcctcgttgttcttcggtcacgagaaaggggcatttaccggtgccgacaccgccaagaccggatatttcgacatggcgaaaggcggaactctgtttctggacgagataggtacaatgtcctatgagattcagtccatgttgctgcgcgtgttacaggagaatacctatactccgataggcagtgacaaggaacgggtagcggacgtgcgtatcgttaccgccacaaatgagaatttgcaactggccatcaaggaagggcggttcagggaagacctttaccaccgcctttgcgaattcgagatacgtcagccttcattggcggaatgtccggaagacatcatccctttggctgagtttttccgtgaacgccattcgaaagaactgaaaagggaaacacaaggctttacggaagatgccaagcgcaggatgcttacctattcatggccgggcaatgtccgggacttacagaaccggatcaaacgtgctgtattgattgcggagactccgatgctggatatggaaggattggatattgagatccgccaaagtggagatacgcactccccggtaattcagccgttgaaggatgagtcattggagaaaatgaaaattatcaatgctcttaaagcttgcaacggacaccgggaacaggctgccgcactgctgaacatcaacccagcaacactgtaccggaagatgaagaaatacggggtgaaataaaaatgagcctgccgttagtgcaaatctcactgaatatgtgtacatttgcaaacaaatagagaaaaatcgacatattgtctctaagacaattgctgactgtatatgacataagaccgcaaggtgtttctaatgggaatctggaaaattaacattgaaaggaactattgcgtgattgcttatgctatgcc

SEQ ID NO: 159 - DNA, 14816 bp, unidentified
  source 1..14816: mol_type = unassigned DNA
ttatacaaccgtcacaacacctatttcaacttgattattgattctggggatgaatacggtgttgctcagacctgcgcagacaatcatttttgtgccgtcaaggtcaaattcgcctttgtcatatttcggaaaaagtccctgattcggagcgattactccgccgatgaacggcaattgaatctgtcctccgtgggtgtgaccgcagacgattaagtcaatgtcggttttctttgcgtcctcggcaatgtattcgggctggtggtgcagaagaattgtgaaattgttctttgctttttcggcaaattcttcccacagcgttcttgacggaacatcgtcatcgggagtgtagaactcataataagggtagtcgctcattccgccgataagcacactcttgccgtttttggtgaattttatgtattcattatcgagcaatacagcgcctgttgaatttgtttcgcttttaaaatccgttccgaatttggcggcattgtcacgctcatggttgccgagacagcagtatgtgggtgcaatttttgaaagcttttcaagcacatctttcatcttcgttgtgtcgggatcgccacggttgaccatatctccgcaaactgcaataaaatcgggattttgttcctttacaagctctgcaaggtctgcgttcttttctccgtattccttgttgtgcagatccgtgatgacaacaaatttcagctttgcgtcgttcttagtattgtttacacagtaatttgtgattgcaattgtgttgtcacagtaaacgccccatattacgagagtcacaaacagcacaagtattattgctccgaggattatcgaaaaatttttcattcaatttaccgcccatattaagtatggtattattttaggctcgttttgtgcggttgtcaacaaatgtgtgtcgaacaagtccgattattactgttccttgtgctttgattgtcggattttaagttgatttaggaattgctttgtttgacattccttttgcactgttgtataatgaatcataattgtatttatatgttactcgggaaatttacacaaagttaaacagaagaggtatgggttatgaagaagattaatttgcgtaagatgtttctggctctcgcagatgtgtttattatcgttgtcagcggtattcttgcaaattatattctcttgcttgtcggctacataggtgctgcttcaagcaaaggcttgttgagctatattgttattgatcttgtcatgtgtctgtttacgctttatataagcggaacatattcaaaattgtggcgatactttaacgcaaaggactatatggtgtgcggaactgccgtcttttctgggtttacgctcggctttgtaatctcgttgtttttgcagattccgcagagaaagattttttgtatagtacatttcgcaatagcccttgtcggaattcttgcattccgttttgttttcagaaggacttttcttgaccttaccgaggcaggaagggcagagggcggagagcgcacccttattgtgggcgcaggcaatgccggcagaatgattgttcgtgaaattcacaatgcgaaagagcagggtgatgttaataatccttcaaaaagcatcattccggtatgctttgtcgatgatgatttgaaaaagctgaatcagaaaatcgaaggaatccccgttgtcggaacctgtcccgaaattgttaaaatatgtgatgaataccgtatagacaatattattgttgcagttccgtcatgtgaggaagatgagaagaggaagattcttgactactgttccgcaacagagtgcaaaatcaagattatcccttatctcggtgagcttttgtttgatgacgggcatacacagcttatttcacaggcaaaggaaatcaagattgaggatcttctcggcagaaaacccattgagtttgaccgaaaggagattcatgaccttatcaacggaaaggtttgtcttgttacaggcggcggcggttcaatcggcagtgagcttgtaagacagattgcaaagaatgatccaaaacaaatcatcattgttgatatctacgaaaacaacgcatatgacattcagcaggagcttgtgcttgaatacggcacaaagcttaaccttgtaacgcttatttcatcggttcgtgattacgacaaaatggagcttatcttcaagacatatcgccccgaactcgtattccacgctgccgctcacaagcatgttccgcttatggaaaccgttcccgaggaggctgtaaagaacaacatctttggcacattcaatgttgcaacccttgcagaaaagtacaaggcaaagaagtttgttatgatttcaaccgacaaggctgttaatccgacaaatgttatgggcgcaacaaagcgtgcgtgcgagatgattattcagtacaaggcgcagcacagcaccgataccgaatttgtaacaacaagattcggtaatgttctcggctcaaacggctcggttattccgctgtttcgccgtcagattgaaaacggtgcgcccgttaccgtaacacatcccgatattatcagatatttcatgactattcccgaggctgtttcgcttgttcttgaggcaggtgcaatggcaaagggcggtgagatttttgttcttgatatgggtgctcccgtcaagattacaacccttgccgagaaccttatcagaatgtacggtaaggttccgtacaaagatgttccgattatctttacgggacttcgtccgggtgaaaagctttttgaggagcttcttatggacgaagaaggtcttaagtcaacacagaacaagaaaattttcataggaaatcaaattaaaatagacgaaacagatatgctgtcaaagcttgaggttctcaaaaagaccgcagaaaacaatgacagtgaaaagacagttgaacttttggcagaacttgtacctactttttgccacaaggtcaatgattaaccgaaaaggagaaattttatgtgcggtattgtaggttatgtagggcctaaggattgcagtgaggtgcttgttaatgctctcacaaagcttgaatacagaggctatgactcggcaggtattgcggtttttgataacggagaaatcaagaccgtaaagaccaagggcaagcttcaggacttaaaggataagcttgcagaggtcggcactccgaaaggtcatgtcggcataggtcacacccgttgggcaacccacggcgagccttcggatgtaaactcacatccacacagcggtacaagggttacaatcgttcacaacggtattattgaaaactatatggagcttaaagacttcctcatctcaaagggaagaacttttttaagcgacacagatacagaggttgttgctcagctcctcgactataaatacaacggaaatcctcttgaaacaattgacagtgtaatggctgagcttaagggctcgtttgcactcggaattatgttcaaggatttccccgacagagtttttgcggttcgccgtgaaagtcctcttatcgtaggcgttgcagagggtgagtgctttattgcgtccgatgttcctgcaattcttcagtacacaagggattattatcttcttgaccatgatgaaatcgtaacactttcacctgacggtgtttcgttcgttgacgaacaccttgatccgattgaaaaggaacttcagacagccgactgggatatggaggctgccgaaaagggcggttatccgcactttatgattaaggaaatcaacgaacagcccgaggctatcagaacaacgattatgccgagaatcaaagagggacttccgttccttgaggaatgcggcatcacaacggaaacaatcaagaatttcaaaaatatcacaatcgttgcctgcggtactgccatgcacgcaggtatggtcggcaagtatgttattgaggatatcgcaagagttcccgtaaatgttgacattgcgtccgagttccgttacagaaatccgattgtaggcgagggcgaccttgtaatcatcatttcacagtcgggcgaaacagccgacagccttgccgcaatgcgtcttgcaaagcagaagggtgccaaaacccttgcaatcgtaaacgcaaagggcagttcaattgcccgtgaggcggatatgctcatctacacactcgcaggtcccgaaatttccgttccgtcaacaaaggcatacatcacacagctttccgttatgtatctctttgcctttgagcttgctcttgcaaaggaaacaatcagcacagccgagtgcaagcgacttgtttcggctctcacaaaaatgcctgaggcagttcagtatgtaatcgacaactgcgaggatatctgcaagttcgttgccacaaagcttgttgcaaccgacagcttgctttacataggcagaggtcttgactatgccctttcaatggagggttcactcaagctcaaagaggtttcgtacattcactcagaaagctacgccgcaggcgagttgaagcacggcacaatttcgcttattgacgaggatgttccggttatcgccgttgcaactcagacaggtattatccccaagacaatcagcaatgttgttgaggttaagtcaagaggtgcaaaggttattcttgtttgtacagacgcctgtgtaagagaactcaaggacggtgttgcggattatgttatcgaaattccgcatacagacgagcttcttatgccgattacagcggttgttccactccagattcttgcttattacacatcaatcaacagaggtattgatcccgataagccaaagaaccttgctaagtcggttactgtagaataaacggcggtcttgtttttaattgaaaattgaaaattgaaaattgaaaatttcggttggcggtgtgccaccgcagtcaattcgagaagatagtcagataaagaaattgcattgatgcccgatacggcattgatgcaatttttgttttatatgaaagtgaatgtttatttatataattttaatttgtacaaatctttgcgtggttatctgcaggcggataatatccgtacatacagttttgcaacaacttccgtatataccgaaaatatacaaaaacagtcgggcgagaatgttttgcattcttgcgaattgtcttctcgaccataattttccattttccattttccattttccattttcaattttatgcacgctcaggcgtaatatgttctttaatatcatactgcattcacgaatagggtactcttgttttcaaatttaaacggtaaaaaccttgtatttttttgacagattatgtataattaattagatatacattctaaaaagcagtattgatgaatctaatttagtttcgggggaatatacggacatgatgaaaactgtttttaaaagagctgtaacgcttgcaatttgtgccgtaacggtattttgcggtatttttgcctgttcaggcgcaacaaaagattacgagattccgcagattgacgatatgacgctttcaatgcctgacggtatgagcgctgttacaagggacagtaaaagcacagataaatatttttctgttttcggtcttgactatgacacaacaatgaaaacctttcagaacggaaatatctatcttcagggtatggataatatgtcatcggttattctgaccgtgacaatgacaaaaaatgagagcagcgagaatgttggcaactatgctcagctttcttcaagcgagcttgcaaatatacgcaacaattttcttaattccgacgagtatcggagctgtactcccgaccaaaaagaaaaagttgtgtggcttgtgtttgacgcaactgctcagagcagtaagggcgatgtgaaaacctttgttgccaacacggtttatgacggtatgaacattaatatcacaatgcagagaacagagggtgatgttacaaccgttgactacgatactttttccaaagttgtatcttcggtaaaattcagcgacttgccgttttcaaagggatttattccgtacataatcatcggcggcggtgttgttatccttattttgattgttctcatcataatttttgccgtgagaatcagaaagcataaaaaggctaagaagaataacgctattcttgaggagcttgcagtcaagtataaactcggtgaaaagggtacagactacgacattgacaattttgacgattctcccgaaaagcccgataaacactcaaagaaaaagcagagatatgcggaagaggttgaagaagaaccggcttcgccgggcagaagatatgctcccgagccgataatcgaaaacatggaagaaccggaagaaattacaagtgagtattcaaactttggttatgacacggatgatgccaaggaaaaagaaattgacgagataatcaactccgcgaaggcttacaagagtgagcttgagcgtgaggcatataaaaacaactacggttacgaggaaaacagcacggaggacgaaaaaaaaaaggagcctaccgcagcagatacctcagagactgaacccgaaaaaattgacgaaaacgaaaaagataacgcagaaacacctgaaaaatacgaggacataagctcttcgtcgggtcctacactcgttatccccgaacccgaacacgatctttttgaaacaagcgagcctgacgatatcgaccgtgaggacgatgccgatgttgaagaaaccgaggaggtttccgaacaaaagcatccgcttgaaaaaaaggttgacgagtacgcaaacatcattttcggcagcgacgatcccgaagaggaaaccggggaagaggttgatgacgaggagcttgtaagggcaaaggctaagaaaaacaagtttgacagcggttatgacttttttgacgaagctcccaaaaagtcaatgggggttatcaaaagctcagacctcagagatgccgaggacgttgatgttatcggcgaggttgaaagaaaagcagaaaccgtaaagcagaacgctcttgaaaaagagaataataaagaaaccgagggtgaaccgaatgataaacggtcaacggaagaggttcttgccaatgtaggcaaaaacatcggtaacgctctcaggagctttgcaggcggagttaagaattttggcattcactgcggatatttctgcaagaatgtttcaataatgataaagcataagcgtgcgattgccaaacgcaaaaaggcagaggaagagagaagagagagagaaagacaaaaggcagagcgtgcaagaatgcgtgccgaaagaggcgaaagtgacggacttgttcaggttcacagcagaaccgaccgacgcccccagcagaatcaccgccctgcaaacagaaacaagagaagataatttcttttcttaacggaggaaaaacatggaaatgctaattaaaaacgcagtggttgtttcccctgccgacaagcttaacgaaaaaacagatattctcataaagaacggcgtgattgccgaaatcagcagcggcattacatcagacggggagattattgatgcagacggtctttgtgccgttccggggtttgttgatatgcatgtgcatcttcgtgatcccggtcagactcacaaagaggatattatcacgggatgcaaggcggctgccgcaggcggtgttacaagcctgcttgcaatgcctaacaccaatcccacaaccgacagccccgaaattgtaaagtatattcttgacaaggctaaagacgccgacagccgtgtttatgttgcggcaagcgttaccaaggggcttaaaagcgaagaacccacagacattgacgctgtgaaaagtgcaggtgcaatagcacttaccgatgacggcagacctgttgaaaacacaaagtatttgagtgacgcaatgaaaaaagctccaaagctcggcatgacaattgtcgcacattgcgaggacttgtttcttgccgacggcggtaaaattaatgagggcgaggtttcggaaaagctcggtgtcaagggaatccctgccggtgccgaggactgcggaactgcaagagaaattgcacttgccgccgctcttaatgagcctattcatatctgccatgtcagcaccaaaacaagcgttgcacttatccgtgatgccaaaaggagaggtgttaaggtgaccgccgaaaccgctccgcattatgtttcgctcacggacagggagcttttaagaggtgacgctgattacagaatgaatccgcctctcaggactcaggctgatgttaacgagattatcaacgggctttgtgacggtacgcttgatgccatagcaaccgaccacgcaccgcacacacccgaggaaaaggctgattttataaaagcccccaacggttcaatcggcatggaaacctcgtttgcggtctgcaacacatacctggttaagacaggcagaatgacgctttcacagcttgttgagaagatgagtgttaatcctgcaaggattttgaaaatcaacgcaggcacactttcagtcggtgcaaatgccgatgttgttcttataaatcccgatgaagaatggacagttgatgctggtaaacttcacggcaaaagcaaaaacaccccgttcaagggcagaaccctcactggtaaagtcaaaaagacaatcctcggcggtaaggtagtttttgaagattgagtttgttttaattgtagatgttgatacgattaaaattgtgcaaacggtagctgtactacgctcgggcataaatgttttttatttgtcaaactgtctgcacgaattggggacggcggctcgccgtgttcgctcaccaaataaatttaatttaatataaactttaacataaaggagtaaaattatggcacagaaaggcgacctcctgtcggtaagacaggacatcagagtagtagacgcaacaatccgtgacggcggtctttgtaacgatttcagatttgacgacaaatttatcaaggctctttacaatgcaaatgttaaagccggtgttgattatatggaattcggctacaaggcatcaaaggaaatctttaacgaagaagatttcggtaagtggaaattctgtaacgatgcagatatcagaaaaattgtaggcgacaacaagacttctcttaaaatcgctgttatggctgatgtcggcagaacagattttaagaaggatattatcgcaaagaaggacagcccgattgacctcatcagagttgcaacatacatcaacgcaattcctgcggctgttgaaatgattgaggacgctgcaaagaagggctacgaaacaacaatcaatattatggctgtttcaaaggcaagaaccgaggatattacagcggctcttgaaactctcggcaaaactcccgtaaacgctttctacattgttgacagctacggcgcactctatcccgaggagtcaagacgacttgcagacctttactgctcaattgccgacaagtacggcaagtcagtcggtattcacgctcacaacaaccagcagcttgcttttgccaacacaattgaggctatgactcagggtgtcagctaccttgacgcaaccgttgacggcatgggcagaggcgcaggcaactgtgcgcttgaacttcttctcggtttcctcaagaacccgaagtatcaggttgctcctattctcaaaatcattgaggagtacacccacaagtttaaggctgagggcgttaagtggggttacgatattccgtaccttctcacaggtcagtacaacacacatccccgtcctgcaattcagttcgtaaaagaggacagacaggattattacaagttctcaaatgaactttatgatattatcaacagctaaaaaataataattcgtaggggcgaacaacagcattgtaaaaaagatattgcagtcgggatatgaattgtttgcccgaccatagaaagaataacaaaaaatgaggagaatcactatggcatttgacagacttatcgaaaatattgtaaaaatgcagaatcctacggttgcaggtcttgatcctaagcttgactatgttcccgaatcaatcaaaacaaaatgctttgaaaagtatggcaagacgcttgagggtgcggctgctgcactttttgaattcaacaaggcgcttattgacgcactttatgatattgttcctgccgtaaagccacaggctgcatattatgaaatgtatggctggcagggtgttaaggctctttgcgacacaatcgcttatgcaaagtcaaagggtatgttcgttatcacagacggcaagcgtaacgatatcggcacaactatggaggcatatgctacggcacacctcggtcatacagatgttgcaggcgaaagtattgacgcattcggtgcagacgcactcacggtaaacggctacctcggaacagacggtatcaagccgcttgcaaaaatttgcgattcggacgacaagggcatttttgttcttgtaaaaacttcaaacccaagctcgggcgaacttcaggatatgaagcttgaaacaaatgagagcgtttatgagcatatgggcaagatgtgcgaaggctggggcgaagaccttatgggtaagcatggctattcggcagtaggcgcagttgtgggtgcaacatatcccgaacagctcggtgaaatgagagcaaaacttccgcacacattcttccttgttcccggttacggtgctcagggcggcggtgccgatgatgttaaaaacgcatttgacgaaaacggtcttggtgcaatcatcaactcaagccgcggcattatgtgtgcatggaaaaagcaggggcttacagaagatgactttgccgttgccgctcgtaaagaggctgagcgtatgagagatgaaatcgttggttgtatcggcaaaattaagcttggctgattcatttgcacaacagaatcacgaaatttttcgttttttatgctttagtgctatgaatttattgactttagcgtgctaaaagcgtataattaaaatgtatttatttttacaactatatttttaaattttctttaaaaagggagatatcagaaatggcaagagtatataatttttcggcaggtccttcaatgctgcctgagtctgtgcttaaaaaagctgcggcagaaatgctcgactacgaaggcagtggtcagagcgttatggaaatgtcacaccgctcaaaaatttacggtacaatcatcgagggtgccgaggctcttttgagagaggttatgaacattcctgacaactacaaggttcttttccttcagggcggtgcgtcaacacagtttgcggctatccctatgaaccttatgacaaagagcggtaaggctgattatgttattacaggtcagtgggctaaaaaggctcatgcagaggctgcccgttacggtcaggctaatgttgttgcttcatcggctgacaagaccttcacatacattccaaagcttgatccttcaacattcacaaaggacgctgactatttctacatctgtatgaacaacacaatttacggtactgtttatcacgagcttcccgacacaggtgatgttccgctcgttgcagatatttcttcctgtattctttcaagaccgattgatgtttcaaagttcggcgttctctatgcaggcgcgcagaagaacatggctccggcaggtcttacggttgttatcgttcgtgaggatcttatcggcaacgctatggatatcactcctacaatgcttaactggaaaactcacgctgacaacggttcaatgttcaacacaccgccttgctacacaatctacattgcaaagcttgttcttgagtggattaagaacgaggttggcggtcttgataagatgtatgaaatcaacaaaaagaaggctgaccttctctacggtttcctcgattcttcagagcttttcaagggtactgttgttcccgaggatcgttcgcttatgaatgttccgttcgttacaggtgacgctgaccttgacgctaaattcgttaaagaggctactgaaaacggtcttgttaatatcaagggtcatcgcacagtcggcggtatgagagcttcaatttacaacgctatgccttatgagggcgttgaaaaactcgttgagtttatgaagaagttcgaggctgaaaacaagtaattattgaatattatgatataacgggcgaacgctgttcgcctgttattgtaaattcttaaaataaaaaattaaaaaggattgattttgatgtataacattcttacattaaacaaaatcgccgctatcggcacaagccgtctcggtgataactataaatacggtgacgatgttcagaaccctgacgcagttcttgtaagaagtgccgcaatgcacgatatggaatttgccgacaaccttcttgcaattgcaagagcaggcgcaggcacaaacaacattccgaaggataagtgcagtgagcagggtattgttgttttcaatacaccgggtgctaacgcaaacgctgttaaggagcttgttatcgcaggacttcttatttcaaaccgtaaggttattgagggttatgaatgggcaaagactctcaagggcaacggtgcagctgtcggtaagatggttgaaaagggcaagagtcagttcgtcggtcccgaaatcaagggcaagaccctcggtgttatcggtcttggagcaatcggtattcttgttgcaaatgccgctgttgctctcggtatgaatgtaatcggctttgacccgtttatgtctgtaggcaacgctctcaagcttgctcctacagttaagctcatgaagagcgcagaagatgttatggtaaattgcgactatctcacaatccatgttccgcttactgatgacacaagagatatggttgatgccaatatgattgccaagatgaaagacggtgttcgtattctcaacttcagccgtgacggtcttgttaattcaacagcagttcttgaggctgttaagagcggcaaggttgctaagtatgttacagacttcggaacagacgatatcctcggtgaagagaatattatctgcctcccacacctcggtgcatcaactcccgaaagtgaagaaaattgtgctgttatggcttgtgatcaggttaaggagtatctcgagaacggtaacatcatcaactccgtaaactatcctgcaatttcacttgcaagaacaaatgctgacgatacccgtttctgcgttgctcacaagaatgttcccgagcttctcaagaaggttctcacacagatcagcggcaatgttgaaaatatgctttcaaagagccgtggcgactatgcttacacaattattgatgttgcaggcgccggtgcagatgaccttgcaaaaatcgcagcagttgacggcgtaatcagagttcgtgcaatctgatttcgattttaattgaactttaattgttggttgtaaaaaattatccgagcattgttttgatgctcggattttttgcgtttatttgtacaaatggttacaatgctacactctggcatgatatgctttcaatattataaactgtctgcacgaacggggtgcggtggtacaccgaccagatggtatttttttgcattggcaattataaatgttacggaaattgcaacggcacacaattctgcaacgggcaatgccgaccatacaccgtttatgcctataaacatcggcaaaatcagcattgcggcacactcgaaaacaagcgttcttgcaactgaaattacggctgaaatcttgccgttgttgagtgcggtgaaaagtcccgatgcgaaaatattcattccgcacaacagataatttattgcaaaaattctgaatccgctgagtgcaatctgctgaattttttcgttgcctgccgagaaaattccgacaagcggttctgcaaaaaattcagatgccgtaatcattgcaaccgaaattatcagcgtgatttttatgcataatttgaacagcttttgcagtttttcgtgattttgtgcgccgtagttaaagctgatgacgggtgaaactcccgaagtgaatccaaacgaaaccgcagtgaaaataaagtgaatgtacaaaatagcacttatagccgcaacgccttttgcgcctgcaaagtgcatcatctgaatgttgaacagcgctgttgtcacggctgttgaaagatttgtcacagcctctgacgagccgtttgccatagcaaagaggatttcacttaccttgaattcaggcttgccaaagtgcagagtctgctttttgttgaaaaagagcaaaagcggaattgcacccacagccattccgatgattgtgccgagtcctgcaccgattattccaaaatcccacacagccataaaaagaatgtcaagcacaatgtttgtgcaacccgacagtatcgagaaaacaagcatgatatgtggcttgtctgctgttacaaggtacgattggttgagcatctgccagcacattacaaagccatacggaatcataacgctgccgtagtcaatgcagtaggggagaattttttcgtttgagccgaacatcatgtacataggttcggcaaaaattgtgaacagcacagcaatgataacagaaatgaccgttgccgtgattgcaacaccggacataagtcggtttgcttcctcctgtttgccttctcccattttctttgcgattatagcatttgagcctgttgaaaacattaagcccacagccataaatacgagcgtgaacggatatacaatattgattgcggacaatgcgtcacttccgacacagttcgcaacaacgattccgtcaacaaccgtgtaaagtgacataaaaaccatcataagaacggttggcaaagtgaacttcagaatcgtttttgctttgataggttttgcataaattgatgttgccat

SEQ ID NO: 160 - DNA, 12131 bp, unidentified
  source 1..12131: mol_type = unassigned DNA
tcagccattgtaaacctccaaaattttctgttcaaatttttctctgcctactctgtcgattgtaaacttaaatcgttcgctcggctttgcgttttctgcaaagaagttaagagcggcatcacagatttccataagtttttctttattttcaataaacggaataattgttttacccttgttgattgagttgccgaaaagtccgccgaatgaaacaatgtagccgtgaattgtgtcccacgcatctgtcgggcaagccttgaagcatctgccgcagtagttacactttgaattgtcaacggaaatttttccgtcctcaagagtgattgcaccctgacggcaggcctttacgcagactccgcagccgatacaagcgtcctctttccatgaaaccttgattccgcccttgataccgacatcgttttcctcagctttaaggcagttgttctgacagcctgttatgccgaacttgaacttgtgcggaagttcctttgcaaaatatctgtcgtcaagctcctttgcaagagcgtatgtatcaatacaaccgctgggacagattgcctcaccctgacaggctgtaattgttcttactctcggaccgcaaacgcccggctcaacatcgccctcggcaagtgcgtccttaactgcctcaacatcatcaagctttacaaaaggaatttcaacactttgtcttgatgtgaggtgaacataaccgtcaccgtagttttccgaaacctcggcaattttcgcaagctgtttagctgtgaggttgccgcctacaactctgagcctgagcgaaaaattatttttctgtttttgacgcataaagccgccctttttaagcgtagcataatcaactgccatttctcttactcctccgattcattcacatttatactgtctacagcctgtttgaagtcagactttaaatcctcaatatcttcaatgccgacgctgattcttattgtatcatcaaacacgcctgcgtttcttttttgttcttctgttccgtgagcgtaaattgtgcttgacggatgaattacaagtgttcttgtgtcgcctatatttgttgcatttgttgcatacttcaaattgttgataagcttaaacgctctttctttacttcctgccctgattgtgaggattgcaccgccttttcccttcaacagctttttacaaaggctgtaataaggagaagcttcaagagcgggatagttgacttcgattccgtcctgtgtttcaaagaactttgcaagctccaaagcgttataacaaagacgctccatacgaagtccgagtgtttcaagtccaacagagttcataaaagcattaaacggtgcaaggcaacagcctatgtttcgccagataccgtttctcagctttgcaacatacgcaagccgaccgaattttttgtactctgcaagacctttgtatctttccgtattccattcaaaattgccgctgtcaacgattattccgctgattgaatttccgccgccgttaatgtactttgacgaggaatgaacaacgatgtccgcaccgtgttcaaacggctgaataagatacggagttgccgttgtgctgtcgataatgagcggaacaccgtgtgaatgaacaagctctgatacagcgtcaagatcggcaatttcaagtccgggattgccgataagctcggcaaagactgcttttgttttttcgtttatgagcggttcaatctcctcggctgtcaccttgttgacatatcgtgtaacaattccgaaaggctcaagatctccaaacaaatcaattgttccgccaaaaagacctgcgcttgcgattacttcgtcacctgattcaagaatgttcaggagtgccatcgtaacggctgccatacctgacgaacacgcaaccgcaccgacaccgttttcaatggaagcaattctgttctcaaaagatgttaccgtgggattgcctattcgagagtaggcgtagccgggagctctgttgttgaacaccttttcaagctgttcggcagagctgtgcgaaaatgcactgacctgataaatgggagttaaggttgagccaaaaaccttttcaccgttaaaacccttgtgaagtaatgcggtgttaaactccataatatcaccaaccccttaatttcatacaaccaacccttttgtgtaagaccgtcgtaagaatttgtctgacggcttcgattgatataggtagattatactccattaatcatagtatttcaataggtttaataagattttacctcttgcacaatttttctttaaaatttgccgtaattccattatttcctacaatgcatatttgtttagtaggtattgatttttaaattaaaaactgttaccattattatatactctttcagcaaacaaaacgcacggaaaggagatgccaaaattgaagatttcaacaaaggtggaattcggaatcatcgctgttattgacattgcgtcacactcactaaacggcaatgcggtaacaactcccgaaattgccaaacggcaaaatatatctaaaaagtatcttgaacagattctctcatcactcagctcggcaggacttgtgcgaggtcagaagggttcaaacggcggttatgttattgcaaaaggccttaaagagattacattcaaggatatcataaacgcacttgacgcaaatgttctgagcaatgtttattttaacactcggggcgatgatgatgttatgataagacttatcgacaacagtctttggtcgaagatgtcgtcatatcttcaggaatatgccgaaagcattacacttgcacagctttgcgatgagtatatcaaaaacaatgaaattaaacacaacattccgatgtactacatctgatagattaaaaacaaaaagccaccgatttttatgtcggtggcttttcttgtttttatcggattttatttaaagctttcaataacctgacaggttttttcaatgtcatcttccgtgtgtgcaaatgaaacaaacatcgcctcaaactgtgacggtgcggcatagattccgttttcaagcagatgattgtaatactcggcatatctctttgtgtcggctgtggttgccgtgtcatagtcaacaacctttttgtcggtaaaaaacgccgtcataatcgaacccacacggttcacattaagtcctgcgttcttcattgcattttcaatctttgcagacttgcgttcaagctcgggatatatcgaatctttatttttttcaagaattttaagcgttgcaatgcctgcacttaccgctaccggatttcccgaaagtgtgcctgcctgataaacagaaccgagaggagcaacacactccataatctcttttcgacctccgtaaactgcaagcggcattccgccgccgacaatttttccgagggttgtaaggtcgggttttactccgtaaagcttttgagcaccgccgagtgaaagtctgaagcctgtgattacttcatcaaaaataagaagtgaaccgtgcttttcagtgatttcacgcaagaattttaaaaatccttttttgggcggaacaacacccatatttgcggcacaaggctcaacgattacacaggcaatttcatcaccgcagttatcaaaaagctgttgtacggattcttcatcgttatactttgcaagcagagttgtgtctgtgtagcccttcggcacacctgcgctgttcggaatggaatttgtcagaagtcccgaaccgccctttacaagcaagccgtcggaatggccgtggtaacagccctcgaattttacgattttatccctttttgtaaagcctcttgcggcacggattgcactcataaccgcctctgtgcctgaatttacaagtcggagcatttcaattgacggcatatttttgcggataagctcggcaagttcaatttctccgctgtggcacgcaccgaatgtaagtccgttctgacaggcagaagtcacggccttgataacatcgggctgtttgtgaccgaggatattcggtccccatgagcagatatagtcaatgaactcgtttccgtcaacatcataaatttttgaaccctctgcacggtcgataaaaagcggagttcttccgaccgaacggcacgcacggacaggactgttcacaccgccgggcataaagtcaagcgcctgtgcgtatagcttttcgctttgagttgtattcataaaagcacttccctatttgtaaaattcgtcaatccattttgcaacatcaagtgcgtggtatgtgattatgatatccgcacccgctcttttaattgcaatcatattttcgcacacaattttcttttcgtcaatccagcctttttcggcagccgccttgaccattgcatattcaccgcttacattataggcaacaagcggaaggtcaaagcgttcgcttgcggcttttacaatatcgagatatgcaagtgcaggcttgaccataaccatatccgcaccctcgtcaatatcatctgcaatttcacgcagagcctctttgccgtttgcgtaatccatctgataactttttctgtcgccaaattcgggggcagattctgcggcgtcacggaacggtgaatagtagcctgaggcaaattttgcactgtatgacataatcggagtgttgataagtccgttttcgtcaagtgcgtttctgattgcagacactctgccgtccatcatatccgaaggagcgatgatatccgcacctgcttttgcaaggctgacagccattttagagaggagcggaagtgtttcgtcattgagaatttcgtgaccgcaaacaacaccgcaatgaccgtgactagtgtattcacaaagacagacatcggcaataataaggagtgacggataatttttctttatgtatctgattgcgttctgagttacaccgttatcgtcataggctgatgtcgcaagctcgtctttatgctttggaattccgaaaataagaagtcctgcaataccgctgttttcaatttctttaaggatctcgtctgctctgttaagcgaatattggtagacattcggcattgaatcaacaggctttttaatattttcaccctctgcaatgaaaatcgggtaaatcaaatcgcccttgtcaattcttgtttcacgaacaaggctgcgaatctgctcgcctgctcttaatcttctgaatcttctcatatatttatccttctttcaaagttacttccttgattatagttttcaaaattccgtctgtgtccttcgtttttgcaatcttgaacgaatttacgccgtgactttcaagtgcctcggcggtaatttcacctatgcagacaacggaagttctgtcggaaataattgctccgccgtcaaaaaatgtgttcacacccgacgcactcgcaaaagtaataaaatcggtatcaacaacggaattatcctgttttttctcaagctgaatgtcataggttttgacatcgtcaaaatcaatgttgttatcagccaaaatccgagtgagttcgggcgaaccgttttcggcacgcagaatcaatactttttcgccgcttttcacagtttttgcaagcaaaattccaagttcacgggttgtgtagacattcggaatacagtcggcaaaaattccgtacttttcaagtacagccgctgttcccgaaccgatcaccgcaaacttgacatttgcaaaactgcggatatcctttttcagcttacgcagtcggctcataaaaatttctgcaccgttcatacttgtaagcaccacataatcgtagccgtcaatgccgtttattgcattgtcaaaagcttcgttgtcatgatattcaatcacctttaaaaggtcgtgccttttgacctccgcacccgaaagcgtgagcattttgccgagcttgtcggagagttttctcgtacctgtaacggtaaccgaaacatttttcaaaggtcttgtaattgtgggggcaaagtcaaattttgcggtttcgccaaccactataacagcaggcggtacaacctctgcggatttaacattttcgcagattgtcgagagagttcccctcacggtctgattttttgcacaagcgccgtttgacacaactgcaatgggagtatcctccgatttaccgttctgaataagattttccacaatatcggggaggtttctcaatcccataagaaagacaagcgttccgtcggtttcgacacatttctttatattttcgggcagggtgtcctgtgccgtatgtcccgtgattatatgaacacttcggctcagatttctgtgtgtaacagggattcccgcaagttcgggaacggcaatcgaggaagaaattccgggtacaatatcaaacggaatatcggcacttttgagggtttcaatctcctctccgcctctgccgaacacgaacggatcgccgcctttaagacggacaaccgttttgccctctctcgccttttcaacaaggatttcgttaatattttcctgcttttcgctgtgtctgcccgaacgctttccaacgcagattttttcagccgtttcgggtgcaaaaccaagcaatgacacatctataaggctgtcgtaaacaagcacatcgcagtgtctgatatactccgcaccacgcattgttatcagatcaaaatcgccgcatcccgcaccgacaatatacactcttccgttactcaatttcgctcaccagcctttttgcaagtttgattctgtttgaaatttcatctgttccgctgactgtttttttacagtcggcagacagagaaagcgttatcctgtcgttttcaacctttgaaattgcaccgacaggagttgaacaatcggcatttaggctgtgcaaaacctgtctttcggtttcaaacgaaagcattgtatttttgtcgctgatttcagcgagcattttggaaaccacgctgttttttctgctttcaattgcaactattccctgacacggtgcaggaagaaattcatcggtatcaaacggagttaccgtgtaatcctcaccgttgcaaaggtcaagtctttcaagtcctgcctttgcaagcacaagggcatcgtactcaccgttcaacagctttttaagtcgggtgtcaacattgccccttatatccttgaattttgcattaggatagattttctccgcaaaaagctttcgccttaaactgcctgttccgatgacaaaaccgtccttaatttcaaaatcattgcgtgtaacaaacacatcgccatagctgccccttggcaacacagcggaaatttcaagtccgtctgcaatttttgtcggcaaatcctttgcgctgtgaacggcaacatctgtttctccgctcaaaagcgacatttcaagttccttgatgaacacaccttttccgcccaaagctgcaagcggtttgtcaagggttttgtcgcctgttgtcgagatgtaaaccgtttcaattttaacattcggaaaacggtttttcagcgtttttattaacatttcggtttgtgcaagggcaagcctgctttttcgtgttccgatttttatcgtcattgttcgtattcctcaatcaaattttcaacagttttttcatcgggttcaagtcccgaaaggcaaagcgaaagaagctgttcaaaaatcttccttctgtcatcttccttttcaactctctccttaattatcgggcgatatttccacaaaacctcggttgtgttttcgttcatactttcaaggattcccacaaaaagctctttaagatattttgcgtaaatcggacttttgcccgatgttgtaattcccgccgttatgccgtttttgcttgcaattgcagaaaaaataaatccgcatttttccttatcgtcaactgtgttgacaagaatatttttctcattgcaaagctgaaaaattctgccgttgagcgtttcatcatcggttgcgctgacaacgcaaaacgcaccgtcaaggtcgctgtcacaaaatctgcggtcaatgattttcacattcaaagccttgatttcatcgcaaattttcggagcaacaacggttatgtcgggcgaaaacggcgtcagcttttcaatctttctgagtgcaaccgtaccgccgccgactacgagtatttttttgttttcaatgtcaatataaaacgggaaatatgccattagttattctctccgcactttctgtagatttcaagaattcttgcaaattcttctgccgaaacatcggatttcagcttataaatgaatttttccgaaaaatctgacggcattgcgttttttacggactgcatacacggcaaaaattcgtgaaaggcaaggtcttttttgagaacttcaatttcctcaaaaattatttcttttgcactttcaacactgtcgagtttgagagcattgttctcgtttgcaagctgttttatgcagtcaatgttaatgagccttacaccgcttattttggggatattttcgtcaatgtcgggcggtacggcaaggtcaataaacagccttgatttttcggtttttatattgttttttaaatcataatatgtaaccgtgtaatgcggtccgcttgtggcactgattacgcagtctgcaaagtcaaacgctttgtatctttcgtcataatcaatcacattcgtacccgtattttcaaaaacagtttctgctttgtgctttcgtgaagtcacggtaacgcttatacctttgtgcgacaaaagatttttcacaacggttgagccgaccttgcctgttgcaccgattacaaggacattcagctcaccgtctttgaattttgccgcctcgtttgacgcaagagttgcaactgaaaccgatgtttttgaaatggcggtttcggtcttgattttttttgcacaggaaacagccgcctgaacgcacatattaagctcatatgcaaccgtgccgttgtcctttgcaaaggcgtaggctcgctttagctgaccgagtatttcatcttcaccgataaccattgattcaattccgcctgccaccctgaaaagatggagcaaagccctgtcaccgtagaaaagacagatgtacttttttagttcgtcaaaatcaattcccgaaaaatccgaaagaacggtttcaaccgttttcacagatgattcgtcaccgcaaaaataaacctcggttctgttgcaggtgcagagaatcaaacactcgctgatattttcagaataataaagttcgtcaagaaatgtctttttttgcttatcgggaaaggcaagcttctttctcacaaccacatttgaagttttgtgacttacgctcaggcagtacataaaaatttcgctccgttacaaataaaatccgacagtaaaatacacttttaaagttattttattactgccgacagctattgtcaattaaagttagtcagttattttaccactaaacctatctgtttggtatgttttaattatactacattcaccattccatgtcaataaatttcgggttttgcttgacaaaaacagtgattacaatataaactatacaaagatacctcccgtcagcaaacagcgggagttttattccgatgtaaatacttattgtaccgataggaatactaaatgatttgaatatgtattaaggagcgtttttatgcttaatcagttttcaagaacacagcttttgattggcaaagaagctatggacaggctttcaaaaacaagagttgcaatttttggaatcggcggtgtaggcggatacacggcggaggctcttgcaaggagcggagtcggcgagcttgaccttattgacgatgacaaggtgtgccttacaaacatcaatcgccagatttttgcaacaagaaaaacagtaggcaaatacaaggttgatgttgcagaggaaaggctcaaggacatcaatcccgacataatcatcaacaaacaccggaccttttacactcccgaaacctcggaaaaattcgacttttcaaaatacgactatgtagttgacgcaattgacacggtaacaggcaaaattgagcttgttatgcaagccgacaaagccaagacgcctatcatctgttcaatgggagcaggcaacaagcttgatcctacagcgtttgaggttgccgacatttacaaaacctcggtctgtcctcttgcaagggttatgagacacgaactcaaaaagagaggtatcaaaaagctgaaggttgtttattcaaaagaaaagcctatcacacccgttgacgatatggcaatcagctgtaaaacaaattgcatatgccctcccgggactgaaataaaatgcacccaacgcagacaggttccaggcagtaccgcatttgttccgtcggttgcaggtcttatcatagccggcgaagttatcaaggatttgattaagtaaactaatatagttgtcttttcattttaatttgctattgttaaaaattgcaatttatagtataattatcctaataactatttagaggttgcaaaatgaacagatatataattattgcaggagttaacggaacaggaaaatcaagtttgcgtggtgttcttgaagggcaggaagttttgcttggtcatataattgatgctgatgctattgcaaaaatgaacaattacgataacataaaggcgggtaaaaaagcagttgaagaaataaaatactgccttgataacaatatttctttcacacaggaaaccactctttcaggacacagaaccgagaaaacaattcagcaggcacgaaaacagggctactatgttattatgtactatgtaggtcttaactcaaaagaagaaagtcttgcaagaattgaaaacagggtacggaagggcggtcatgatattccgaaaaatgatgtgtgcagaagatttgataaccgcttcgattctttaaaaagaattgttccgctgtgtgatgaagtaattttttatgataatgaaaacggatttattaaagttgccgaaataagaaacaacaaattcaattattcaaacggttacagacctaaatggattacagaatttgaaaataaactgaaattaggctaaggaaatgcaaagcaccgagagaaattaccctcggtgctttgcttgtttttataggattttttacagttgatatcgtgattaaacagattagatgataaccgattcttcctgaagtgatttgttacggagaatctgaacctcatcgcctttggtaatgaaaagccgataaagaaatacattgaccttttccccgacggtaatcggagtttcgtcaagtcctctgtacgcataaaccgtgcctccgtcacattttacggcaatttcgatattgtcgcctctgaatgaagtctttataacctcaccgacggatacagacgctttttgtgcagttgtttcgctgagctttgtcacctttacaaattcgggacggataactgcacggtcaacattatcgacaacatcaaaggtcttgaactttgtataatcgtcaagcgtagtagtctgaccgaaaaatgatgcggaaaatgcggtttggggatgctgataaatgtcaatcggcgagcctatctgctcaattctgcccttgtttgtaattatgatttcatcggcaacctcaatagcctcgctctgatcgtgggttacaaatatacttgtaacgccgagcctttcaatcatatccttaagccatgagcgaagctcctgcctaacctttgcgtcaattgcggcaaatggttcgtcaagcagaagaagattcgggtttggcgcaagcgctcttgcaaaggcaacacgctgtttttgaccgcccgaaagctggcttggataacgcttttcaagtccttcaagaccgataagctttacaagctcgtttactctttccttgataaatttcttgctctttttctgaattttcagcccgaaagcaatgttatcaaaaactgtcatatatctgaaaagagcgtagttttggaacacaaagcctatgcctcttttgcttgcgggaatatcgttgacaacctttccgtcaattacaatgtcaccgctgtcgggattttcaagtcctgcaatcatacgaagaattgttgttttgccgctgcccgaaggaccgagaagtccgataagcttgcccttttcaataccaaagtttacattgtcggatgccttgtagtcaccgaaagttttatttatatttttaagctcaacatacat

SEQ ID NO: 161 - DNA, 9722 bp, unidentified
  source 1..9722: mol_type = unassigned DNA
atgacaaagaaatgggaagtaacggtaaatggaacaaacaatgtgattgagtacaaggcaggatttggagcaaagattctggtgaatggtcaggcgtacaaggtgaaatcacagaactggtgggtgatgatggtggattatccaattatgatcgatgatacggaaattcgtgttgtggcaatcggaaataaagttgatcttgctgtgaacggagtatatcagggcagcggcgagcagtatcagccattgcataaaacaccgacaatgtgtaatgtgtttatcgggatcagttgtatcgctggatttcttctttgcggatggttgggtttactgatcggagctttatttggaacagtttatgtaaaacagggactggcaggtaaggttggaaatgctgtcggtgcgtttgttggatgtacggtaatacagcttttgatcatggtcattgtagtatttcttcagcttgcatagtaaaggacggtttacatatggaacagggaaactatggagaaaactttgacagaggatatgaggagcaggcgagaccgagacagcaggtgatcgtgatcggggaaccggttccggataagagaacgaccaagaaccttgcaatctgttcgctggtacttggaattcttgcgattgtattcagctttttgccttatattggaattattcttgcactgatcgcattgccacagggaattgtaagtcttgtgcagaagcggccgggcaaaggacttgcgattgcagggattattacaggaatattcggaatattattgtcgatattgtttattttggtgtatgttgttgcggtacttgctttataataccgggataggataaagaggttattacagaaagaatgtcagctttgtgtagtaacctctttttctacctattgacattttttctcttattgttacaatgaagttagttgatactaaccaacaaaatacatacattatgaatagaatacgaaattgtaaaattgattgaggacttaaagaaaataactgaaataaagtttgcaattacttattaataataagagaggaaggtgtcttatgaatttgtcagtattttatggaattttaattccgtttttgggtacgtcgctcggtgcagcgtgcgtattttttatgaaacatgatatgagcgaacggttgtcccggattcttaccgggtttgctgcgggggtgatggtggcggcatccatctggagtttactgattccggcgatggatcagtcggaagagatgggaaagtttgcgtttattccagcagcagctggattttggggtggcattctgtttctgcttctgttagatcacatcatcccgcatttgcacaggtacagtgtcagcacagagggaccaaagagcagattgcagagaactaccatgatggtgctggccgtcacgctgcataatattccggaaggaatggcagtcggggttgtgtatgccggatatctggctggaaatgcaaaaatcacagtggcggcagctatggcattgtcaatagggatcgcaatccagaatttcccggagggggcgattatttccatgccgctaagggcagaagggatgaaagtgtcaaaggcttttgcaggtggtgtgctttcgggaatcgtggagccggtcggtgcaatgctcacaatccttgcagcaggatatattgttccggctctgccttatctgttgagctttgcagccggagcgatgatttatgtggttgtggaggaactgatcccggaaatgtcccagggggaacattccgaccttggaacgattttttttgcagtgggatttacggtgatgatgtcgctggatgttgctcttgggtaaaaataacagaatagagacagtgaaaaagaaattcctttccggatgtgaagggagtttctttttttacacagatgaattgtggacataccagtgacaaaacattgtgtattttttaacaaaatcattgacaataatacttatgcaatgtatgttatagatagaatgttttataaataacaatctggttataccagaggacagaggctggaatctgacatggaaacatggaatagccggaacatagaagaagggaagagggagaacagatgaaagactttaaagtgattgaggtaaaacggagtatttttgaagacaacaatgcggatgctgacaaattacgtgcagaattaaagtcagaggggacatttttgttaaatcttatgtcttctccgggcgcaggaaagacaacgacattaaaacgcacgatctccatgctcaaagacgagatgaagattggtgtcatggaagcagatattgactctgatgtggacgcacaggcgatcagtgagaccggtgtgcgtgccatccagatccatacaggtggaatgtgccatctggatgcggacatgacaagacagggaatccgggagttcggaacaaaagaccttgattttgttgtgcttgagaacgtaggcaatctggtctgtccggcagagtttgataccggaagtacaaagaatgccatgatcctttccgtgccggaaggggatgacaaacctttaaaatatccattaatgttttctatctgtgatgtggttctcattaacaaatgtgatacattaagtgtttttgatgatttcagcaaagaggctgtgaaagaacgcatcttgaaattaaatccagatgcaaagattttctttgtctcagcgaagacaggagaaggttttgatgagtgggcggactggatccgcactgagatttctgaatatcagaaataagtgaaagcagaataaaatatttttttacaggagccggcagagtgacggctttgcatataaggaggaagaaatggcagatccattgggaaattttgtaccggaatttattgaaaacgaagtagagagagaagctattgtaaagcttgctaaaatgatcacagaccgtgttccgcagaaacttggaatgaaaaagatcacaaagtatgatccggagtactggggattatctgcaatgtgtacagatgagatggcagagatcgcactgaaaatgggtgttcgtaagccaaagacattagatcagatggtaaagctgacaggcattgagaaaaagcacttggaagaggttttacagcagatggctgtgaatggtgtgatcgagtataattgggaaaatccacagcatgagaaacagtatgtacttccaatgtttgtaccgggaagtgctgagtttggaaatatgaaccttcagatgttagaggaacatccggaagtaggacgtttcttcgagagaatgagccgtctgccactggaaaaggtaacacctatggtaccggaaggaggagccggcatcggtatgcatgttattccggtcgagaaagcgatctctatggagaaccagtctatttccattgagcatatttcacactggctggataagtatgaaggaaagtatgcagcaagcccatgttcctgccgccgctcccgccagacgtatgaagaaggatgtgcggatgatccggagagctggtgcatcgcagtcggcgacatggctgattatgttgttgagacgaataagggcggacgttacatcacaagagaggaagcattagatatcctaaagaaggcagaggagaatggatttgtccaccagatcaccaatatcgatggtgaggacaagatttttgcgatctgtaactgtaatgtgaatgtctgctatgcactccgtacttcacagttatttaatacaccgaatatgtcccgctctgcctatgttgctaaggttgagacagagaactgcgtagcctgcggacgatgtgtggaatactgtcctgcaggtgcagtaaaacttggacagaaactctgcagaaaagacggttctgatgtggaatatccaaaacatgtccttccatctgagaaaaaatggggaccggagatgtgggatgaaaactaccgtgataacaaccgcatcaactgctatgacacaggtacagctccttgtaagacagcctgtccggcgcacattgcagtccagggttatttaaagatggcagcgcagggaagatatcaggatgcgttggcgctgatcaagaaaaacaatccgctcccggcagtctgtggacatatctgtaaccgccgctgtgaggatgcatgtaccagaggaacgatcgatcaggcaattgcgatcgatgaggtaaagaaatttatcgcagcccaggatctgaaggctgagacacgttacattccagagaaagtcgttccatctgtcagaggatattttgaggagaagatcgcgatcatcggaggtggtcctgccggtttatcctgtgccttctatctggctgaaaaaggttacaaacctactatttttgagaagaatgagcgtgccggcggtatgctggtatacggtatcccatccttcaaattagagaaagacgttgtgcaggcagagatcgatatcatcaaggagatgggcgttgagatcagaaccggagtggaagtcggaaaagatatcacattagatgaactccgtgcgcagggatacaaagcgttctacattgcgatcggatgccagggcggaagacttccgggcattccaaacgatactgtaaaaggatgttcttccgcagttgacctcttaaaagaagtcaatgcaaatgagaaatatgacatcaaaggtgatgtcgttgtgatcggtggcggtaacgttgcaatcgacgttgcaagagattccaagagatgcggcagtgacatggtaaaagtcaacatgttctgtctggaatccagagagacaatgcctgcatctgtagaagaaatcgaagaagcagagtcagagggaatcgttgtaaatccgggatggggaccaaaggaagttcttgtggatgacaacggtgaagtacgtggaatcgttttaaagaaatgtttatctgtaaaagatgcagacggaagattcaatccacagtatgatgagaaccagcttttgacagtagaatgtaagcatgtattcttctccgtaggtcagtcgatcgtatggggcgacttattaaagggaagcaaagtggaatttggacgtggcaacggagcggttgcagatgcgcttacttaccagacagcagaacctgatatcttcgttggaggagatgtttatacaggtcctaaatttgcaattgatgcgattgcagccggaaaacagggtgcaatctccatccatcgttttgtacagccacattccagccttacgatcggacgtaatagaaatgatttcatcgagttaaacaaaaacgatatcaaagtggaaaattatgacaactccagccgtcagattcctggacataatgattccatcgatacaaaacactctttccgtgatgcaaaacttgtatttacagaagagcaggtaaaagcagagacagcacgttgtcttggatgtggagcttctgttgttgaccagaataagtgtatcggttgtggtatctgtacaacgaagtgtgagtttgatgcgatcaagttacatagagaactgcctggatgcagcaagatggttccaagtgaagataagttgaaatatattcttccaaatggagcaaagcaggcgattaagattaaattctccaagaagaagtaatcatttacagagaggaataaaatgcacgaacttggaattattgtacatgttatgcgtaccgtggaggaagttgcagcagagaacaatctcacagagatcagatccgtgacctgtgagattggagaagtcagcggcgttgtcccggaatacatgacagactgctggggctatgcaagaagcagatcagagcttttaaaagactcagaattaaaaatcgagatcatacctggtgttaccatgtgtgaggactgtggaaaaacctattccacagtccagtatgcaaaaatatgtccgcactgtggaagcagtgccacgtatcttctggaaggaaacggattcagtatcaaggagattgaaggggcataacaaaaaaatattgttagtaaaaacctcactggctgagtataatctgctggtgaggtttttctattaaaaagcaaaaatgcacagagaccaaatccgcctctcatgcatctaatctatgtaaataagtgaaaagccggcagaaaggaagctgttccacggacaagtcagtggaaaacagcacaaaatacaatgaaaaaagaaatattaggacaattgatcattgattccgaggaaacaatgtatcatattgcaaagtccctgctttacaatgacgcagactgtgcggatgcgatacaggaagccattgtaaaagcatttgtaaaattacatacattaaaggatgactcgtatgcaaaaacatggctcatccgcattgtgatgaacgagtgttatgcgatcatgcgcaaagagaaaaaaattatttccctgcaggattatcagatgaacgagcaggaaacggaatccaaagactattcagatttatatgaagcgattttccgtttgccagagcagataaaactgtgcgtcacactgtattatatggaagggtacagtgtgaaagaggtcgcagcattgttagatacgacagagagtgcagtaaaaaacaggctggcaaaagcgcggggaaaattaaaagaagcgctggcagattgagacatagtgatgatccattggaacagacatacaaaaacacggatatcgaatgaaaaataataaatttcgtatcgtttggatagcaggaaaggcggtaacagtatgagattagaagatatgagagaacaatttccgaaaatgccggagagcatgaagcggatgattgagcaggaagttgcagtgcagatcgggcaggagaaagaaaatgacaatccaaaagttgtaacttataagaaaagaaagaaaaaaaacatggcacaccgtatgctggtggcatctatggtggctgctctggcacttgcaacaacggtctgtgcaggtgttgcttaccagatgcataatcagaaggttggaaaatatggcttaaaaacacagattgaaggaccacagacagcggcagaaagtacggagaatatggcagatcagacgacagaagagagagcgggtaaagcagccgaatatgtcagactggaaacctcttatctgccgaaaggtatggtgcagtcagaggaaggaaaattcagttttgaagataattatatgcagggtggagtcagcatgatcgtgtaccagctgacaccggaaaaaacaatagcagacattgaaaatacaggcattgctgtgagcgaggaaaccagcatcggtggcagaccggcagtttacatggaaacagctcctgccgagggtgattcagcagaaaattcttctacagaaggaactgcgaatgaaaatacaaccggtgcaaaaaaaatatatatgatttacgcggaacacaactacctccttgagatgttcattttcccggatgtgacaaaagaagaagcattccagatcgcagagggtgtttccattactccgacagaagaaacgagcggagagaatgttatgcaggtgtgcagttggaatgacatggaaaatgaggcaggaaaaggagaaccggaaacggatgaatcggaaacattgatgacatttccaaaagagaaaatgaaaaatatacacctcattggcggtgagatttctctggatcagaacggaattgaagcaacaccgggacttacagcaatcgtttccgatgtaacaatttccgataatatcagcagtttgtcagaaaatatgctggaggatgatacaaaagcagcatttgacacagacggtaatttattgccaatgaaagtggaatatttaaagagcggagacggtatcaacacagttgatgaagttgtggagaccaaagagattccaatgaaaattgtttcagtgacagtggattataaaaataatggaaagacggcactttccaatgtaatgtttaacggcggcattgcacttctggcagaatatggagaaaacatgcagtttgacgcatacatgaatgaaaaaccgggaacaggcgatatatgggattgcgtaaacgaagaatctattggatttagtcaggaagtttatttatcggatgttcatggaggagaacgccacaacaactacattaatacgataaatccaggtgaaaccgtcaccgtgcgtatggcattcaaagtgccggaagaaaaattaaatgagatgtacttcaccttaagcaattatggtggcagccatttctatgatgagacaagcttacagcttggctatgtggatatcagacagtagaaaatttttatgagaaaaccctcgcatccagttttcagaagctgtttgcgagggttctttttaattttgccgtcagctatatacaaatctaatttatagaaaaggaaccatataaactggcagacaaagaatgtcagagtccttagccaaatctttggtatacacaagatacttatcaagtatacgatcagaatattttttgcaaaattcatcaagagatttatgtgttttgtatccgcttgactttacttcaatcggacatattttatttctacttgcaagaagaaaatcaatttcataattatgccgcgaagtttcattgaaaaaggtataataaaataattcattgccattacaagtaaggatttgggcaactatattttcatagagatatccgagatttgtattgagcgtatcatttaatagtttttcgtatattatattttctgtaaagtctttgtccttgaacatcaatgtagtaaaaagtccggtgtcgcagaggaacagtttaaatttacaaaggtctttattagttgacattccagcatttggatcattggcatgatatgaaacaagaacagtttttgaatcttttaattcggcaattaattctaatatactatcggctcggtcatttgccagtacactggaaacttgatatcgtgcagcatttttatttagctgggcaggaattgcatcaaaaagaagtgaaagctttcctgttgagtctattttcttgaaatcatcctcataaagatttaaaatatcacgttttattgtatcgacttttcgaaaattatttgtctggagatattcatttacagcctgtggcattccaccaacaagcatatacagtctgaagtctctcattaatttccgatgtaatttatctccgattggatggcgggagtcaaagagttttcttactaaggcggtggttgtatgatcacctaaagcccataagaattcttcgtaatccatgggatacatagagagttttctttcttcactcggaataaggatgttctgtatgttcttttttatggaaatcagtgaaccggtttctatatagtcatatctgtggtcttttactaatgatttaattgcctgtcttgcaagtggacatagttgaacttcatcaaagataattagagaatttctttcgtgaagatcaaccttgtattgtaactgaagctgtaaaaaaagataatctaaatcggaaatgtcttcaaaaagagctttgatacttttggatacagttgaaaaatcaattaatatatagctttgatattcattcttagcaaaagattccacaaccgtagattttccaattcgccgcgcaccttcgattaacaatgctgtatttccgttggattcttctttccaggatagtagtttactgtatatttttcgcttaaacat

SEQ ID NO: 162 - DNA, 17870 bp, unidentified
  source 1..17870: mol_type = unassigned DNA
atcaacaattttatcatcttgcatccattcagcttttctatcatagagataacgaacaacttttgacacacgttcctttctttgtccattcaattttgcctttgaagagtaaattgcctccaaacataaagatgaggtttcatatggtgtattccatccacccgtatgtgcttcccaatgattgcttgcctttatatattccagtaagaaagatatgccacgactcacattatcattagcaacagtatatcctgcctgcgataacccaattaaaattcgtgcagttatccatgggattcttgtaggataccatccgccctgagaagtttgtcttgaaaaaagttctgagacagctgcattatataagtcttcatgttgatattgatatagctcactcttcaatccaacaatgagtccaagtaaccagtttttatgggcacaattacaatcaaactctgaccctctctcaaataaagaaaatcccatctcatcttcttgaatcattctctttttgatttgattgaagtcatttgttgttgcaatttcacggtagtgtactttgacccgtttttcagaggcttcaaacttttcacaaaatttatccagaacatttttataatcaggcaagactccaagaagtgacgcgaccttcaaaacaaaatacattgatgaaggtgcatttccccatgctggatctactctggtttgattttttatcgctgtttcaaaacagcttaagccactccatatcaggcttatgctttgtagtttttcttctccatgttctccaatcaattgtcttattgctctccactgtttgccaggttcctgttcttgaatatagtcaagaataatcttgtccatggctggaagagaatttatttttagggcattcttgtttttttctatataaaggtataagaaacggcatatttccttgtgacctacgtaatatgttgttccgactgctttaatagttgtcaattctttcgacgatacgcttgcttcaacgaaatctttaggaaccaagtattcaaatgaccctaacacacataatctataaatcagctcaattttctgagcgtcatttgttttcacaaatgtctcaaataattctttttctggctcgcctaagttcttttcacagtattttgccgcactgtttagcagcgcgagattttttccacatatttttctaagttttttatcccctatttctctttgcaattgcgcaatatatctgtccgtattcacttggaatgccttaaacacagattgatagccagcaaatttctcgtttgtcaaaagagaaacccaactcaccataaatatatggatatttctattttttaatgtatttttcttttctgcaataattttaaaaggttcttctgttttttctgtatcgcattgcaaatcatccaataaaattgcaatattccttccacaatatatcaacagcttgataagagcatattcttcatcagaagaaaagcaaggattatacgccacctttataattggatagctatttaattctttaattcccatatatgtttttccagaacaactcattccataataccatacgactccttcttccttcaaagtttctctaatttcctgatccggaatattaattgtgtacttgtcttcaacatatccaatttgattactgtatttgtcccatgtctcaaatacatccataaattgttccgctgttggtattgtatttatatctacggacatattaaaagctgccaagcacaaaaagtccaaaaaacatattttaccaagtaaaaactgttttagttcttctaggtctacatcaataattggaatttccagattccactctttatcatcctttacgagcgaaaaaatcattgcctcattcgacattgtaagtttcgcatgaaaagctttcatgcatacatctactttcgatgtaacttccttaaatatcttgagaacaagagcaatcgttgatgcagcgttcaaacatttcacagcagaaagctcatatatttgtggaatcaaatcaaccgatattgaaacttttcctctattattcgacatagcctattctcctgaaattttcatccatcgttaaaataaaaaactccaccgcatactaaagccaactttcattgaccctagattcggtagagcatttttgcccatcttggaaatgtagtttttctaaatttcagcacacatcattcaccaagatatggataccatttttcttttatgataacactttatcatctatctctctatatcgattttccgacagctttatcgatatttcgtcaatcggttgtttattcttcccttttgtattgtatgagcatttctaaatattcatttaacatttcgtgtttccattcaggaagacatctatacttcgttaagaaatctatttcaatatcgttcacatccactcgcgtatcttcgagaaattcacttattggaatccccattgcattgcatatcttatatagcgtatacagttgcggtgctgttttcccgtgcagcatttcattcaatgtcgatgatgcaattcctgctttttcagctagcctgtgaattgacaaattcttggattttcgagccatgtcaatttttttcaaaacctttttacactctaagtcgggcttatattgcaatgtatctcttggtttaccatccattttttcaagccctctcttccaagtttttacttttcccatagcaatcttttgattttcttgcgttactccacgggcattctgtttcgtatttcataaatcttctgaacttttgctagaactatttttcaagaatagaacgtgctttttcaaagcaccttttctttcccttttcaaaaagaacaccgtcaatagtcgttgcaattattgctcctgctattacataagctgacaacagagaaaccgtagaaaaaaggattttgaccatttctatgccgactgccaaaagaagatatggaacgcccgcaagtgcaagtgtaataatccatcccaatatagaagctctcttttcaaaatcatttttctctttatccctcccagttttcctctccttatatttaccctctattacggaaaatggctctggattcatctccaagagccatcatcgactttatgccttgtagcccttttcgcaaatcacacgaactacttcgtccacatacttctggcaggtatcatggtcaggtgcctccaccatgacacgcaccacaggttccgtaccggactcacgaaccagaatacggccagtatctcccagtgcttcagccacattctttactgctacctgcaccgcctcatcattctgtgccgcctttttatccgttacgcgaacattctccagcacctgcggataaattttcagcggtgctgccagttcactcatcggtttcttcttggccagcatgacctccatcatcttcaggctcgtcaggataccgtcaccagtgctggcgtacttgctgaagatgatatgaccactctgttcaccaccgatacggcagccattctttgccatatactcatagacgtacttatctccaacggcagtcttagcataaccgataccctgctcatcaaatgctttgtacagaccaaagttggacataactgttgtaacaacggtgttggtcagcaatttaccgcgctccttcatatagcatccgtaaatatacaaaatatggtcgcctgtaataacattacccttttcatccacacacaggcagcgatcggcatcaccatcataggcaaaaccaacatccagacctttctccacaacgaacttctgcaagccctcaatatgagtagaaccagcgttgttgttaatgttcagtccattgggctgattgttgattacataggtgtctgcgccaagtgcatcaaaaacagactttgcaatgttccaggaactgccattggcacaatccaggccaaccttgacacccttgaaggagtagatgcccagagagatcaggtagcccatgtagcggttacgacctgccacatagtccacagtgcagccgatatgctcacgatgagcaaagggcagttccggccagtcctggtcgaacacatggagcttgccgtcaatgtagtcctctaccagcagcagagtttcttccggcatcttttctccgtagcagtcaattagtttgataccattatcatagtacggattgtggctggcagagatcataatgccgcagtcaaaatcatccacacgggcgatataggccacagacggagtggtggtgacatgaagcaggtaagcgtctgcgccagaagcagtcagaccagccaccagactgtattcaaacatataggagctgcggcgcgtatccttaccgataacgatacgggcagattcgttatctccgttgcgctcacggagagcattgtaataccagccgaggaaacggcctaccttgtaggcgtggtcggctgttaaagtaattccggcttcaccacggaagccatcggttccaaagtattttgacatttttcagttcatcctttttatctcatatttagatgttttccctaccatccatggtgcgattcttataatcacctcataagatatactgcagatagtcacagcctcggcctatgacttttttcgcttcttcagctgctttctgatttcagacactactctcccctagatactctcttacgcgttttttttttcaaaccgacccagagtctaaagctaataatgcacggctgaaaatcacggaaattttgtcaacgcagaaaccaagtcctctattaaacaacttactatatacccaagacaaacaaggtgtaatcagaacatagcacacaatgttgatgcccactgctgcaagcagcgacaaaccattgttgcacaggaattcgatccaagcatactttccgtacgtaagccaaaagtaattcgcatgaaaaagataaatcagcagcgaaaattttgacaattcattaatccgattattgcttcttggcctactcgtaactgcaagattcagtgttgccattcccataagtattatcaatggattcataaaagtacatccaaacaagttcatccctgagaatttcccagtaactatgcttaaaatatttattccacaaatccaaatgataattccaacaaatgcggctactatgattcttaaatctctgctcctatttgccttgacattcatatatcttttgtaatataaaacaaaataatgaatgcagataaagccaaccagattcgagtagtaataggcttgtcctaaaatccctgcgacggaatacacaacaaataaaatcttgacgagtttctttgtttctttcttattcattccctcaactgctttatttaagagagggtgtataagataatatataatatagcaaccaacaaaccagtttaaattgaatcttaccggaaagaatgcctttactatttctgaaaatagcggcgtcatacagcaaatagccgcaattaacccgataatcgaaagaatccatgaatccaagatcatcctaatcggcttattcgcttttatctgtttgctatcacataagaaccacgccgacactgcaatgaataatgtatctcctatttgaccacaccatctaaatagcgtaaaaataatatggtcaatagaccaccctgtattatttaaattcacatagacagtatcgtgtaccccccccccggtatgtagcaccatagggaagcgcagaagacagtataatcaaaaatactgcaacaagtttaataatctcaatgtttgaatttctttttgcccttgtttccatttaagtatcctttagctttaattatataaccgtatattccgccggcttcctttcagaacgtgttgtctggcactcatccgggtagtttccaataccaataaacatgataagaacttctgccggatcaagttttaagagttttctgacattttcttcctgttccttcgttaaagatgcactcaacgggacgcttgcaattctttcatagtacaaactatccagtacacgcattgcatacataccgccgtcaatataaacttggaatacttccctgtctctattgaagtatctcaaatctccgacaacgacaagaagtttatcaaattcctgaccaaatccgcgatttccattttggttttttagtacttcccttaataccgccttgtcttttacaatatatgttttccacccctgcctattgcaagcagatggagtatactgtgccagcttaactgcatcttcaactctttccagctcaactggtttatcagagaagtgacgaatgctgtgtcgtgtttctacgagctctttgtaattagccttacccaattcttcttctgataaaggaataaatttaatgacaccgccagcatcattcgccacacctggtaatgctgaaatacgtttagacacctccttattctcaaaaccgtatttttcatttttttttgcatattcatttaataccgagagagccgtttggtagaagaacttatccacgccatactgccttgaatattgttccattgactttaccaaagctagtacgttttcttttccaaaaccaggtctataattcaaatacgacaatcccttttctactgtatgatatagacgcgttatactagcttcaaactgtttttcatcggtacatgcaccatccgcaaaagaatagctttgatatttattgtaataatcctcatacacaactttttccggtgttttaccaagtattctatttattttattcattactttttttataatgttcattattctgtcctctttacttttccattttttcccttaaagacaaaaggatgcttttcactatttttctgttaactaccagtgcaactatacatcccataataatatttaccatatttaatgctaacgtattgatccagcaaacagtgcacattatagcaagtagcgcaatcaacaaacaaaatcgtcttatattaaatttaatcgattgaaatttctgtacatcaaccattctataaattgccagaaatgcataactgactaaagttgaaatagatgccgcaaaaactccaattttgtggacaaagactaaatctattataagattgcaggctgccgcaagaatagttgtaataccaacactccgtgtttttttatgtgcaacataaattccacctataaaagaagccatcgacgaaaaaagcattcccatgaacaaaataggcatttgataatatgcttctttataatctcctctaataagaacccaaaacagaatcggtgttgcggcaatgagcaatgccattatcccaacaagaatgccaaaaatactgtcaaacatttccgaatagtaagtatcggcatctgaatccttacatgccaaagacgcattctcttgccaagcaaagacaaatgttccctgcaccgttgtaaaaagtgccggaatcttattggcaacggaatatatcgcattggcttccaatccaataaatgccgttaatactgcccgatccgaaaagctgagaacccaattggataagctattggggatcatcggccacgaataactcaacatttctaacagtgttttcttagaaagcagtgacaaatcaattcttgacaaaatatggccttttactaacaataagattaaaccaatcgttgttgcgatagtaatagaagccaaaacaccaactaacccctgttttccaatagaaatagtcagtacaatcaatagcatattagaaaatgaaatcgtaactgaactcgtcgaatacaatttattattagataacccacggacaatctgctgcattgaaagcattaaaatgtctgaaaagaaatagagacaaattagacaacgtattactgggcttagactttctatgcaaaaatatagaattacaagtgctataaacgatgtcggcaaaataaaacaaataatattcgttataattctcttggtttcttttttttcttttctgacatcaatcaaaaagcgaaatgctgcggattgaatttgcaatgttgctacaggcaggaacaatgaaacaagcgtgctgataaggtcataagtacccatttcagctttcgtaagtccgccggtgataatcggaagagtaataatgcttgagaacttaggcagaaattcaccaattgatagtatcaaagtattttttgctagtgccttttctctattcatttgattatttccttcccaaataaattgtcgaagcaactactatcttgaatgtccttaagccttagtttgataatttccgactcatctccatattcggaaattaatacatttaatgattttacgacctcatcggcattaaatttctcagacgttatatcaaaagcatttttttcctgccccaatttagaagccaattcattatattttattgcccatccaagtaatatacatggaacataatttctataagcatgcacaattgcatgaaatcttgacgcaattataaagtcaaatttttttatccattcatcatattctaaacatgaaaaatcattctttattaagtgcacattcttgttaccttccgcaagttcatataacattttacatgcctgtaaatcttctctcgaatgtctaaatatataaacattcttcccacgtttcaacaattcgttcatgattgttttgtataatgcaattaaatcatctctattcccatgtgcaaaacattgactattcgggatgataccgacattatcatttgcttctatttcgggtatagcattctttaaatcatattttaatacattttctttacatattcccttattttgaagaactaaatccgatgatagttcaatattatctaatcccaatttttttagtaattgatatccctccatttcacgtgcatatatcgcaactggatacttgaatagctcgcgaatttgactcattaagtagtctttatttttcgtataatggaatggtccaaacgattgtggcattaatacaattggaatattaaattttattgccagcctaatattattgaaatatgattcatgtgttgcgagatcccacttatcaccaatgttatagccactaatgtctatcataaaatctgtttctttcagtatctcttccagtctatgatatttaaaaaggttattataccttccaagaattacttttacagtatctttcaaaattgcttcaacataattctttcctttattgattccaagggcaatatttttctctcggtcagaataatatatacaatcaaatttataaatcttgttatctatccattccgtacacgcacaataaattttgcaatctggatatctttttctcaactcatcaaccgttacaaaaagcatcgattgagcgcccttattatcaaattgcgctcctacaataaaaaaagttttcatcgtgttgcccccttcttgccttgcgttttggttttagctgcaaaatgcaaatatgaacgctcaaaatcacattagccctatcgttactgcagaatcaatgctcgtaattctctgcaatgtggtaaaacaagccggatttacatatccaccttcaggagtggcatgccaccaatgttaatgttagcaaattaatctattcatttatgtgctgcgatatctttttatacagactagcttctctatttaccctttgatcccattttttatttcaaatatccaaacactgttagctattctcacggcaaagatcattaaccacttctcagtaatgctataataccccagaaaaatcagcataaaagaacctatcaatcccgcaattcaattatctgccaactagtgagaatatgggtatctgtattagtatatcagatgagcgtcatcttctgcttaacttacgctgatgacactattttcctcaaaacaataacctcttgcctttgcttcgctcctttcaattatatcacagtttttgactagcacctatgttttaatgcaaattcacatgcatcatagtgttccttatttatttttctacttttattcttccatattattgtttgaaataattctacaaactgacttgttagcaatatttctttcaaataatctgaaatgctaaatttatatccacttcccttaagttcagttttctgttcattaatacccccatgatttttttccaactctgccgtgtgcaaaagttctttatgctgagcaattacaatctgaatctgtttttctataggcaatcgctttatttctttgtcgaattctttcagcaatccatatttaatatctttgagaacttcatattttgaactgttattagttccattcattgactttacgaccaggcactcgttcactgccgatacttttgacccaaatgaaaattgtcgaagcaaaaattcataatcttgttgtctcggtaagctttcacaaaatccgccattcttcaaaatagtatctttctttatgaacaaattacttcctgtcccaaataaattctcattaaccattaaatcataaaacaaatttccttctctttcagccctagtgtatccacaaggtatgttttcctttgtaattaatgtatttgtatatacaatatcactgtttgtttcaattatacgttttaaacattttgcaagtctgtccggaaaatagaaatcatcatcgtctaaaaaactaataatttcacctttagcttttgctatccctgtatttcttgccactgaaccattcatattacaaggatgctttaaataaataaccctatcatcatttacataatctttcatcactatctcggttttttttctttcatcagaatccggattgttatcatctacaactaagacttcaaaatcaacgcctacttgattaagtacactattaatggcccttgataaacacttagaacctttataggtcggaattataacgctgactaacataaattactaacctcctatcaccaagattttgctctaaagatcttatccattgtaactccaaaatgtaatataaggaataatcccacttttatcttctacgagatgtaacatacagtaaacccacaaaaccaataaagttccataatacataattttcttattattgccctttaacaccaatttatacatattaggtataaaaggtataaacaaacatataaaataccataataccctgcaaatcagtacattcttggcaaatgcaataccccaaatggtacaaaaatacaacgatggaaaaaatgaataatcaacggtattctttaactgttgttgattctttatacattttgaaataaatattaaaatgaaaagcaaaaccaaataaagaactataactctcccactaccattattgttaaagaattgcgcattatttttgccatctatatattgtgccaattgcggcgcaatacgaacaacaaaattaactataactctcattcccacggctgccccaatgcatatagcaattgtggtagctatgattttatctatatttttcgttttttttacaaacatcattcctgcaatagctactaaaaaagcaattgctgttgtatgaatcaatactgctcctatatatattaaccaccctttaatactcttcatgtcatccttgagaaacaaaaacgcattaagtgctaatgcaatcgcaacaaactgccgcataccgttcatgctttcaaaatataatgtcaacagcataaatagcaagctagaatatatataatttgttgatgttttcttaatgaatctatagaagccaacacagataatcaaagaatttaacatcaatatcatttgattgctgtcaaacatgtgcgataaaacatacgaatatagaacatacaaaggtgccgatgataaagtcgaggatttcaaggcatcctcgaatgaatatgaattacgtattttttgattaataatataatatgtaaacgtatctgttcctacggatttagctctaagcgccattactaggccaagcataaaaaagaccaaaaataagtacacatcatttcctttaaattcttttctgttttttatgacactgattctacatctcgctaacggacttaatgccactatcattactatctctattaaataaactgccattttaattttccacaacctttttcattttatttaataggaacaggccacttgttcctattatcaatgaggccgcagctatgcgatttttgattcttgagcgtttatcaaataaaatataatattttacaccacccaaataatcttctatgcggttatacatttcactatttttcttttttaaatctgtggtgcttagaagaacttggcaataatcactaaattttttggagtttgcagctttaacaagagaaggccaatttcgaacacatacatcaacaagactatctgctgcttctaactcatcaactgttgcctgcccgaaggtatgcattatactatttctacgctgagtgtaaaaatatagcgatttagatgttaccgcaactcgattagccgctgaataatatttatatgttgtaaattcatcttcgtgaaatttaccaacgggaaatgggtatttttgggctaaccaaattggaagcaacattgcacacgcactcgtgtccagtgtatcttggtatagcattttttcaagtgcctctattcctgtatatgaatattctattaattgcctttttggtcttggttcctccccgtcaaaaaaagtacacaaaccaccaacagatatatctgcattatatctaatatgcaaatcatataaaaccgccaaataatcttcactaacaaaatcatcactatcaacgtatgttatatagtttcctttggctatttccgtaccagcattccttgcatcagacaacccaccattttttttatggattactcttactcttctatctatttttgcatattcatcgcacatgaaaggacatttgtcaggcgacccgtcatcaactaaaatcaattcaaaatctctgtatgtctgtgccaacacactttgaacgcatttgtctaaatacttttcaacattatacaccggcacaataacactaatcatttttttccctttcaattgcatcgaaataatactgctgcagtcttaaagcctctgatgcgctgtcaaaacctgcatctgccacttcctttgcataacttcttctaattgccatacgctctttgcaaactttcagtattttctcagcccacacatctgccgattcggaaaggtcaataaagtgacctagttcacaggcatttgcttctgtagttacctctgtagagaaaaacattggcagcccgcagctctccgcctctaagccaacaactggaagtccttcataaagcgaaggaagaataaagcaatccatagcattatagaactgctgaatatcctctcgccttcctaaataagcaacctgttcccttattcctagctcatcgatttttttcatcatgtctactctgagctctccatcaccaattagacacaagaccgctttgggttcttttcttgcaattgctgcgaagatttcaatcatgtgtacagaatttttttgtgcagtaaaacggccgatgtgcccaattacaatcttttcctcccagccgtattgtcttcttgttttcgctcgcacctcaggattgtaagcattaaattcagtattgatgacagttttgaatacatcgacttttccctcgtcaaacagcttgttgccaaactgccagcgcccgcaatcatcgccacaagacatataataatttgcaaaccactttgacatggggcgcaacatcttttttagaactgttttccagtcaccctcatgtgccatagatagactttctgagattctcactggaatcctgcaatattttgcaatcgccatgggaaaaagattcatcgtgctgttataagcatgaacaattgggtaatcattttccttaaacagccgtctcatatctgccatattccttaatatatgctgatatggtgttatttggaaaacacgtcctcctagttcttcaatctcttcaaacggaatcgcttgagaatcagaatcgcatataaaatcaaactgaattttatctctatcaatatgtcgatagtattccatgattaggtttttcttcccacctgaatccatctttcctacgattattgctatttttatggttttcatctaaacacaaatcctttacttgaaaaattccagagttttatcaattactttttgctgatcttctttgttcaaatgatagtacataggaagtcgaaccaatctgtcgctatcagccgttgtatgctcgtctgccccagaaaaacgaccaaatttctgccctgcaggagcactatgcaacgggacatagtgaaacacacacaagatatcattgtccttcatgaattttatgtattcctgtctcgtctttaaatccttacatttcaagtagaacatatgcgcattgtgtgtacaatcttctggtattgtcggaagctcaatgattcctttgtcttccaaaaaactaaacgcttgatagtagttattccatgagaccaaacggtcctcattgatttcatctgcaacttctaactgtgcccaaaggtacgcagcgttcaaatcactttggagataactgtctccaaaatcaacccagttgtattttgcgacctgccccctaaagaactgagaacgattcgttcctttttcacgtaaaatttcagccttttctatatatgtgggattgttaatgacaattgcaccgccctcacccatagaatagttctttgtttcatggaatgagtaacagccaaaatctccaattgttcccaaagcacgacccttataggtactcatgacgccttgtgcagcatcctctacaaccattagattgtgtttcttcgcaatatccattatagtgtccatttcacaggcaacacctgcatagtgtaccggacaaatcactttcgttttttctgtaatcgcagcttcaatttttgtttcgtcaatattcatagtatctggtcgtatatcaacaaagactaatttagctcctgccaagacgaaagaatttgccgtgctagaaaatgtaaagctaggtagaataacttcatctcccggtttaattccacaaagaagagctgccatatccagcgctgtagagccgcttgttgttaacattactcggtttgcattaaattttttttcaagccattcattgcactttttagtaaacggaccatctccgcaaattttctgattttccaccgcttcgtgcatgtacttaaactctgtgccaacaaaaggcggaacattaaagtgaatcataatatcctccatcaattcgtaatttatattccaaacaatttctcttagcgatagcagtcttgcatatttacgatagcattttcttcattttcacccactcgaatagtacccgtattcttcatttcaatccaaatcatatgccttaattcttcattatttttcaaataggtcattatatcgcgcatttcttcttcagcgttgtatttttcgttatccaatttactcacctcctttgtgttgctataacctacatttatcagtcacgttggaaaatatctctggtgtaaactttctccttcacatcatccaggcaattttcatagcggtttgcgatgatggcatggctcatttccttaaactttgccaagtcatttaccaccaccgagccgaagaaagtttctccatccttcaaagtcggctcatagataatgacagttgcaccctttgccttaacacgcttcataacgccctgaatagaactctgccggaagttgtccgaattagatttcatagtcaagcggtaaacgccaatcgtgacggatttctccttgtcctcatcgaactcattctctgcatcatatccatagtagcccgccagcttcagaacgcgatctgcaataaagtccttacgagtacgattagattccacgattgcttcaatcagattctccggcacatcggcatagtttgccagcagctgcttggtgtccttgggcaggcaatacccgccgtagccgaaggaagggttattgtagtggctaccaatacgcggatcaaggcagacaccgtcaatgatctgcttggtgttcagtcccttactttccgcataagtatccagctcattgaaataagcaacgcgcaaagccagataagtatttgcaaacagcttgaccgcctcggcctcagtgaagcccatgaacaaggtgtcgatgttttccttgatggctccctcctggagcagaccagcaaactcatgtgctgcttccaccaggcgttcatcactcaggtcagtaccgacgatgatacgggaaggatacaggttatcgtaaagagccttagattcacgcaggaactccgggctgaaaatgatattttgggtattaaatttcttgcgcacagaagcggtatatccaacaggaatagtagacttgatgaccataatggcatttggattatattccataaccagcttaatcacagcctcaaccgcagacgtatcaaagtgctgggtcttgctgtcatagttagtaggagccgcaatcacaacaaaatccgcatcgctatatgcagcttttgcatccagcgttgcggtcaaattcaattccttttctgccaagtatttttcaatataatcatcttgaattggagatttcttgttgttgatcatatcgaccttagcctgcacaatatcgactgcaactacctgatgatgctggctcagaagcactcccagcgaaagccctacgtatcccgtgccggccacagcgattttataatttttcatagttctattctccctcactattttttgattttataaaaacaaacaagcccacggcggatcgctcaatggcaatccaccgtaggctcgattcgttctccttaattttttacttgctgctcattttgtgggtcaaaacagagctgcaccaaagcctcccacatataacctctggatttcagcttctccgcagcctgtcagcaaataaatacttttgttgaacgagtcgagccgttgaaaccctttatttatcgtggtttttcttggttgaccctattatatctctagacccagttccggccacagcaattttcaaatccttaaaatctttcatgattactttctcctctctctttgcgtttttattttgaaaacacactctttacatactcatagctgttaatatcgccaatgtcatacctcttacccggcatgacgtaagcgtgcatcggtgtctgcttgctcaaccaagccgcaaagctgcccggtgcgtcatagccgcagccgttctccagagcttcctgaatccgctttacatcacaggcacgatagcagtagaacggcggcacagccagatttccttttggttcctttggcttttcctcatagctcgtaatcagatccgagttatcgagcgtgatgattgctgttttctgctgctttttcagttcgttttcctcatggcacatcacacaggaagtattcttttccttggcaaaatcaacgaactttgaaaggctgaaatccagcacattatcgccagccataaccagcaaatcatcagccagattcagcttttctaccgccagttgaatatctttgactgctcccagacgagtttcattggtgcttgtaccatcgtcgatcacagtaatctcataaggccgcgtcttttgcttattacttttccaatcctcaaaatgctgtgcaaacttgtggttggaaatcaccacaaattcgtcaatgtcggtggtgtccaccagat

SEQ ID NO: 163 - DNA, 5614 bp, unidentified
  source 1..5614: mol_type = unassigned DNA
  misc_difference 1132: note = a, c, g, or t
  misc_difference 1133: note = a, c, g, or t
  misc_difference 1134: note = a, c, g, or t
  misc_difference 1135: note = a, c, g, or t
  misc_difference 1136: note = a, c, g, or t
  misc_difference 1137: note = a, c, g, or t
  misc_difference 1138: note = a, c, g, or t
  misc_difference 1139: note = a, c, g, or t
  misc_difference 1140: note = a, c, g, or t
  misc_difference 1141: note = a, c, g, or t
  misc_difference 1142: note = a, c, g, or t
  misc_difference 1143: note = a, c, g, or t
  misc_difference 1144: note = a, c, g, or t
  misc_difference 1145: note = a, c, g, or t
  misc_difference 1146: note = a, c, g, or t
  misc_difference 1147: note = a, c, g, or t
  misc_difference 1148: note = a, c, g, or t
  misc_difference 1149: note = a, c, g, or t
  misc_difference 1150: note = a, c, g, or t
  misc_difference 1151: note = a, c, g, or t
  misc_difference 1152: note = a, c, g, or t
  misc_difference 1153: note = a, c, g, or t
  misc_difference 1154: note = a, c, g, or t
  misc_difference 1155: note = a, c, g, or t
  misc_difference 1156: note = a, c, g, or t
  misc_difference 1157: note = a, c, g, or t
  misc_difference 1158: note = a, c, g, or t
  misc_difference 1159: note = a, c, g, or t
  misc_difference 1160: note = a, c, g, or t
  misc_difference 1161: note = a, c, g, or t
  misc_difference 1162: note = a, c, g, or t
  misc_difference 1163: note = a, c, g, or t
  misc_difference 1164: note = a, c, g, or t
  misc_difference 1165: note = a, c, g, or t
  misc_difference 1166: note = a, c, g, or t
  misc_difference 1167: note = a, c, g, or t
  misc_difference 1168: note = a, c, g, or t
  misc_difference 1169: note = a, c, g, or t
  misc_difference 1170: note = a, c, g, or t
  misc_difference 1171: note = a, c, g, or t
  misc_difference 1172: note = a, c, g, or t
  misc_difference 1173: note = a, c, g, or t
  misc_difference 1174: note = a, c, g, or t
  misc_difference 1175: note = a, c, g, or t
  misc_difference 1176: note = a, c, g, or t
  misc_difference 1177: note = a, c, g, or t
  misc_difference 1178: note = a, c, g, or t
  misc_difference 1179: note = a, c, g, or t
  misc_difference 1180: note = a, c, g, or t
  misc_difference 1181: note = a, c, g, or t
  misc_difference 1182: note = a, c, g, or t
  misc_difference 1183: note = a, c, g, or t
  misc_difference 1184: note = a, c, g, or t
  misc_difference 1185: note = a, c, g, or t
  misc_difference 1186: note = a, c, g, or t
  misc_difference 1187: note = a, c, g, or t
  misc_difference 1188: note = a, c, g, or t
  misc_difference 1189: note = a, c, g, or t
  misc_difference 1190: note = a, c, g, or t
  misc_difference 1191: note = a, c, g, or t
  misc_difference 1192: note = a, c, g, or t
  misc_difference 1193: note = a, c, g, or t
  misc_difference 1194: note = a, c, g, or t
  misc_difference 1195: note = a, c, g, or t
  misc_difference 1196: note = a, c, g, or t
  misc_difference 1197: note = a, c, g, or t
  misc_difference 1198: note = a, c, g, or t
  misc_difference 1199: note = a, c, g, or t
  misc_difference 1200: note = a, c, g, or t
  misc_difference 1201: note = a, c, g, or t
  misc_difference 1202: note = a, c, g, or t
  misc_difference 1203: note = a, c, g, or t
  misc_difference 1204: note = a, c, g, or t
  misc_difference 1205: note = a, c, g, or t
  misc_difference 1206: note = a, c, g, or t
  misc_difference 1207: note = a, c, g, or t
  misc_difference 1208: note = a, c, g, or t
  misc_difference 1209: note = a, c, g, or t
  misc_difference 1210: note = a, c, g, or t
  misc_difference 1211: note = a, c, g, or t
  misc_difference 1212: note = a, c, g, or t
  misc_difference 1213: note = a, c, g, or t
  misc_difference 1214: note = a, c, g, or t
  misc_difference 1215: note = a, c, g, or t
  misc_difference 1216: note = a, c, g, or t
  misc_difference 1217: note = a, c, g, or t
  misc_difference 1218: note = a, c, g, or t
  misc_difference 1219: note = a, c, g, or t
  misc_difference 1220: note = a, c, g, or t
  misc_difference 1221: note = a, c, g, or t
  misc_difference 1222: note = a, c, g, or t
  misc_difference 1223: note = a, c, g, or t
  misc_difference 1224: note = a, c, g, or t
  misc_difference 1225: note = a, c, g, or t
  misc_difference 1226: note = a, c, g, or t
  misc_difference 1227: note = a, c, g, or t
  misc_difference 1228: note = a, c, g, or t
  misc_difference 1229: note = a, c, g, or t
  misc_difference 1230: note = a, c, g, or t
  misc_difference 1231: note = a, c, g, or t
ttaagcccagagattttccgggtaaaggccgtcggccgtctttttggcgatggcttccaccaccacgggtttatcctcgcggtaggtgacgccataccacttatcggtgctgcgcagcaccttgacggcggctttcttttcgccgatgagctcactgaccaccagcggcaggaaatactcgcacttgagcgggttcttttccagattctcgtccagccagcgggcaaagcgccggtcggcttccttcacgaagctctcgccgaagccccagaggttcatgctcacgggcgtctcgccgggcaggtccgtccagctctcgccgccgtcctcggtgtagtggatgccaccctcataggtctcgatgcgggtgcgctcggtgacgctgtggagggtgctgtcctcgttgagggcgcagacgccgcgggcgacgctgccattttcggaaacggtgttcttgagcaggtagctcaccatgcagtagtcgtagacctcgccgtcggtgtgagtggagaggtaatcgtagatgaccttgaatgcctcggggccgtagtagtcgtcggcattgatgacggcgaaggggccgtggatgtagggctttgcggccagcaccgcgtggcaggtaccccagggcttcacgcggccctcggggatggtgtagccctcgggcagctcatccagctgctggaaggcgtacttcacgtccatcaccctggacacgcggtcgccgatggcagctttgaaagcctcctcgatctcgtgcttgatgacgaagatgaccgtctcgaagcctgcgcggcgggcgtcgtacagggaataatccacgatgacctgaccgcagggacccaccgggtcgatctgcttcatgccgccgtagcggctgcccatgccggcagccatgaccaccaggaccggtttgttcatgttttatctcctccttgaaaagggtgtttctcttttacggttttattatactccaaaccacgccgggcaacaagacaaagctgttttttgaagtttggcaagtttttattgcatatatcagcaagtaaatattgccttttgtttccagaccgagtataataacttcatccgacacaaaaacgaccggccagccgcttttgcaggccgaagnnnnnnnnnnnnnnnnnnnnnnnnnnnnnnnnnnnnnnnnnnnnnnnnnnnnnnnnnnnnnnnnnnnnnnnnnnnnnnnnnnnnnnnnnnnnnnnnnnnnataataacttcatccgacacaaaaacgaccggccagccgcttttgcaggccgaagcaagaaagtgagtttttccatgaacgaaactgtgaccaagcgtttcctgctctacttccgcctgatgatggtagcgtggatcctgatcgccaacgcctttttccacgccatcgagtttgaatacagctggctcgtctttttgagcaacatcatgctctttacgatggagggcgacatcaaagaccgctttatcagcgtggagctgggcggcctcgtgggcatggtgctcacggtgctggcgatgctggccatcggtgcgctgacgcctgttctgggcgggatgctgggcctgctgctgccgctgggcgtggtgctcttcatcctcatcatcctgcacccctacgcccccaaggtgctgaacaatgtgggctttgcctacctgaccgtcgcctgcatcgacagcgcagcttttgcagcgaatctgcctctcttcttcggggtgtacatcgtcggctctctggtcttcaacggcggctgcgtgctgctcatgaagccggcccgttatctggccgcccggagcatcaagaacgacgtcaaggctgacgcctgaatctgagcttctcgtcttttcttcttttttctcacagcgccccggcagcaaagatgccggggcgctgcacttttatgtggattctgccgtttttccgtgctacaatggggtaaactgaacgaaaggaagtttcccgccatgtatgctgcatctcctgcacgctactccactctgccctaccaccgctgcggcaaaagcggcctgatgctgcccgccgtctcgctgggcctgtggcacaacttcggcgataccgcgaacttcgagaacatgcgcctgctctgccgcacggcgttcgacaacggcatcacccacttcgacctcgccaacaactacggccccgagccgggcagcgccgagaagaacttcggccgcatcctcaaggaagatcttgccccctaccgcgatgagctcctcatcagcaccaaggcgggctacaccatgtgggaagggccttacggtgactggggaagccggaaatacctgctggccagcctcgaccagagcctgaagcggatgggcctcgagtatgtggacatcttctaccaccaccggatggaccccaacaccccgctggaagagaccatgggcgctctggcgcaggcggtgcgcagcggcaaggcgctttatgccggcctgtccaactacaacggtgagacgctggaaaaagcctgcgccatcctcgacgagttccacgtccccttcgtcatcaaccagaaccgctactccatctttgaccgcaccatcgagcagaacggcctgaaagagactgctgtccggctgaacaagagcattatcgccttcagcccgctggcgcagggtctgctgaccaaccgctacctcaacggcatcccggaggacagccgcatccgcaccgatggccgtttcctgaaagagagcgtcatcaccgaggaaaagctggcacagatacgcgctctgaacgaaatcgccgccgcccgcggccagacgctggccgagatggcgctggcgtggatactgcgggacggcaaggtgacgagcgtcctcatcggcgcgtccaagccccagcagattctcgacaacatcgctgccctgaacaacaccaccttcaccgctgacgagctggaagccatcgataaggcttccggattttacaaggagtaatttatgtccaaaactgtatggataaccggagcttcttccggcattggccgggagtttgcccgccggtatgcccgcctcggcttccggctcatcctcaccgcccgccgcaccgaccgactcgaagctctggccgcagagctcaccgcgaagcacagcaccttctgccgcatcctgcctgctgatttggagcaggagagcgagtgcgcccgtctctgcgaggcgctgactgacgagcgcatcgatattttcatcaacaacgccggcttcggcgtctgcggcagctttcttgagaccagcggcgagaaagagctctccatggcgaaggtcaatgtgctggccatgcaccagctgttcaagttcgccgtgaaaaagatggaggctcagggcttcggcaccgtgctcaacgtggcgtcctccgccgggctgctgccgggcggaccctatatggcgggctactacgccaccaaagcgtatgttgtcagcctgacccggggcgtggccgaagaactgcgggagcagcacagcccggtctacgtctgcgccctctgccccggcccggtggacaccgagttcaacgagcgggccgatgtggtgttcgcactgcggggcatcagcccggaactctgcgtggaggaggccatgcgggggatgctccgccacaagaccatcatcgtcccgtcggccctcatgcgggcggcgacgacggcccagcggttcatgccgatggcgatcttaatgcccatcatggcccaccagcagaagaaaaaactgggctgaagggctattgtgtgcaacaagcagcaatcccggcctttgcagagtccgtttttatgacgatttcacgaaaacgcagcaaaatgagaaaaaatttgcagtaattatgccaagaaaacaccttgacagtcggaataaagaatgctactctagtatacaagagggtgcagggccggacagtccaaatcgttgcttcccgtggcggcagttggactacaggtatcgtccggcagcgcagcgccccgcaaagcaaaattctgattggaggacttaattatggcacagtgtactcccaaatcctttgacctgaccggcaaggtcgcgctcatcaccggcgcatcttacggcatcggcatggctatcgcaaaggcaatggccgcaaacggcgctaccatcgtcttcaacgacatcaagcaggagctggtcgataagggcctcgccgcttatgaagaagctggcatcaaggctcacggctatgtctgcgacgtcaccgatgaggacgccgtgaacgccatggtcgcaaagatcaccgaggaagtcggccatatcaacattctggtcaacaacgccggcatcatcaagcgcatccccatgaccgagatgaccgctgctcagttccgtcaggtcatcgatgttgacctgaacgctccgttcatcgtcgccaaggctgttatccccgacatgatcgctcagggcggcggcaagatcatcaacatctgctccatgatgagcgagctgggccgtgagaccgtctccgcctacgctgcagccaagggcggcctgaagatgctgaccaagaacatcgcctccgagtacggcgagtacaacatccagtgcaacggcatcggacccggctacatcgctaccccgcagaccgcacctctgcgcgagcgtcagcccgacggcagccgtcatcccttcgacagcttcatcgtcgccaagacccccgcaggccgctggggcgaggctgaggatctgggcggacccgctgtcttcctggcttctgccgcttccgacttcgtcaacggcctcatcctgtacgttgacggcggcatcctggcttacatcggcaagcagccgcagtaagtttttccatatccggcatttttgcgccgtgtccgctgccttccgggtgccgggcacggcgctcttttgtttcccatatcgactttttttccggaatctgctacactggtcataataataaaaacaggaggactttcccatgaagatcgcacttatcaacgagaacagtcaggccgcaaagaacggcatcatcgaggccgctctgaagaaggtcgtagagccgatgggccacgaggtggtcaactacggcatgtacgctgccgatgacgccgcacagctgacctatgtgcagtgcggcatcctcgccgccatcctgctcaacagcggcgctgccgactacgtcatcaccggctgcggcaccggcgagggtgccatgctggccctgaacagcttccccggcgtcatctgcggccatgtggaggaccccgtggacgcctacaccttcgcccacgtcaacgacggcaatgccgtcgccatgcctttcgctaagggcttcggctggggcggtgagctgaacctcgagtactgctttgagaagctgttcggcttcggccacggtcagggctatcccaaggagcgcgtcgaacccgagcagcgcaacaagaagatcctcgacggcgtccgcgccgccaccttcaagcccctcatcgagtgcctcaagagcatcgatcaggacctgctgaagggtgccatcgccggtgagaagttcagcgagctgttcttcgcctcctgcaaggacgaggagctggccgcttatatcaagagcctgctggcttga

SEQ ID NO: 164 - DNA, 13686 bp, unidentified
  source 1..13686: mol_type = unassigned DNA
ctattcgtttccacaaacttcattaagataatcattccatttctcttttataaggttaggcttgaatctctttaaaacacctcttgctttatttccaatgctatctgctactagtggattttgaaatagataaatcaatttttccgctaacattgaagcatcacctctattcacgataaacccgtttactccattttctataagaaatcttgcacctccaggactcgtatcagttgttattactggaagacctattgacatagcttctaaaagagcattagaaatgccttcaaaatccgatgacatcacgaaacattttgaagtagctatatattgagccggattattaactttccctttaaactcgaccttatcagaaatgcctaaattcttggtcaaacgcatcatttctgataaatcttcaccatcaccataaaggcataatttaacattatctatagttttgcaaaaaaatgagaatgctatcaacagtacatctattctcttttgttgcacatgtatcctcccaacataagaaatctcatctttcctttgagaaaaaggcaaaatcgtttgaatccccgtaacaaatatcggatttggaatgacagatgttttctttttaatgatattcttaaagaacgattgggcttgaggtagttgaaagacagcaccatcagcccatctataaaaaaattgagctattttagcattcagtggcaacttagcataaggatcactcctttcacaaacaactaccggcacatgagtttggatagcagcaaatatactatacaatcctgcatcatataagaaagcaacaattacatcaggatggatttcttttatcttcttccgtaaatcaaatataattttccatcgttcggctttctcccttattacttcgctccattcaacgttctcagaaaatgtatattctgtatttgaataatagaaagtatgcagaaatatacgattctcgttatattcagataaactatttaccgtccaattaaacatttttgagtacccatcataagtgactctttgcccgacaaacaaaatccttttattcataattatcgcttataaaatctaataatctatgcacatattttacattattaaaatgcttttggaatatggcatgacctttttggcctatttcagtagcatgagatttattttgcataattttatcaaacaaaaaagctaattcatttacatccaattcgtttataataaaagcagagtttgtatcaaaataataaggaacttctccaacacgatttgttattatgggtcttccagttgaggtatattctgctattttctgactaaatcgtgctatgtcttgtagattggaagcatctaaaggaatcaataaagctaatgattcagaatacaacttcaataaatcactataaggcaacccttgtttgatagaaaccttttctcccaatccgtttatttctatctgttcttggattttttgtatatcgttttgatttccagaaagaaccaacaccaaatttgcattcccttttttagaataaatatcatacgcatctagaataaaatcaataatgcgtttatatgcagcacttccgcaatatgtgaactgttcccgaattatgtctactacagaattttcatttgtagcagacaagactggagtcatcaacataggtttcttgtatttttcacatctatttttcaaaaaatgagaaataggcaaaatgaaatcacaaaaatatccgaaataacgatcgaatgcctttgtgctatataaagtatacttagatggattttgtaatgttgtatatcgtaattcatgatacaggactccaattttatatcccaatattttcatccaaatacattctattatgtaaataataaaatgattggaagtcagaatggtatatttatattctttcctaaggcgaaataataatattaaaatctttacaagattgtacagcctacccaaaagacctttttgaggatatatgccatataatatccccgcatttttaccatgaatctctttttcaatcttattatagccccacataggattaatgatatacaccttccgaccaaagtgcagcaaaccttgtgataagatttctactttggtgtttcctgcagaatattcaaatggataatcttgtgtggagtctaggaaaatatagttagctctcactttattttgtcttttaaataataatagatgttgcagataagataatataatcgaatcttagcgtacaaaaaacagtcatatttattaattctcatattaagaccatttattttttccaataatcctaaccgcttaatttcgttatggtaatgtgaaacaactttcaatagaatacggagattaacttccaaatagtctcgcttaaaatctaaattttggcttaagacgtattctaacaatcctatgtaaaatactacatatccatacaaaaaacgagcattagtggagttttttaaattggtaagtcgatcgtcagctttatcatcacaatatatcgtatgaacctctggcaatacagagactattatacttttctgaattaagtatctaaataccaagtcaacatcctcataactccacatggattcattatatccattaacattcaaaagaggttccttggtaaacatccaagcctgtgtacctacaaaagcaccatcttgatgcagcaagaaactatgcaaacaagatttctccaatatcggagaaggcacaacatctatattccttcttttgtaatgaagtcccgcaacacacaaatcactacccttgtctatcattataccaatctgactctcaatcctatgtggaagcatgatatcatccgaatcaaaaaagcaaatatacgaacccttactatgctttaaaccatagtttcttgccgaagaaggccctttattactttggcataagtatacaattctgtcatcgttgtaatcacgaattaaagcttccaatagtgcggaaacatttttagaagaaccatcatttacaatgatgatttctaaatttctataagtttgacctacaatactgtctatagtaggtttaatattagccctgttataaactggaattatcactgatactaatggcactctcatttttcaaatatttaacaccttatacggaacgttgtgtatcaagcttgcgcgttttgcaaatccggaattatacataatgcttgttttgactaaatatattttcttagccttagccagcataaataagtcaagaaaggattttatataaggtaaatcttgtgatactgtatggtagtccatgtgatatacccttccttctatgatagaaacgtaatcaatatcctttacatactccaaaaaggtaatgctatctgatgttatgagaattttttcatcaggattctctttatgcaacatgttgattgcatttttgcactgttccatcaagttttgccgcttctcttgttttaatactgggtaattaccttctttaaaatcccccaataattgttggaatctataaaccattgcaatatactctcctcctattttctcataattttcactcaataaattcgagagtttgtctgttggtttgaaaagttcatgaaacaaccgggaaaagcatttgtctcccaaatctatattggtataaatatggttctgtgcatctcgtacaacacgctttataagatacctttcttgaaaagcatgttcaaatggtaaatctctattatatatatatattacatttgtattctgagaaaagtccattttagaatcatcaatcaaccaatcatatttattgggcatcaggtaatcttctattctaaatggagacacaaaataaatcttaaaagaaactttcattttctttgctatataatacaatgacacacaacctcttaacctgtcagaaagaccaccatgaagcatagagccgtcagctatatacactatgccttggaattgcttagaacaagttggagcttgatatctatgccgaagtacagcctcaacagcagtgttcattattttaccaacgtataaaaaatattttagccctcgcagataatctatcatacttacttactgatttatagtcttataaaaataatttttaatttcttgatcagacattttataaaggtctgtattatatgttaaaccaagaaccatcggaaatacaaaatagcttggtgtgaatgcgaatgaatattctatccataacatcaaccacataaatggtactaccaatcccactatcttacagaatttattattagatacaactatacaatttatactcatcttatacaacattaacatgtaaaagataagcccaaaagttccaaaccaagtaaaaatggactctatatgcacctcgctaattctctccatcgaggttccttttaaaaaaaatccgagtgacgacatgcggtctatttgaaataaagactcatgtccataatagggagtgcgcccccaaataacatatccattattaaaggcagactctatggcctctaaataaataaaagttctactatcctctaaggcatttgctgttctatcattagtttcgtcataatattcaaatccttctcccatataagatttcatatcaaatacgttaaaatcataacgtaaagccaaaattaaagctaacaatggtatacaaaagacaaacgtgtgagttatcgcaaataatctccttgaaagaaacgggacataaaacatcatcaatagcataatacagaagaaatatctcatatagtatatgcgctgttctgttgttaaaatcgataaaataaacactaaaatcactatgaacttacgtttcgtattcaggtagggatataataaaaagaaaaataaattcattcctagtatatctgcataattaagatataatgcaaatggaagtaacaacacaaagaacggtataatatacttaaaatatagacttgaaacccctctcaagaagttttgccttccataaaatattatgcccaataatagagacaaggaaaacagagcatctgcctgatttatcggaaacaaagaagaaggatgaatgcaaagtttggcaaagcctactactaaataggcaatgatataatataaaaagtaattggtaaattggttctgtttaatatgcagattcttttttattaagaaaacaatagacattataattgtcatagtccaagatgcaaagatctgcaatctttgaggatatttgaagctttccacaattcttgtaacatacaataaaaaaaacactgcaacgataaccgtaaaatattttattatataattcgttaccaataatagaaaggtgtttttattaataagtttcataagttatctatttttttaataaatctggcaggtacacctccccaaatctcgtatgggggaatatctttggttacgagagaacctgccccaataatagaattattaaatattcttaccccccccattattatagaattcatgcctatccatacattatcatctattattataggacgcgtaactttagcatatctgtcttcatggtcatttctgtcacctatgataacatttgccccacaaaggacattgttgccgattaacacactcttgtcgcaaacaatactaacagacgagaatccacaatcatttcctatttgtattatagccccagacttccctgtttgaatgatgcaaggattacgcagccctctaaaattgaataaggaggacgaattaaatctacaacgtttaccaattgttatattactattgcgcgttttataaaaaataattcgacctcggaagctacatcctttatcaagatagataccccaaacaaatgcttttacttttgctattacagtataatgtttttttataaatttatttcgataccaatacagtttttcaatgattgagctcataatatattttttttgagattgttttatataaatgattcgtctggttaatcaagtgattgatgaaaatgaatctgagaagcctatcaacacatatcagtccaataaatgctacgaatgaaaaaaagaccatcagtataatgaacatatatcctggataatgagtagcagaaaacaacgcgtaaatttgctcaacaaggtctaccaaagcctttcttgcatatacatcctcatcatgcatgagatatacggcgaatgttgatgccgatatattatttaggaaactgctttttatatttattcctttgaaaaacaggaaaaccaaaaccgattgtaatacgaccaaaggattgatatatcctcgaaagctccccaaataatgtctttctaaaaagattagaatagaaacaatcaagatactgtaaatacactttttcctatttacattaaaatcaaaatatctaatacttccacctatgaaatacatatagacaaagtggttgtaattaaatccattcaaattataatcactatgtaagattcctccacatactatattcaaaaaagttaatagacataaaaatagaatcacattctttctatttgcagagaaagccatgtttaatataggagcggtaacgaacaaatagaaatatatttcaacaaaccaccacggactatttctataaaagaaatggaagcgctttaaaaatgccataaaagacagtgaagtctcagagaataaggaaaaaacaatccatattgcaacagaataaaatgcacaagtaataaaaaatcggaaaaaactgtttgcttttaatttgattccaaaatatccagatatgagaagaaaggcattaacgtgaaatcctaagaaactctgtatacccattgaaaagttattggcacaattatcaagcaaaagtcgatcgcatccgtgatacaaaatgtggctacataggattgaaaatatgcagataatcctcagtaattcaaaatttgaaagccggttatttcccgatatagacatattacttatgtttaattatagatttatatagataatctctttctgatttagttaaccctagaaatagaatgacgtttgttaatattacgaatgaaataaccgcacatacgaaatcataggttattgtttgatttatatgtgttaaactgagatgatacagggttatcataaaaatggaactaaccaaaaccgtagttgaaggtctaattacagtacataaatattcacgaaaaggcattttaatcttaggtaaaatgatgtacagcctgcctatttgagttaaaatggcaaatacaatcattgaaatgtatacggagggcggagacatgccggtagaaagcgatatataggcacttggtaaagtcaacaacatgatcgccccctccactatttgaaatctttttatattaccagttgcgtgaattcctattataataggattagcaaacgagtttacaagtaaataagccattgtaagcttgaaaaagacagatgtatattcaggtacatcaatcagccacattttcaaaatgtaatcaatgacaaaatatagaggaacagctatcaagattaatatataaaagaaacttatcgagcttagggcgattaatttgtgcataaaagcaagattgttctctgcgtatgattttgttatctgaggattgatagccattcttgcattgttggcaaaagcagcaacgtaatttgacagtgaagtagagagccctctagcagcatttatagctggaccgcaaaagatatttaggagaacgctcattccttgttcaatagtcattacagaaagatttcctaataaattccatccagcaaaagagaacatcttacgaaaaacaggtctgtcaaatcttagtttacacttagcctcttcaaaattccgtctgcaatacaccaagtaaaaaatcctatcaaccacctgtatcattgttaccagaatagcgtagaaaatcaatttatctccgctaaagaaaaccagtactatcgtagcgagcaacttcattgttgaatcaaaaattgagatataagcaaatgatttcatcctttcatatgctattataagagccatgtctggtgtagacatgatattcaggatggtgacaacagaaactgaatgaagtactaaaattgaggctgtaactcggtcataaggtaagtttaacttgttgtaaaccatccattgcccaaatgactcaattaaaaccaatactaaaagaccaataccataatgtattattctcgcttgattatatattgtgcaaagcttttttttattattttcacctatcgcaaaggctatgaatcgtgatgttgcaacgctcatggttgtatttaaaaacacaaacatagaagtaaccccgcccacaacattatatattccataatcaataacaccaagtgcgtccaatacaagtctactggttataagccccattaacattgtaatgaacatccttacgtataacaatagactattttgagcaatacgttttttatttgtttctagagttcccattatagatgtagtttctgtctaaacaatctcaagattttattagaaacgtgatgaagacctattaaatatttaccaacttgagggtaggtatagcaaatacaagcttctgcccataattcatgaatatctccccctaatatatacttgaaagttttagccaatgagatcttcacagacagcccagaggttgtaccctcttcctcactaaaatatttcaagaaggatagtgcactgaacttaaaataataaggtttatgaatcaatgcgtataataatgtttcttccatttctgccaaaacatcagaagcctcattcctcagtcctaattcactaaggcacataataattctattggaaacggttttattagtttctgcaatctcttcattgtctattctactatcaacagcaaataaagggactgtttgtccgttatgcgttttatatccaatagttgacaattgtggatttgctgacaaataatcttcaacaaaagaaataaaatatttaggtaattctacattaggattatgagtataaaagtttaccggaaagtaattacgacatcgtttaaatgtgtgccaatagaaacaaggtgcaggacgaataccgaatttctgttgcaataaattcaatgcgttcaatccacttcctttccaaccgacatccacaaaagcatataaaatatcatcaaacaagccctcttgataaaaatagtcctttatgttctgctgctcattttttatgtgttgctccaatttcctatagccatgcttattgttaattaatgcaaacaactcatctagtttggaagatgcgctattccttatttcgctttcgttatacaaagaataatctacgtattcatttagcttgaaatattcaacaaccttgttaatacttaaattcttgctctctaatccaaaacatcgttcaatatttcttctatttattttatctatagttggaagatacaatgatttccgggaaacatataaatatttcaattttacatctgattcctgactatttagcatttgagccatataatacaaaatccaactatctctcgccaagaagtatagtctttttatcccttctctttttgatacacttaagacatcaagtacgaatgcaagacaaataggcacggctacatctgctgaaaattcaatgatgtcaacatttctattacccattaatgaaatcctcgcaaatcttaaaacgccaataaaactgccatataaataggccatccttttcgccttatacttgtttagtatatattgctctattggtgtatatccggtattctcaattaaataagcatcaattcccttcttttttgcatttatatagtcacttcttttattatcaccataatggcaccaataatcaggcatcaaatcttttcgaaccagctcgaataacataccgtccgatttggatacaccatactcagaagatatatagattctatcatagggctctgaaaccccttctttttcgagaacgcctctaataaaataagaatctaaatacatgtcagatataaaagcaatcacaaaacctttagatcgtttttctttaattgtcgatactatgagttcattcctatacagattctgtctttcaatctttaactcgcattttcttacgtattgactgttgtattctgaaaaacgttctgttggataacagcaataaatatcctctatggttggatgtgatttattcatttccaacctcaccatcttttctgcttcaagtctccagtttaaaaaactttcttgcttcaccacagactcgggataaagtctccttgacaacaaaaagaaaatattgtttggatatccacattttcttattaaacaagtatcaaatatatcgaatgacgctaatttcatctttcagcaattgttatatattgcgttaatgcctaaaatctacatttaaccataatcggcttagtgtattttgcaatcttcgagtatatacccattttggcatacttacgaatattttctctttttattttttgcataccactctgcaaacattctcagccctacccttaatggggtagagggcttgaagttgaaatcacgctctaaaggagtgatgtcagcgtatgttacggatacatcaccaggctgcatagatacaagctctttgtgcgcctcgaaatcatagtcggacggaagtactccggcacgtaccagttcttcctgtaatatggtgacaaagtccaatagattttctggacgattgttaccgatattgtacacacaatagggcgggatgggcagaccatcctctccattactgcattcgggagcatgctgcatcacgcgtatcactccctccactatatcatcaatataggtgaaatcacgcttgcagttgccgtaattgaatatctttatgttctctcctttcactagcttgtccgtgaatccgaagtatgccatatctggacgtccagccggaccatatactgtaaagaagcgcaatcctgtagatgggatgttgtatagtttgctgtatgcgtgcgccatcagttcgttgcccttcttggtggcagcatagaggctgactggattgtccactttgtcgtctgtcgaatagggaaccttctcattgcttccgtacacactactggaacttgcatacaccagatgctctacacctttgttcccgtcatcatacgagtgacggcaaacttccaatatgttgtaaaatcctaatatattgctcttgatatacgaatcaggattagttatgctatatctcacacctgcctgagctgcaaggttcaccaccacttccggttgataatcactaaacagagtttcaacttcttccttgtctgctatatcgactctcataaaaatgaagttatcatattcggaaagtgaatgaagccgttcttctttcagcgacacatcataatagtccgtcatcgagtcaatgcctaccacttttacatcttccacatcctgcaaaagtctcttcgcaagatttgcgcctataaatcctgccacaccggttatcagcacggttttgccgtgcaaagatacgtttttattaaatgccatcttatctatggttgtataatccatacagcgtatatactatttatcaagcaattacgccatatttttatttaaaataaaattcagtttatattttgataagcactcaatttagggcatactcctttaataaggcatttttcattgctctaaaccaagttaagtttttaacattggcttgtgaccaaggctatccgctcaggagccatgttcacgttatggtaagttacggacatctgaagctcccacgccactgccaaaatgcagcgagttgtttcgcttcgattatacattacagcttaatcatatccaaacctttggtaaatactcaattaaaaattagcctgcctcatctattttgtctttgacgtactttctcccctattgagaagttcaattcctctgtcaagttcctcctttctataaaaagcacttaaataatatttcttgtcgtcacccttcctgtctgtcaaaaagaactcaaattcacctgtagaaaatttgtttttcggtaagtctgctttgtctatgcctaattccaataagcaatgcttataatcaaaacttatggagagaagattatggtataggttgttcggcatacaataacgctccatcagactcttcattttgggatgatggaatccattgtaatacaaataacaagctcatatcaagactctttaaattttataaatgttaaattttgtattattcttcctcactaagccaatggttatgctcaataaacttcagaatagtataaagatgcctgaaataatgttcgaatgcccctgaagtataataatcatccaacgcatccacgctttttgccccaagaactccggacggtccatttacagattcactatgaccagtgctatcgtgaacaatatgttcgcaaacttggaaaacataataaaacatgttacgcccattatattcaatggagagtactacctctttgttttgcccgtcagggccgttgggattgtcttctttgacacttattttatttgtttcctttgcatacaaatcattaactatgtactgctgcaactacatcatattaaaaaacttattttcaaaatgttacaaccgtaaagtttcgctctgcaaagcccccttcgcgttggacttcctattctttgcgctacatactctcaattcatagcgttgctaatcgaacgtcacaatcatgcaggcaaaagcaagggcagaaacaagggtattgacagtgccaaaactgtctccgaacaagtccggagcacagttgcaaccatccacggagaacagacatagctgacttaacatccatttggtcagaaagaagccgtttatgcaaatgaaaagacatgctaatattgccatgttgccatggatcaccatttcgttgcattgggttctttctcatctgcgcgtattttttatatcaaaatattatcttaacaatgaacatgcgtttattatctagttttgccaatatttcgccaccaataatgccacgtttacatgttggctaaatggaaagtaaggctgtaaccctcagtccctcctaaaaatatccctcgtataaaccttttcctccacatcatccagacaagcgtcataacggttggcaatgatggcatggctctggcctttgaaggcatccaaatcattcaccactttactaccgaagaacgtgctaccatcttcgagtgtcggttcatagatgacgatctccgcacccttggctttgatgcgcttcattacgccttggatgctcgactggcggaagttgtccgagtttgatttcatcgtcaggcggtacacgccgatgacacacttccgctcctcggaaggattgaagtctccacggttgtagtagtcgtagtaaccggccgtgtgcagtacgcggtcggcaatgaaatccttgcgcgtgcggttgctttccacgatggcctcgataaggttttcaggaacgtcttgatagttggccaacagttgcttggtgtctttgggcaggcaatagccgccgtaaccgaacgaagggttgttgtaatggcttcc

SEQ ID NO: 165 - DNA, 12356 bp, unidentified
  source 1..12356: mol_type = unassigned DNA
gtgcctgcccacacccagctgtcctgggtgctggcctgcaacacccagttcggtgagctgtcccgcatgacccagttcaaggataagagcgccaaacaccccgataacgtcaacggcggcctgttcacctaccccgtcctgatggcagccgacattctgatctataacgccgacctcgtccccgtgggccaggaccagacccagcatctggagatcgcccgcgacatcgccggccgcttcaacggcatctacggcgataccttcatcctgcccgagggctacgtcccggcctccggcgccaagatcatgtccctggccgagccggccaagaagatgagcaagtccgacaccaacgtcaacgccttcatcctgatgactgatgacaaggacgccatcgtgcgcaaatgcaagcgcgccgtcaccgattccgacggctgcgtccgcttcgaccgcgaaaataagcccggtgtttccaacctcatgaccatctacggcaccttcaccggcaagagcatggacgagatcgccgccgagtttgagggcaagggttacggcgacttcaagatggctgtcgccgaggttaccgccgacgcgctggcccccgtccaggccgagtacggcaagattcttgccgataaagcgtatgttgatgaggtgctcaagtccggtgccgagcgtgcctcccgcctggcaaaccgcaccgtcaacaaagtctaccgcaaggtgggcctgctgcagctggataaataagctaaaactgcctcgtatccggcaaaatgcacttgacaaaacggcgctgaaccgtttataatattacagttagtgcggctcgtattgggccgcacaacttttactatttacacgttaggagaaactaccatggcgaaagaagtcgttgttacccgtgagggctatgataaactggtccatgacctggacgaactgcgcaccgttaaacgtaaagaggttgctgataagatcaaggttgcacgtggctacggcgacttgagcgagaacgccgagtacgacgccgctaaggaagagcaggccgttgtcgaggcccgcatcgctgacctggaggctaccttgaaagttgcccgcgtcatcgacgacagcgagctgtccggcgataccgtttccatcggtatgaacgtcaccatccaggaggagggcgaggagccggaatcctacgacatcaccggttccaccgaggctgacatgaacctgaaccgcatcagcgacgaaagccccgtcggcgccgctctgatcggccataagcccggcgacgcagtcgacgtcaccctgcccaacggcagcatcgtcacctacaagctgctgaccgtcacccgctccaagtaagcggaaaccgccgcatattcatgatttaaaaacacgaaaggacgatctcacatggagcagaataagccccagaccgaacaggacatcagccagcaggcagccgttcgccgccagaagctggccgacctgcgcgccgccggcagcgacccctttgtcatcaccaaatatccgcaggattcttactccgctgatttgaaagccgagtttgccgacctgcccgccgaagccgagaccggcaagatcgtctcgctggctggccgtatgatgtccaagcgcgtcatgggcaaggccagctttgcccacctgcgcgaccagaagggcgatatccagatcttcgtcaagcgtgacctgctgggcgatgagccttacgccgccttcaaaaagctggacatcggagacatcatcggtgtcaagggcgaagtgttccgcaccaaaatgggcgagatctccgtccgcgtctccgagctgacgctgctctccaagagcctgctgcccctgcccgagaagttccacggcctgaccgaccgcgaggcccgctatcgtcagcgctatgttgacctcatcgtcaaccccgaggtcaaagacaccttcgtcaagcgcagccagatcttgaaggagatccgcgcttacctggacgagaagggcttcctggaggtcgacacccccatcctgaccccctttgagatcggcgcctccgcccgcccgttctatacccaccacaacacgctggatatggacatggtgctgcgcatcgagaccgagctgtatctgaagcgcctgatcgtcggcggtatggaccgcgtgtacgaggtcggccgtatcttccgcaacgagggcatggaccccaagcataaccctgagttcaccaccatcgagctgtaccaggctttcaccgatttccacggcatgatggacctggtcgaggagatgtacaagcgcctggccctcaaggtctgtggcagcctggaaatcacctaccagggcaagcaaatcgacatgggccactgggagcgtctgaccatgatcgaggccgtcaaaaagtattccggcgttgacttcaacgattggaagaccgacgaggatgccatcgctgctgccaaggagcaccacgtcgagctgcccgaggtccccaccaagggtgccatcctggccgagttcttcgacgcttttgtcgaggataagctcatccagcccaccttcatctatgattaccccgtcgagatcagcccgctggccaagcgcaagcccaatgatccggctttcaccgagcgcttcgagtatttcatcgactgcaccgagtacggcaatgccttcagcgagctgaacgaccccatcgatcagaaggcccgcttcgagcgccaggtcgccgagcgcaaggccatcgagcccaactgcaaggcccaggtcgactacgactacgtcactgccctggagtacggcctgccccccacgggtggcctcggcttcggtgtcgaccgcctggtcatgctcctcaccgacagcgcctccatccgcgacgtcctcctcttccccacgatgaaacccatcgactaaaaagcattgattctacgccttttatcaaccgcgtttggatgatttgacaccacattgacaccaaacttgtgcagaaaaggctttacaagaaagcagagagttatcctcttacggatgactctctgctttttttgtttatgcagttgtgcatttctgcgcggaagtaatgaggtgatagccgatgcgaaggagcagggccgcaaaggtcttgtcctgacctgcaaggaccgacctgtccactactacgccaagttcggattcgtggacgagggtgtgaccgacaagtccgcgcacggcaatgtttcatggcatcagatgcgattggcattctaatactgtacaaagaaaaaatcccccagacttgctctgagggatttgctaatatatgatggcactcgccatatcactacagactattttttgaagtgctttgccttaagggttttcaattcctaatgtagcgtaaaagacatcttttgtaaacacatcaataccgcctatatctcttttgttgtaatagataacatatcccgcataaaggtctttgtaggcctctgcgttcttaacttcgccacttttaaatgaatcaatctttccgtcatcgccacaatatatcccggtatacccattgccgttatcgtataccgtccacatcactgcgccgttttcgtcgatgaacgagtaaaaataggcatcatttaatgccgtgagccccttctctaacgcaggaacttccgaaagatgaattatctcttcgtagtgctcttttaaatcgcccaagtctccggtagatgtgttaccaccattgtctgaatattttcctgttttagaagcaatcgtcagcggcttaccaatacttttttgccgttgaaacgaattattgagaccgtatatcgtagacatctcagtctgcacagcctgcgtcaacgctcgcgtttctgccacgacctgactctttctggccttgttaatgtacccggtaagagccggaatcagcagtgctgcaagaatagccagaattaccaatacaacaatgagttcgaccagcgtaaacccgcgtttcgattttttcttcgccatagaatcgacatcctttcggtgcatttgatgtattataacatatctttgcaaaaaagtctatttttctttttgaggttgtaaatacaaaacagcctctacgggagtagccgacattagtaaacatcatactcctatatgaatgacaacacatggcactatgcggtctcggacacagaggtcctgcagccgacccaaatcgaggagatggcggtcaaaacgcccgaaaacaactgggacctgacattgtttacctgtaccacgaccggccaggcacggtatgcgctgcgctgtgtccgcacagacgagtgagcattattcatagtcatcgcttccaaaacgaaaaagtatttccgctacaccaaccttgcagagaaagctttacaaaacaaagcagagagctatccttttgcggatggctctctgtttttgtttgtaaaattattttccgtaggtcttattctccggcgggcggcccagcagggcgcgcaggaggtaccaggcaatgcacaggcaggtgtaatacacgtacacaaaatgcagcagcatggtggcgtctttatggtgcagtgccaggcggatgctgtctaccagagggccgaccagcgtggcggcgtacagtacaaacaggtatttgcgggaggtgtagcgggagcgcggctgctgggatgcccgcgcactgaagccgctttcctccttgtgaaacaggttgttgatgacccggaaccgcaatttggccaaatatccactgaatgtggcgcgggcgtggtggtgaatgttatcaccacggatacagccgcagcagccggatttggtctgaacctgctgtgccatggaacacacaaaagaaatggaattccaatcctgtgggaactgctgctttatccattccaggtcaaacaacgaggcgccgccgtctccaatgggggtcaggtcgccaggtgcgaatttgagcagacagaaatcgccttgttgttccgcaatattgcggcggaaagtgtccagtacgccattcttgcgggtgtagataaactgggtaaaggggtcgccgcagacgcagacatatcgcgtggcaactccgcccagcctgcctggggcctgctcgtccactactaccagatgtacttccgggtatgcccgcagcagtgacagtcttttttccaactgatcaggaaatagcaattcctcatccgtatcctgttcgataatataccgccccttagcccgttggatgccaatcagctttgctggttccggcaaacgatgaggattttccaaaatcacagcaccatactgcctggcaatctcacgggtagcatcggtgctgccgccgtcaatgaccaaaatttcgatttggtcagcaatcgtctgcatacggatgctgcgcagcgccagttcaatcgtgcgctcggcattgtatgcgggcataataacactgattgagggagacataaccttactcctttgtaagtgcagtggcaatcatccgggcaggggactgcgcgggtacgatgggcgggcgctggtagtcgggatagtggacaataaaatcatccacgacctgcatgctctcctggtacatgaccacattctggccaaggccgtcgctgcgctcggtatgagtgcgcagaattaagcagggtttgcccatgtaactcaactcttcctggttactgccaccatccgtaatgacaaacgccgcgccctccagcagtttcatgaaatcaaaatactccacacggggcaaggcggtcacgtgtgcattttgctttacagtgtccagtagccccatctcctgcagcgttacttcagtaggcttatgcaggatcatcacacagtgcatgctttcagcctgttgcagcgcgcgggacagcatgtcgcgcaccaacgttttgttggcaagattctcctgccggtgcatgacaaacacaaagtaaggaacgctctgcaattctgcgataactgggtccttacagggaatcgtgcgggagtaggcaaggctgtcggcaatcgtattataagtggtgtttaccacaagccccttggccttgctcaggttagcagcagcctcctggccgggggcaaagtgcatccgtacacagcggctggtcagtacacggtcaatttcttcgggaaagggattcagccagttgtggctgcgcaggccggcctctacatgggccacacgcatgccgaagtgctttgccaggtacgcacccataacggtggaaacggtatcaccgtgtacgaccatcgtagcgccgcgcagggtatctctgccgaaatgcgcgggaatggcctttttccctttgtgccaggtggcagcaaaccactgcatcaacccggcagctgactttttaatgtcgctttccttgctcagctccaaatccacatggccgccgttgagggcgcgcagaatggtgctttttacaatatcgttctgccccgatgcgatgatatgatagggaacctgctgcgcctgcaattgcagcattacaggaaaaagcttgatcagttcggcctccgtgccgatgaaaaaataaatacctgactgtgccatagattaagacctttccagcgtatctgctttatcatagtaatgcagaatgtgcaaacgataaaaaattgccagcgtatcgacaaacatattgcgaatgtcctgatatccgatccgcccgaaagaagcccggtgaaacactacctcaatcggtgcggaagtgattctatatccgcgcgcattgatgatagccaaaacctcaatatcaaacgcaaaacgcttgaccaggatctgccgcatgaccggcttgatgacctcggccttaaacagcttcaggccggtctgggtgtcccgcacgttcaagcggaaaagaattaacagcagaatataataaccccagctgtacacgcgccggatggccgggtaatcgaccttggattccgggtgcatcttgctgccaatgacaacatcagcattttcccgctgcatgcggtcgataaaatctgccagctgttcgggcgctaaatccaaatcggcatcacagaaagcaatatagtcacccgtggcgtgggctgtgccttcccgcagcgcaccgcctttgccctggttgggctggtagctgatgcagcgaatcttcggattctcggctgcggcgcgctcgatctccgctttggtgcggtcgctgctgccgtcgtcgatgaccaacaattcatagtcgtccgccagcgggctgatctgccgtgcggcttccagcgcattggcatagatgatggtttcctcattataagcaggcatcagtacggaaagcttgcctgacagttttgccatggggtacctcctggcatacagcgacgttttacttcttctggctgtgatggtacagccagttctggatcttgacgatcaaagcgggattgaggttgtagacaaacgatttgcaatcttttaaaaataggtctttgctgctcaatgtttcgcgcttggaaaagtcgatttttaaattattctctttagcaaaggctgcaactccgcgcagccatttgccctgcatgacggcaccggtttcacatacacgggcaaaaacccggtcaacagtgacaagaaccgttttggaataggtgcttttttcaaaggaaccgacccgttcaaaatcccaggcacttaaatcttcatgaaatgctgtcaacagaaaatctcggtcccaaatggcagggacgaccgacatgcgatagggagtttcgggagggagcagataaaagtggctgttctgctgccataacggcatgccgtgaacttctttatcgaggtaaacgatgccgatgttttcctgcgattgcataagaccaaggatgttttgcacggtagcagtagaaaccggaagagaaggccactggtcttcgaggacgacgaggatgtgtgactccttgattttctcgcaggctttgcgcacacgggcggtccaaatctgggtcggctcgtggaataccttactgtacactgccccattttccggctcgccgctctcggtacacaggtataccgggtaggggcagtccggccagaacttgcgcatacagtccgaaaacggcgtccagcaatcggcatatttatcacaggagacaacaaggatacacatatcctgcatcatagaacatcctcaattcactttaatttgcaaataatttaataagaagtacgtcgttataccaggtccagcagtcctctttcggaaatgcgtgcagatcctgcagaagttctttgatttcatcagcagaagcattgatgcctgcatcatttaactgatctgctatagtatctgcggtaaaaatagcggcatcttgagggaagataagcatgttggcacgcaaatgctgatttacataactgtccaagacaaaaggcgctgtgtacatgccttgccaataatacaaatcgccaatgccagcaatgtcgctggtaagttcataagcatcctgccacgggaaatcattgtcgctgacaccaacaaatgcaacgggcgtttcacccttcacataattcggaatggcttcaatcaagtttgtcaagcggatggaatcggcaaggccttcggtgtaccgtgcatacgccttggtgtaacatatgtttgccaatcggatgccgcacaaaacagtcagcccggctaccacgcaggacagcagggaatacccccaccgcagcagcctttcccaatctttgcgcaggtcgtcccggcggtaaagctgctcaacggccatcacaaaaaacagccacggcgtcaggtaggcaaaagtcatcaaggtgtgtacccacttggatacgatgccgatgacgttcatggccagaggcaggcagacaatgtctgccaccagcaaaaacaaccctagcgggcgcttccacagctgctgttttaccagcagccagatgaccagcacggcagataacgctgcgcagagcaagaacagcgagtacatgactcgttcgccatggaaataggagttggaggtgccggggagaaagaaggcaaatacctgctgtactgaagtgatgatgttatcaatgtaatcggtggcagcctgtgcttgggcatcctgcacacggccggccgtgttgttagcggtgatcaggttgcagatcacggtagtagcaaccatcgagccgccgaacaggaacagcatgccgaaatggcggacaagattgtgtttgtcattggcctcctggtcaaacagcaattctttcaagctgcacaggaaaaacaggcacagcgtcatgctgatgtaagcagcgtaactaccttcggatagcagcataaatacaaacgcggcaatccagctgtgccgccactttttgtaggcatacgcggccagacaggcaaacagcagggcaccggcatacatgtgggcgctggtcaggtaaaagttggaggaaatcatcgtgggggaggtgaccatcagcccggaaacaaggataatacctactgaagaggtgatggacaaagtctcgcacacaagccatgccgcaacgccgtatagcagcagggtcatgacgcccagcagccagggcatgcggatcgttttaattaaggcaaagtatatcgcaaggagccaacgtgtaccagaagcaccgtcggcaaaggtgcgcgtgtcggaaaacaggaacgcatcatccgccccggtcagcatattggtgtagcagtacatgtgcgcggccaggccgatgataaaggtcgccagcatgcacagcttgaagttccgcggaagctttttatagccgtccgccaggctttccagcggcgagcggtcccagaacggtttggatcggaggttctccatcacacaatctccctattataaataagtatacgatgaaagtataacacaccacagggtcaagttcaatactcaaggcccgcagggcgaataaaagaaacattaaagaaaattttgcattaaaaatggcaggcacctgtaataggtgtctgccgtttttgcctggagcctccctctgggagggaggtgccccgcaggggcggagggagagacaaaaattttagctgctgcggatacgaagatttttccctcacccgcttcgcgggaccgcttacgcagccgggcccctctgtcgcgcagagggaaccaaagagcgattacaacttcatctcctgttgagccgttgcaaagtaatcaggatacaattgaagcaaaacgttcttctccgcgataattttccttacatggtcggtcagttcccggcgcagggcgtcgatgtcccggtggcggatctggtccatcatcacctcatgctggcgcaccgcgccgtcaaaggtggcggcgttctgcaccgtcagcacgcgcaggcggttgtagtgcgggtttgtggatgccactacgtcccagcttaaatcctgccccgcaagctcaaagaaccgctgatgaaactggttgtccagcgcgatgaactccagcggcttcagcccggtaaaacaggctttctgcttctcgatcaaaagctccagctctttcaggtccggctcagtgcagttctgcaaaaacaacggcagaatggcagtctccaggctctcccggatgaaccgctccttctcggcacgggtcagatcgatgcgggagaccatcgtgcctttctgcggcgtgatctccaccagatcctctttctgcaggcggatgaacgcctcccgcaccggtgtgcggctgacctgtagcttcgcggccagctcctgtgtgcttaccgtggtgccgggcgccagctgcagcgaggtgatattttctcggataacgcggtagacattctcccggatggaattgtcctgcgctttgttggtcgggctgggcatgatgtgctccttactctgtaactgacatgtcagcatgccagatggcttaatgctattgtaacacatccggcaggggactgcaagcggtaaatggaaaaaccacggaaccagaaagcccaactgcccaaatacacaaaaataggcgcatgctcgctaaatacttaacgatacacttatgcaaaatgtgcaaaaaaccaccgccgcttttgttattttgatgaattacaaaacaggtgttgacattcctgacccgccatgctacaatgacgatgtcggtactgacatgtcagcatgtcagtccgctgaatgagggaaaccaagtcatttctgtacatgagaaacccgggaggtttacacatgaaagcagttcagatcgtaaagcccaatgatctccgcatcatcgatatggataagcccaccatcgacgccaagaacaacgtcctggtcaagatcaaggccgccggcatctgcggctctgacgtgggcatctaccacggcaccaacgctgccgccacctatccccgcgtcatcggccacgagatcgtcggtgtggttgaggaagtcggcggcaacgccaagaagatcaaggtcggcgaccgcgtcatcgtggaccaggtcactgcctgcggcacctgctatgcctgccgcaagggccgtcccaatgtttgtgagcacctgcaggtccgcggcgtccacatcgatggcggctaccgcgagtacatggccgtgcccgagagcgacgtttatgtcctgcccgacagcctgagctaccaggatgccgttatgatcgagcccaccaccatcgccgtgcaggcttgcagccgtgcccagctggagttccaggacaccgttatgatcatcggtgccggcgctctgggcagcagcatgctgcgcatcgtcaacctgtacagcccccgcaagatcatcgtcgtggacatcgacgagcccaagctggaggccgccctccaaaacggcgctaccgacgtcatcaactccaagaccgaagatgtcgtcacccgcgctaaggagctgaccgatggctacggcccgacggtcgtcatcgactgcgcctgcttccatggcagtttcctgaccgcctgcaaggccgccggcaacgcaagccgcgtcatcaccatgggcttcagcatcgcccccgatgagatcaaccagttcgtcatcaccagcaaagagctggacgttcgcggcagccgcctgcagaaccaccgtttccagaccgtcatcgacctcatcaacaagggcaagatcgacctgaacggctccatcagccacactttcaagctgaccgacgcccaggccgctttcgacttcaacgacacccacgatccgtccatccgcaagatcgccctgctgaacgactaagcttgcaaccgcgttcctcgttataaaagcgattcctgatacaaagcaccccaccggggctgtgcattgcgtacagccccggtggggtgtttttagggcaataccgcataattctaagtgccgatacggcgagcgaggtgc

SEQ ID NO: 166 - DNA, 12001 bp, unidentified
  source 1..12001: mol_type = unassigned DNA
agcaagaacaagcccaagaccgtaaaagcaaccgttgactttgccgcacagatcactgaaaagcagtctgcaaaggaggccgctgccgccgaaattgcatcgatcgctgcgaatattgacactctgaaagcagacctgaaaaccaagaaagccgagatgaaaactatcgacaaagaaatcgccagaattgaagctaaaaaggtcaaagctgaaaccaaagcagcggaatccgcaaagaaagccgaagccgaagctgtgctgaaaaagctgctggcatccggtatgacggcagatgagattctcgaaaagctgaaataaatattttagagccgtgtggatcagtcggagcgtagagttatagctctggcagttcacgcggttttcttatacttatataaatagtaattggtgtgactcggaatgaatagaattattctatatcgaacataaatgactatatttcccgcaccatggctcaaaatcacgtccggagaaatttcagttaatcagcaggaacatgtttgcaatctagctgtcatagagcttctgaggagagtgcttgggagagctgctgccccggcggaagccctagacccaaggcgtttgaaccgtggaatgtcgtaaaaatatacgctgaaatctgaaaaatgcaggtcagaagcgaaacgaatcaaatccttgcaaatgacgctgaaacgtgatataattttggtacgaacaaaccggttttggtacgacaacggtatgttctggtactgtaactgttgttacgaaactgtgaagaactacttggaaaagcgcaaaaattagcgcagctacgatgacacctatcaggttcaggtcgtgtcctggtacgacaacgagaactcctacacttctcagatggtccgcaccattaagtacttcgctgagaactgctgattggagtttctcctgagctgaataaagcttgactgcgccctttctcttgtgtgatgcgagagaaagggcgctttttgctgaccattttgggcgcgataaggcgcttttgtaaaatggcacaacacatttgtggtgatccgacaaaagcagcacgcattccatctccatctattgcaacccttctcccgatatgataaaatggtaaaaataaatggagacaacgaaacagtatgattacgaaacgtgaaaaactgcagtatggatacctgtttctgattgatctgctctctctggttctcagcattgggctggcgtgggggctgaccgcaggtgttctgcacaaaatgggggacttccagctggacgatctggtagaagcctgtttcttattgctgctggcctatatcctgaccttttttacatttgatcagagtgaaaatatcgtgaaccgcactccgattcgtgaagttgaaattgcggtgcggttcaattttttgctgactctcattgatgcggcctgtctggcgctgaccaaggctcccatgctgcactcccgctattttctggtgtttgtgcccgtcatcgatgtctttgtgatgacgggcgctcatgctgtcctcaaaaagatgctggtacgctcccgctataccaaggggattcagagccttgtgggagtggtgaccacgcaggagaacgcaagccctgttctggaagagctgaaaaaggactggtccaagcgtgtgaccggtcttgccattctggaagctgccccggagcagcttcacactgagatcgatggggtgaagatcgaggcaaacttcgataatttcatggactggctgcggcaggcagcgctggatgaagtgtatctggatgtggcgcaggagagtgaggagaacatgctgccctatctcgaggagatggagagcatggggctgacggtccatttccgcctgccggtgctggaccggattgaaaaagcctgctgcgatgagaccagtgcggtgcgtatcagccgggaactgagccgctgtgcgggcggcaatgttgtgacgatgggcacggtggaactcaagctgcgggatcaggtgctgaaacggaccatggatatcgtaggcggcatcgtggggtgcatcatcagcatccccatcattgcgttggtggccatcccgctcaagctggaaagccccggcccgctgatcttcaagcagcgccgggtgggccggaatggacgtgtgttctacatccacaagctgcgcagcatgtatgtggatgcggaagcacgcaaaaaggaactgatggcccagaacgaaatgaacggcctgatgttcaagatggaagatgacccccggatcacccgggtgggccgcttcatccgtcgcaccagcatcgatgagctgccgcagttttttgacgttgtgcggggctccatgagcctggtgggtacccgcccgcccacgctggatgagtatcggcagtacgagagccatcacaagcgccgcctttccatgaagccggggattaccggcctgtggcaggtaagcggccgcagcgatattgatgattttgaagaagtggtcaagctggatgtccagtacatcgacaactggtccatctggatggatatctacctgctgttcaggacggtgggtgttgtgtttgaccggaaaggggcaaaatgaattatattctttttggtggatctggttttatcggaacccatctcattcatttgctgctgaaggagtgcgtcagacccggcgacgtgatctacgacctggatcttgtgatgcccggggaagagggcgtggtgccgggcgttgtggaaaagaacgatggggtgcagtatatccggctggatgtgcgcaagcccatcgattttgagtttgttccgaccccggaggacgtgatttttgatctggcagcggtccaccgcacccccggccacccggaagaagcctattttgaaacaaatatccggggcgcggaaaatgtgaccgcatttgcggaaaaatacggcatccggaagatcctattcaccagctccattgcaccctatggcgcgtctgaggaccttaagacggaggaaactctgccaactcccaacacgccgtatggaatcagcaagctggtggcagaaaagatccaccagatctggcaggcccgtgatccggcccgggagctgactatcgtgcggccaggcatcgtttatggcaaaggggagcacggcaacatgacccgcctgtacagggggcagaagaagggctactttttttatgccggccggaaggacaccatcaaggcgtgcatctatgtcaaggaactggtgcgcttcttcaagtaccggatgctggatcattccttccccggagcagagatctataactgtacctacgagccggcctataccattgaagaaatctgcgatgcaatgcagaaggcgaccggcctgcaccgccatgtgccgttggtgcccgccggactgctactgtttgcggcgggcattctgggacccatcgggggcaaaaaggtgggcatccatcccgcccgtgtccggaaactgatggtatccaccaatgtctgcggcaggaagctggccgccactgattacaagttccactatacgctggaggagagcttccgggactggttcgaggattgtgaccgcaaggagctggtatgaccatggagcagaatgcacagcccatccgtgtggcccagatgatgacggatatgaactacggcggtgtggagatggtggtgatgaactactaccgccacatggaccgttccagagttcagtttgattttttcgcgctggaaggctcgactctgccccagcgggaagagatcgaacggctgggcggccgggtgtatgtggtgccaaaatatacccacctgccgcagtatgaacgggagatcgggcggctgttccgtcagaacggataccagatcgttcactcccacatgaacaccctgagcgtgctttccctctggggggcaaagcgtgcaggggtgcccaaccggatcgcgcataaccattctacggtgggcaggggagaaggggcaaaaaatgtgatgaagtacctgctccgtccctttgccgcagtgtatcccacccggctctgtgcctgctccagaacggcaggcagctggctttatggtgaaaagcctttccgggtgttcaacaatgccattgagctcgaccgctttacttatgatgccgccaaacggaaagccgtccggcaggagcttggcctgggggatgaactggtgctgggccatgtcggacggttctgctatgccaaaaatcacgaatttttgctggatgtaatggcggaggtctgcaagcaacggccggatgccgttttattgctgatcggagaaggggaaaacgaggccgctgcccgccggaaagcggaggcactggggctgcaggagaatgtccgctttctgggccgacaaagcgatcccgcaaagttttatcaggccatggatgcctttgttctgccctcgcggtatgaggggcttgggatcgtgctgatcgaagcacaagcggcggcattgccggtcatctgttccacagaggtgccgcaggaggctcaggtcctgcccgagatgcagtacctgagcttgcaggaaagcccggcagtctgggcggatgcggcgatccgggctgcagaaaatgcccggcggcgggatacctctgtcgagatgcgggcaggcggctttgatatcgtcaccgaggcgaagaagctggaagagttttacttcgacctgctgaaatgaggagataagatggaccctttggtaagcatcatcgttcctgtttataatgtaaagccatatctgaaccgctgtgtgaacagcttgctggggcagagctatcagaacatggagctgctgctggtggacgatggctccaccgatggcagcgagaccctctgtgatgaatatgctgcacaggatgcccgggtgcgggtgctccacaagaaaaatggtggtctgtccgatgcccgcaacgctggtgtggacgcagcaaagggggaatatctctcttttgtggatggcgatgactgggtgtcaccctattacatcgagaacctgtaccgggcactggagcaggcaggagcagatttttcagccagctgttttgaagaggtgttcgagggccagccggtgcagtccgtgcccacagagcgtctggaagcatttgagatcctgagccgggaggaatgcctgcgccgcatcctgtatcaggagggcatggaggtgaccacccccaccaagctctataagcgtgcactgtttgagggcgtgcgctacccggtgggcaagctctatgaggatatcccggtcgcctacgaggtgacaaagcgtgcccacaaggcggcacatatcgcaaaccgggattactactatttccagcggggcagcagcatccagaatatggccttcaaccccagaaagctggacagtgtgcggcactgccatgcgctgatggaaaatgtgaagcgtgatttcccccagttgagccgtgcggcagaatgccgctatctgagcaatgtctgcaatattctgttccagatccgggacaggcagcatgaaaaaatagagaaggctctctggcaggaagtgaaaaaataccgccggaatgttctgctggacccgcaggcccgtaaaaaggcccggctggcggcggcactttcctacagcggctgtgccatgacccggcgagtctatgaaaaaacgcagtggcgtggaaaaaagtaaggtggagggatccggttggaggaaagaaaaccgcttgtatcggtcattgtgccggtctataatgtttatccgtatctgcgggactgtgtgcagagcgtgcaggcgcagagttaccagaactgggagctgcttttggtagatgacggctccaccgatggcagcggggaactttgtgatgaactggctgtggaggatggccgcatccaggtgttccataagcccaatgggggacagtccgatgcccggaatgtcgggttgcaacagacgcagggaaaatatttttacctgctggacagcgatgacctgatccgctccacggcctttgcccagttcgtggagcgctgtgaggcggatggtgctgacgcggcccttaccccgctggagatgttctcgacagagcagccggaggggcggacggaaaatccgcaccagatcccagagctgctgaaccgggaagagaccatgcgccggatgctgctgcatcagggcatcgggcatggggcaggcggcgttttcttccggagggaggtttggggcgatctgcagttccctgtgggcatcctgtacgaggactatgcggtgatgtaccgggccattgcccgctgtacaaaagtggaagtgtttccggaaccgatgtacgattaccgcatccataccggttcgaccatgaagagcggcattgccgagaagaatctggtcattctggatgtgggcgaggacgtgacccactttattgcggaaacggttccagtgctgaaagcagaagcagaatacctgcagctggttacatacctgaagacactgaaaggcattctggatggcggttttgccagctatccggaggctcaggcacggatctgccgctttgtgcaggaacaccgggcgcttgcccggcggccctgggccaaaagagcagaccggatcaaggtggaaacacttctgatcagcaagcggctgttctatgccgtttatgggctgggagaatggaaaaataaacacacagtcgaaaagtaaaatggagaagttatgctgatttatctggggacttttgcggcttctgtgggcattgccgcctatggtgagcacctgcggacgaagaaaaacaacgagaagggcttttatctctgcctggcgctggcagtgctggtgatggcggtattggcaggcttgcgggacccgtccattggtacggacagcgtggtgtatgagggatgggtggcggatgcaaagctgcaggatggtctgctggcctgtatccggcagcggcacaaaacagagccgctgtttatgacgctggtctatctggcggcccatgtttttggtgatgtccattggctctactttatggtggatctgctggcctgcggcctgtttatgatcgggctggtgcagtataaggagtatgtctccgtgccctatggctggctggcttacctctgcctgtattatggcgatacttataatgccgagcggcagtctgtggcgctgggtgtggcatttctggcgttcagccttgcgtggaagaaaaagtatcactgggcggtcctactgctggcggtctcctgcctgttccacaatgccacctttatctcgtttggtgcgctgctgatctatatcctgcttcagtatttcgacaactggtgggtcaagggtggcctggcggcattttcggtctaccttgccttcttcagcaaggctgtggtcaggctggccctgaatgtggacttcattgatcgactttacggatattattatgatgccaatgcgggcggcttcacgctgaatcccatcattgtgcgtctgcccttcctgatcctgcccattgtgctgtaccgctggtacgccaaagaggaaggggagggccatcgccgctttacccgctcggatgccgatttctggatcgtgatgatcctgatcgagatggcaacggcccagctgcgcaacatcaatgtgccgctctaccgcatctgcctgtattttgcgttcttccgttatctcgccattggccgtgtggtcaagtgcgtggaggatgagcgtctgcgcaagctgctgaaggctgccatgtggggaatgctggtcatcatctggatctatcaggcgtatattcagggcaacaatgccatttgcccgtacacctcggagatcctccacatcggcagagaaacattcttctgagggaacagaacatggagacagagctgatcagtgtcattgtcccggtctacaatgtggagcgatatctccgccgctgcgtggacagcatcctgcaccagacctatcggaatcttgaggtcctgctggtggatgatggttccaccgatgccagcggagccatctgcgacgaatatgccgcacaggaagaacgtgtaacagcagtccaccagaaaaacgggggactctctgcagcgcgcaacgcgggactcgaacgggcacagggaacgtatctctgctttgtggacagtgatgactttctgaacagccggatgctggaaacgctctgccgtgacctgcaggaacaggatgcggatgtggctgtggtgggcttccggatgtttgaacgggaggaagagcttgccccggctgaactcaccgtaccggtgcagtgtatgacaggccgggaagccatccgcaacactcttgtctcggatgagctgggggattttgcctggaacaagctctacaagcgggagctgttccgggatatccgctatccgctggggcggatgatggaggatcaggggaccacataccgcatttttcagcagtgcagcaaggtcgtatactgcccggtgccgctgtattattactatcagcgcccggacagcatccttcaccgcaggaacatgaagttctacgaggataagctggatatgggctaccagaagtaccgggccatccgggaagcgtacccgggaatgtcggaaaatgatgccgccatgctgagcgtggtggagcactgctatccgtatctgatgcaggatacggagcgctgcgcaaaaatggaggcctttttgcaggagtgtgacccggcggcggcaaagctgctctgcaccagcagccagcggaagtatcagctgctcagatgcagccggaggctgtatgcaaaactgttcctgctgaaaaacggcccggcggcaaaataagggaggaaaatttgtgctgaacgataccgtcagtatcattgtgccgatctataacaaagaaaagtatctggaaaaatgtctggacagcatcctcggtcagacctatcgggatctggagatcattctggtggatgatgggtcaacagacaactcccttgccatctgccagcgctacgcggaaaaagatctgcggatcaagatataccataagtcaaacggtggtgtttcttctgcgcgaaatctgggattggaaaaaagtacaggcacgctgatttcttttgctgacccggatgattcactccacgccgagtgcatagaacggctcaaaagagtgctggatgagaccggtgcggagattgcttattgctacggtctggatcttctgggcacgaccggacgaacgcagacgaagagcgatgagacggagaaaatcagtgttatgccggtcagacgatatgactggaacagccggaaggcacatacagtgtgctggggtgcgctttaccgccgtgcggtcacacaagacgttgtgttcgatactgacttgaaaattggtgaggatacgctgtttcttgcaaaatgtatccgaaaggcagaaaaaattgcctgcatcgacaaggcactttactattactatgtcaacgatgactcggtgacgagcgggcattattcggcaggaaaactgacagagctgaaggcatggcggcgtatctgtgaagtgtttgcagatgaaccgttcgtgtatcggtctgcacgggccggatatgcgctccggtgcagagaaattgtggtgaaatactgcaaggatgatacttttatggagcaggcgtgtgccgaagcggaacgggagtttaagagaaatgccggcccccttctgctaggctggcttcgtgcagggcagtatcggtattttataaaaacgctgtattcgtatctgctctggaacagctggctgaaaaagaaacaggccagaaaaacttacgaagtggagatctgaatgaaaaaatccctcagtctgaatgcagcaatgagcgcattcaaaacactgatgaatattatcttcccgctcattacattcccttacgcttccaatgttcttcaggtggaaaacctgggcaaagtgaactttgccagctcggtctgcgggtattttctgctgtttgcaggccttggcatctcctcctatgcggtgcgtgagggctcccgctatgtgaatgaccgagaaaaactgtcggcttttgcatcggagatgttctccatcaatatgatctccacggccctgacctatgcggcattggcggtgacgatgctcttctggacaaagctccatgcctataccgacctgatgctggtgctgagtttacagatcttctttacgaccatcggcaccgaatgggtgttcacgatctttgaggagtatacctatatcaccatccggggcctgctgtttcaggtactgtccattttcatgctgtttgccttcgtcaagacccgggatgactactgcatctatgcaggcatcacggtgtttgcggcggtaggtgccaatgtgctcaactttttccgggcccggcggtactgcaccatccggctgacaagaaagatcgactggaaaaagcacctcaagcccatcctcatcatctttgcatccacgctggcaacgaccctttatgtcagctcggataccacgattttgggcattctgggaacagattacaatgtaggtatttactcggtggcgggtaagatctatggcattgtaaagaatctgctttcggcggtgctggtggtgtctatcccgcggctgtcccattatgcgggcgtgggggacaaggcaaacttcaacaagctgttcaacaatatcttcaacgcgctcatcgtggtggtggctccggctgtggtgggactgtttgccctcagccgggaggtcgtcctctttatttccggggaaagctatctggatgcggtgatgcccctgcagatcctgagccttgccctgattgtctgcctgtttggctggctgtacaattcctgcgcgcttctgccctgcggaagagaaaaggaactgttctggatcacgctggtcagcggtctgctgaacgtggggctgaacatcctgctcatcccgcggttccgggagaatgcggcagcctttaccaccctgctggcagagctgtgctccatgatgctctgtatccgctgctccaggggtttggtcacggtctcagctgaccggcgcaccgttggctcggtgctctgcggctgtgtgggcatcgttcttgtctgtaccggggtcaaggcactggctctgcccaatctcatctgcattctggcggcggtgctgggctcagtggctgcatacgcggtcatcctgctgggcatgaaaaatccgctggtgctggaatatctggaaaaagcgaagcagaagttccggaaaatatcctgaatggacaggacccgctgcgggggcaaacactccctgcagcgggtctttttcagaaaaaacggcgttttttggtgcgttccggcaaaatcaccacatttctttgcttctgcaacaaatgtttgttaataaattatccatctcccgtccttgcaatacacacgctttttgtttataataaggatgtacggggaagttcgcagtgcgcggcccccgatgaagagcaaaattcgattccgaacgaaaagaatttgagaggagtttgttaccatgggtttaggtaagaaaacgatcgacgatcagaattactgcggcaagaaggtccttgtccgctgcgatttcaatgtcccgatgaaggacggcgtgatcaccaacgagaaccgcatcaatgcggctctgcccaccatccagaagctggtcaatgatggtgctaaggtcatcctgtgcagccacctgggcaaacccaagaacggccccgaggcaaagttcagcctggcacccgttgctgtggctctgagcgcaaagctgggcaagaccgttgtgtttgctgacgacgacaacgttgtgggcgagaacgcaaaggctgctgttgctgctatgaacaacggcgatgtcgttctgctgcagaacacccgtttccgcaaggaagagaccaagaacatgcctgagttcagcgaagagctggcttctctggctgatgcatatgttgacgatgcattcg

SEQ ID NO: 167 - DNA, 28273 bp, unidentified
  source 1..28273: mol_type = unassigned DNA
cctcccgcccacctggcttttgtaatcctgcccaggcgtttccccgcgtccgagccacccacttctaccagcgtttccggtactccgacgccgtacacccctccatcttccggaacaccttattaaaataactcgcatcatcgatcccacacaggtgcgcaatctcctcaatcgaagaattgctgtaccgaagcagctccttggcattattgatcctttttgccagcacatactgtatgaccgtcgttccgaattcctttttaaattcccgtgaaagataatacttactgataaaaaaatgttccgcaagctggtctaaggagatattttcggtataatgttcgtccagatagtgcagaattgttttaagtttatctgagagcagttcatttttttcattagactcggtacagatgagcgttaaaatatgaatgatctgctgggcagttaaaagatcggtgtcatcggtcggttcttcgttgtagcggatgatactctcgattgcattgatcagttctgtgaaatgagcagagcggaaatgccagttatggtgatccctgaaataggtataatatgccctggcctcgggaccgttgaaatggatccagagaagttcccatggatcttcatccgtactgatgtgggtgtattccccggaacagtcgagaaaaaaacagtcacccgcatgcgccgttgaagagatcattccgccttcggataacggttcgcggtaggtgacctcgccactgccggagagcacgacaaaaaacaggtaggaattcagctcgctccgcctgcttaaatgtgatttcaggctttttaaatagccagcttcctgtatgtggaagaaatttttgcgggtaaatgcggagggggtattgatgacgcttcgcgtatttgtaacttcggaggttttatatttttcaaaaaataatttttgcatagcaatataatactattttagaccaatatattcaattgcaaaatcaaaaaaattagattaatctatacaacggcttaaaattttgatattagcaaaataatcatagaattcataaaaggagagatgaaatgagtaaaaaagcattgatcacaggtgtcacaggacaggatggaagctaccttgcagagcttcttttagaaaaaggatatgaagtacacggtatggtacgccgttcttccgtagaaaagagagagcgtatcgaccatttagagggcaatccgaattttaccgttcattacggagatctgtctgattctttaagtctggtacgtctgatcggaagcattaaaccggatgagatctacaaccttgctgcacagagccatgttggtgtcagcttcgatgtgccggaatatacagcagatgttgtcgcaaccggagtactccgagtgcttgaggcagtccgtatctgtggattagagaagacctgccgtatttatcaggcttccacttccgagttatatggaaaagtagaggaagttccacagcgcgagacaacaccgttccacccatacagcccgtatgcagttgcaaaacagtacggtttctggatcgtaaaagagtaccgtgaagcatataacatgttctgctgtaatggtattttatttaaccatgagtcagagcgccgtggtgagactttcgtaaccagaaaaatctcccttgcagcagcaagaatcgcccagggcaaacaggatgtgctctaccttggaaatttatcatccctgcgtgactggggttatgcaaaagactatgttgaatgtatgtggctgatcttacagaacgacaaaccggaagatttcgtgatcgcaaccggtgagcagcactctgtccgcgagttctgtgagcacgcattccgcgaggctggcattgagcttgagttcaagggcgagggtatggatgaagtcggtatcgacaaagcaaccggaaagactgttatcaaagtttcaccggagttctatcgtccgaccgacgttgtaaatctctggggagatcctgcaaaagcaaagacagagcttggctggaatccgacgaaaactacttttgaggagcttgtaaagatcatggtagcgcatgatatggagcttgtaaaaaacgaaaaataacatttggagaaaagtgtgaaaaataagatttttcacacacaagtttgtgcttacgctcaaacttgttatgtcttgggaaacagacagaaatggagaataagatcatggaaaaggatgcaaaaatatatgttgccggacacagaggaatggtaggttccgcgattgtccgtcagcttgaaaaagaaggatatacaaatatcatcacaagaacacacaaagagttagatctctgccgtcaggatgcagtggaggagttttttgcaaaagaaaaaccggattatgtgtttcttgcagccgcaaaagtaggcggtatcatggcaaacagtgaagcacttgctgatttcatgtacgacaatatggttcttgagatgaacgtgatccacgaggcatggaaaaacggatgtaagaagttaatgtttttaggctcttcctgtatttatccgcgtatggctccacagccgatgaaagagagctgccttctgacaagtgaactggagaaaaccaatgaggcatatgcacttgctaagatcagcggtttaaaatactgcgagtttttaaaccgtcagtacggaactgattatatttctgttatgccgaccaacctttacggaccaaacgataattatcatccagagcacagccatgtgcttccggcactgatccgtcgtttccatgaggcaaaagaggccggattaaaagaggtaacctgttggggaaccggtacacctctcagagagttcctctatgtggacgatcttgcagatgcctgcgtatatctgatgaaccattacagcggaaacgagaccgtgaaccttggaaccggaaaagagctgaccatcaaagagctgacagaactggttgccaaagtagtcggatatgagggtgagatcaaatgggattccacaaaaccggacggaacaccgagaaaacttcttgatgtaagcaaattagagggactcggctggaaatataagacagagttagaggaaggaatccgtctgacttatgacgatttcctgcacaatccgatgcgtgcagagcgctaagagcgtagaatggagaaacaacatgtatattgttttattatcaggcggttccggaaagcgtctctggccgttatcaaacgatctgtgttccaagcagtatattaagttaatgaatccggatgaagcagaacattcggctagtacggaaaaatgttccatgttacagcgggtgttcgggcagcttaaggcggcatcactttctgagaatacgatcgtgtgtgccagtgattcccaggtggaactcattgaaagccagttagacggacaggcagaagttgctgttgagccgatgcgccggaacacattcccggctgttatgttatcctgtgcctatcttttgtcaaacaagggtgcaaagccggatgatgtggttgcatttctgccggtagatccatacactacagtagagttttttaataagatcaaatctttgggtgaatatattgaaaaacaggacagtgtgatcggactgctcggcggcgtgccgacctatccatccacaaaatatggatatatcgttcctgaaaaaaacggatccgagccgtttgcagtaaaaggattccgtgaaaaaccggatgaggcgaccgcacaggaacttgtggatatgggtgcactctggaattgtggtgtgttctgtttcaaattaaacatggctgcgcagtggctggataaatacggtgttacgacaaactatgatgagatggttgccgattacgaaaagctgccgaaacagagctttgactatgaggtgttagagcactggaaaaacattgttgctgtccagtatgacgggatctggaaagaccttggaacctggaataccctgaccgaggaaatgaaagagcagagcattggtgatgtgacatgggataagacctgtgagaacagccatgcaatcaatgtgcttggagttccgatggtagtcatgggagcaaaaaatatggtgatcgttgcttcgcacgatggaatattagtagcggacaaacaccagagttcctatatcaaagactgccttgaaaatattccggatgagtcaagatttgaagagcgccgctggggaacgatcaagacgatcgacaacaacgacgaggacggtacacacagcgtcacaaaacgcatcaagatccttgcaggcaagacaatgccatatcacacacatgcccagcatacggagacgatcaccgttatttccggtatgggaaaactgattcttgagggaacggaagtagatctgcttgcaggttctacggtaagtattgcatccggcaagaaacattccatcaaagcacttggatcggatctgcggctgatcgaggtaagccttggtgttacctgtgatgatgagcaggttctaggctaaaagtatgaattttgtctgaataaaaaagataaatgtagcattctggctgaaaatgttttataataaaatatgtatatgcgtttttctttggaaaacagggggattgataaagagaatctctgttgttgggaaaaacataaaaaaataaaaaaattattgaaaacaacataaaaaaatggtatgttgtttacggacgtagtaatcactgcgcgagtggaaaggagattggttcatggatacgaacgatatttcagcatgcgaaagacttgtcatgaaagttatctgggattcaacagaggatctggcattacaggatatcatgaacagagtaaatcaggagaacggaaaaagctggaagccacagacggtttctacttttctggcaagactggttaagaaatcatttttaacagtttaccgcaagggaagatattcattctatcagcctgcagtaagcaaggaagatttctggaaagcaaccgtacaggagaacgcaagattctttgataaaggagatatggctgcgtttgcctgccatctttgcgaggatgcgcttaccaaggaagaggttcaggtactcaagaaaaaattagatgaacttaattagtcagatatttttgattatcttgattgcctgttttacaggtacggtcagtctggggttctggagagtatttcagccgcttttgctgaaacgggatcctagactggtatatgcgactttgcggtttgtatgtatgatgtacatagtaccgtttggttatctgatcgtcaggctgacctggcatggatatctgcggacggaaagcatatggaaacctaattttgagatggcaggagatatggatcttgtgtttgggatagccggaattatctggctggtctttctgatcaaaaatgtcgcagacagcatggttgaatttattcgctggaaaagactttgcagatacagaatacctgtggcagatgaacaggtctgtgcagagtttctgaaagtgaaaaatatgctccatatccatcggaagataggaatttattatagcagttccattcagagcccgatggtgacaggagtattccaatataatatcttattaccgaaggatcactacagtagagaagaactgacggtgatcttttgtcatgaactggtacattgtaagcataatgaccctttctttaaaatttgcagcatttatatcggtgcgatgcagcatatgacctccggggcaaaacatattttgccgtggatcaatgagtggagtgaatgtgcctgtgacgtgtcggcagtctgcgcattgcgtgatgtggtaacgcccagacgttattttgaagtgatcgtagatctgatggagcgcatgccggagaattcaaagccggattatattttttctaccctatatgagagccagcagagtttgggaaggagaatagagtatatgaaaaaatatgtgaaagccaaaagaggggcaaaaatatcagcatttgtactgtcgtttttatttgtggtaacttcaatgaccacaacctatgcagcaagttatggagcagcgggtgtgcatgacgaattgtatcaggaagcagaagctacgcagggagaaagtttagaaacaccggaattagaagaggtgtttgttccggcatctgagaataatgattattcccgcatcaaatatgcaaaaccggacctcagtccggtggcaccattattggatgctggagaaaacgtatcatttaactggacggtagaacctggaacacgtttctgttccggtaaatttaaggtgtcaagtggacaaaagatagcgattgtggcagcaacaacaccaagtacacagacctgctggatcggtattatggacccgcataataatgtacgttacgtggagggaaaaggcacattatcacatacgttttccgtttcagagacaggaaaatatcgtgtgtttgtgcagaaccgtggaacgaaaaatgtatcagcaggtggaagctattactttgaatagttaattcatttagccaataaaagaaagaggtaaaacacctcttatcttttatcacaatatcactacaactgaaatcgacgtttgataacaatttacatcgaaaaaatatgatcgggcgaaatccgggagatttcatcaggttatttcaaagtaacagaattaggagcggtagaaaaatcaaataccgttccttttttctgcaaagaactttttaaggtactggcaggaaaatccgggttgtccgtgatggaggaaggcgcatcgataaaggcataggaggcgcctgcagcctcgtaaaattcatcggaaaatgaccagtttccgtgatgtccggcctgaatataatcgcaggaaatatcgttccggtaagtaccaagcagatagtcgttcatatcatatttgatatcagagcagaataacatactgttttgtgccccgctgatcttaaacagcaaagaggcattgttctgataatctttttcatccccgacagtagaaagaacagattcatcccatgcattaaaaacagagagtgtcagatgaccggcaagtgtgatcacatcgccgcgttttaaatgtatgagattatcagcatctttcgtcagcgcgtggaacgtttccatgacggtgatatcatcgtaaggttcaccggcagcttcgatgaaatcataatcaaaaccgttgtcataaatattttttatggtgatatctcccggattggcatagataacattgaatgcaccggcatgatcctggtgcggatgggaaatgatccatgcgtctactgtgttgttgtgtttcgcaatcactttccggacagcatcggcattgcctgcccagcctccgtcgatgatgatcaaagtgtcatcgtttgaaatcgtataaaaagtgccctggacaccggtcgcatccgcatactgcgtgatgagatattccgtggcaggatccggtatgtggccggtagagtccatccggcttttctgataagaaaaccatgctgcaccgctaagcagcagggcagataaaattaaaagaatggtggacagtaaatttttcttcttcataaaaatcctcatttcctgggttgtttaccattttttctttattccaaatactcctcaatgcttctttatacattagcaaaaaacaggcgtgttgtaaattgcagacatggttaaaatctcaaacttgcatgatactacagaaaatggtagtataaaacaatatggagtatttttgacttttgaatggaaaggcaggaggaatacgatgaaaattgcaatcgcaggaacaggatacgttggtttgtccaatgcgattttattagcgcagcatcatgaggtgactgcagttgatataatagaagaaaaagtggagatgatcaatcagcgcagatcaccgctggtggatcgtgagattgaggattatctggcaaatgcaaaactggatctgactgcaacgacagacggtgtacatgcatatgaaaacgcagattatgttattatctcgacaccgacaaattatgatgaaaagaaaaattattttgacacctcatccgttgaggaagtattagaactggtcttaaaggtaaatccgcatgcggtgattgtcatcaaatccacgatcccggtcggttatacacagtctgtgtgtgagaagtatcacacggatcgtattcttttctcaccagagtttttacgggaaggacaggcgttaaaagataatctttatccttcaaggatcattgtcggttcgaaagagggaagcagtgagatgaaaaaagcagcggagaaatttgcacatctgctgcaggagggtgcaatcaaggaagatatcccgacacttctgacgaaccttacggaagcggaggcagtgaaactttttgcaaacacataccttgcactccgtgtttcatttttcaatgaacttgatacgtttgctgccatgaaaggactggacgcaaagcagatcattgaaggaatcggacttgatccgagaatcggaatgcagtacaacaacccttcctttggatatggcggttattgtctgccgaaagataccaagcagcttctggcaaactatgacaatgtgccgaataatattgttggtgcgatcgttgatgcaaaccggacaagaaaagattttatagcagaacagatccttgagaaaaatccgaagacggtcggcatttaccgtcttgcgatgaaggcaaattcggataattacaggcagagttctattttaggggttatggagcgtattcgtgcaaagggtgtgaacattgtcatttatgatccgtcattaaagacagatacgtttgaaaattccaaagtgatccgtgattttgatgagttttgtaatatgagtgatgtgatcgtggcaaaccgtatggataacatgttgtcagatgtaaaagaaaaggtgtatacaagagacatttatttcagagactgattggaaggaccgcatatggatacacataaattttttgtggaaaaactcagattccatctgaatgaaccggatatgctggtgttcgtcggctggttttatgacggaaaagcatcaggcagggaagttcaggcttatctggatggcgaaaagctgccggctgcccttacagtaaacaaaggtgctgaggttcgccagaaatatcttgggacgatcaatgaaatcaatgaggaagttgtcgggatcgtgacgctgccgaaagactggcgtgaaaaaaagaagtttgaaatttttacggatgacggagaaagtaaaaaaagagcgtatgctgtttcaaccggaaaactgcgcgtaagggaaagcagactggaatattatattgaaaactgccaccgcgatgaggacaccgtgacggtgaccggctggtgcatgggggcaggagaagtgaatctttatctgctggataaccgcagacagaagcttcaggtaaagacggatcactatttccggaaagatctgctctctgtatttccggaatgcgacatacaggcaaaaccagggtttatgatccaggcgtcgattccgcgaaaggatgataacaaaaagtttttccttgaaatgcgcaatgcagaacattactcccgcacccggttaagaaagtgggatgatggaggcagatggcagtatattctggaaaaatcacaggatgcattccgctatttagagcggaacggactgtctgcaacgatccacaagatcgaaaataaattaggggggaaatcggaaacctcctatgacgcatggtgtcaaaaatatgatgtaaaaaaagaagaacttgaggaacagagaaaacggacattttcttatcagcctttgttttccgtcgtcgtgccgctgtatcggacaaaaccggaatttttaaaagaaatgatcggatccatacaggcacagacttatggtaactggcagttatgcttagcggacggcagtctgtcaggggatgatgcggggactgcggaaaacggacaggcacctgtaacggagctgacaccgctcttagagcagtatgcgaaagcggataaaaggattacatttacaacacttccaaagaatcttggaatatccggcaatacgaacgcagcgcttgcactggcagcaggtgactatatcgtcctggctgaccatgatgatattgttcctgcgaatgcgctctatgaactggcagatgccttaaatcaggatcgcagtattgatgtcttatattcagacgaagataagatcagcatggatggaaaaaagagatttgaacctcattttaaaccggattttgatctcgatcttttgtgcagtgtcaattatatctgtcacctgtttgcggctaaaaaagagcttgtggatatggcaggtggattttgcagtgaatatgacggggcacaggatcttgattttatcttaagatgttgtgagaatgcgaagaatatcagacatattccaaagattttgtatcactggagatgtcatatgcagtctacggctgcaaatccggagagcaagctgtatgcgttcgaggcaggaagacgtgcgatagaggcacattatagcaggattggggttccggcagttgtggaaaatgcagcattttacgggatgtaccggacaaaatatgactggaaggaaaaaccgctggtatcgatcattattccaaataaagatcacaggaaagatttagaaacatgcgttaattccattctcgaaaaaaccacttacccgaacatcgagtttattattgtagaaaataaaagtaccgagcaggaaacctttgattattacaaagatcttgagacaatgcgtgaaaatgtacatgttgttttttatgagggcggctttaattattcaaagatcaacaatttcggtgcggatgccgcaaagggttcgtatctgttactcctcaacaatgatacggaaatgatcgacggtggcgcgatcggtgagatgttaggttattgtatgcgcggggatgttggaattgtcggtgcaaagctgttatacgaggatgagacgatccagcatgccggagtcgttttaggatttggcgggaccgcgggacatgcatttatcggcaaaccgcgttacgataccggttattttggcagaattttgtgtgcgcaggattattcggctgtcactgcggcctgtatgatggtaaagcgcagtgtgtttgatgaggtcggcggactgacggaagaacttgcggttgcgttcaatgacattgatttttgtctgaaagtgcgcaaaacaggaaagcttgtggtctatgatccatatgcagagtggttccattatgagtcgaaatccagaggatatgaggattcaccggaaaaagtggagcggtttaatgacgaggtggatacactgcttcgttcatggagagagatcattgagcagggagatccgtattataatccgaacctgacactggataattcagatttttccctgcgcaaataggcagtaagaaagaagagaggcagcagttcctatgatgaaagtatttatttgcccggaatgcggatggatgcgtgtcgtatcaagacgcaaagatgtggagtgctttaaatgtggaaacgagcagatgacgctggcaaaggtggattttgacgcattcacctcaatgtcggaggaggaacgaaaggattacgcaaacggatggctctatatccatcagaaagcgaaaaaataaacatgaagtcaatttttcagaaaataaccgttcagaaagttgtgaagggattccgctatctgaaacattatggatggaaagaatttatcatccgtctccaggaaaagatggaggcagaaaatgttccgtatgagccatggtatgaaaaacataaggcgacagcggagcagatagagaaacagaaaaagcaggcagaaaaatggaacgatgcgccaaagatcagtatcgtggtgccgctttttaagacaccggaaacttttctgcgcgcgatgatagagtccgtacaggcgcagacctatggcaactggcagttatgccttgcggatggaagcggagccggggatgaagatgcggatccgaaagcgtctttggtgcagagtattgcaaatgaatatgcatctgcagatgcgcggatcaagtatgaatgtctgaccgaaaatcaggggatcgcgggaaatacaaatgcggcgatcgcactggcggacggagactggatcgcatttatggatcatgatgatctgcttgcgccggatgcactgtttgagatggtaaaaatgatccggcagggattccacgatgaggatgggcttgcagcgacggtctaccgggaagacggtaatgactacgagatgctttatacggatgaagacaaagtcgatatggatggaaaaacacattttcagccgcatttaaagccggactttaacatcgatctgctccgttcaaataattacatcacgcatttccttgcagtaaagagatcacttctcgaccgggttggcggaatccgttctgattttgacggggcacaggattatgattttattctccgctgtgcggaacaggcaggggcgatcgggcacattccaaggatcttataccactggagatgccacaaagagtcgacctctgagaatccgttttccaagcagtatgcagtggatgcgggaaaacgtgcgatcggggaacatttaaaacgccttggcgtggatgctgtcgtgacgccgacgaaggatatgggattttatgaggtggagtatcctctgacagagcagccgcttgtgtcgatcatcataccaagtaaggatgaggtggaaaccttacggaaatgtattgctgcgatcgaaaagtcttcgtatggcaattatgaagttattgtggtggaaaacaacagctgcgaagatactttccgttattatggggacattgcgccgcaggaaacgaccgttgatggaacacgctgcatggagggaaaacttgcaggcggacagcgcatctgtgttgcagtctatatggaaggatttaactattcgaagttaaataatttcggtgtaaaatttgcaaaaggcagctattaccttctgatgaacaatgacattgaaatgatcggaaatgactggatgaagcggatgcttggaagctgcctgcgggaagaagtaggaatcgtcggcgcaaaactgttttatccggatcacacgatccagcatgccgggatcgtagtgggaattggcggaagtgcgcgcggcatcggagataacatgtttgtcggtcttgccggggaccggagcgggtacatgcataaggcatccctccagcttgattacagcgcagtcacggcggcatgtctgatggtaaaaagagagatttatgagcaggcaggcggctttgaggagcagcttgcagttgcgtttaatgatgtggatttctgtctgaaggtgcgcagactcgggaaattagttgtctacgagccgcatgtgcaggcatatcattatgaatcgaaatcccgcggggcggaagattcaccggaaaaaacagcgcgtttccagcgtgagatcgaatacatgagaaatcactggatcggtatcttaaaaaacggagatccgtattacaatccaaatttttcttcggtttataataattattctctgaaggataacagctgaatggaggatagatgacggaagttacgattatcattccgaactacaacggaaaaaagcttttggaaaactgcataaagacactcgaacggcagacctgtcaggaatttaaactgcttgtgatcgacaatggctctaaggatggcagcacggacgtgacatcggagagcctttacatggaaatggtcgcactgccggaaaataccggattttgtggtgcggtaaaccttggctttgaaatgacagcaacaccatatgcgatcttactgaacaatgataccgaggcagagccgcattttgtggaggagctgttacaaggaatccggcagtcggaacgtattttttcctgtggcgcgcagatgcttgattttaaacagagagagctgcttgacaatgcgggggatctctatacgctgccgggctgggcagttgcgcgtggaaagggcagacctgccgcagattatggaaaacagacggatgttttttcctgttgtggaggagcggtcatctaccggatgtccgtgttaaaacagatcggtgtgatggatgaaaaacattttgcttatcttgaggatctcgatctcggttaccgtgcaaggatcgcaggataccgcaaccgttatatcccggaggcaaaagtgtatcatgtcgggagtgcgacgacaggttcgcgctacaatgaaaaaaaagtatttcttgccgcacgcaattccatgtttgtgatctataaaaatatgccgttgctgcagtttttgatcaatctgccgtttttatttgccggtgttttggtaaaatggctgtttttctgcaaaaaaggatttggacgccgttatttagagggcattgcagagggaatcgggcagtgcagaacatgcagaaaagtccgctttaaggttggaaatcttcgcaattatgtaaaaattgagtgggaactcattacaaatatatttcgcgtattatcgcacagataacgggaaaaaacgtttgagcatcaaagaataataaagaaataattaagaaattgtgacaagagttttaagaaaaagaagttgtgctttctggaaaattattgtattattatttttatggtagcttgaaaatgaaaaaaggatgacattatgataaaagataatcaacagcattttaacagactgcatgtgatcatagatgcgtttgtcattgtgatatcatatatcctggcatggtggctgaagttttcgagcggtattttggactcaccgggtggtgcactgtcatttggattttacatgaaggcactggtcgtgattgttccgttgtatctgattttgtattatgcgtttaacctgtatacgccaaagcgggtacagggacggcggttagagttttccaatgtcgtgatggcgaacattgtaggttttctgttgatttttacagtattgtacaacctgcagtcttatgtggatcagtttcgaaatttttcccgtgagatgttcttttatttctttgcgatcaacacggtattagaagagtcgttccgtctgctgatacgtcagtttctgcgcacaatacgcaaaaacggttataatctgaagcatgtactccttgtgggatattcccgtgctgcggagcagtatatagaccggatacagcagaatccgcagtggggatacaatgtcaggggaattttagacgacaatatagcgagagggacgacttataaaggggtaaaggtcattggaagcgttggcaatctgctttatatcctgccggagaacaagttagacgagattgcgatcacacttggactggaagagtattataagctggaaaagatcgtatcggaatgtgaaaaatccggggttcataccaagtttattccggattatggaaatattattccgacgaagccgtacacggaggatcttttgggacttcctgttattaatatccgttatgtaccgttgtcaaacacgtttaatgcacttgtaaaacggtgtatggatattgtgggttcactgatctgtatcgtgcttttttcgcccattatgctgcttacagcaattgcagtcaaagtgacttcaaaaggaccgctgatctttaagcaggagcgtgtcggactgcataatgaaccattccgcatgtataagttccgcaccatgtatgtgcagactgaggaagaagaacgcaaaggctggacacataaagatgatccgcgaatcacaaagattggcagatttctgcgcaagacgagccttgatgagtttccccagttgtttaacgtgttaaaaggtgatatgagccttgtgggaccaagaccggagcggccgcagtatgtggaaaaattccgggaagagataccgcgttatatgatcaaacatcaggtacgtcccggcatgaccggatgggcacaggtcaatggatatcggggagatacatccatccgcaagcggatcgaacatgatctttactatattgaaaactggacgatagggctggatattaaaatcctgtttcttaccgtcttcaagggttttataaataaaaatgcatattaggagaaaacatttatgagtaaaacagtacagggaagaaacggggcacacagcaaagcgtcaaaaagaagaaaaaagcagaaaaacagactcattatcgttgtaattgagattcttgtattgctgattttagcagcagtgttgtttgttacggtaaaactttcaaagatccagaaagacacaagcttcaataaagaagatatcgaggtaaatgagggattatcttcggagtcacaggaaatcatggcaggttatacaacaatcgcactgtttggtcttgataaccgttcaaacggtaatctctccaaaggtaacagtgatgttatcatgatcgcaagtatcaataatgatacacatgcggtaaagctggtatctgtatatcgagacagttatctggatatcggaggcggtacttttaagaaatgtaattccgcatatgcaaaaggtggtccggagcaggcaattaccatgttaaataaaaacctggatatggacattaccgattatgtaacagtggactttaatgcagttgttgaatgtgtagatcttctgggcggagttacgatcccggaggtgtctgatgaagaggctgtgctgatgcatggttatatggatgagatcaataaactgaccaaaaataattccaagtacttatccggtggcggaacaaatgtagagatggatggtgttcaggcatgtgcgtatgcgcgtatccgttatactacaggagatgattataagcgtacagaacgtcagcgtactgttcttactgcaatggtacagaaagcgcagaaggcaaatcttactacgatcaacagcctgatcgacgaattatttggtgatatcaagacaagtttttcaaatacagaactgatttctcttgccgcaaaagtattcaattacagccttggtgagacaataggtttcccgtttgagaagaatacgacaacacttggaaataagggaagcgttgttgtaccatgtgatcttgaatccaatgtaaaacagcttcatgtatttttatacgatgataatgaatatgcaccgaccgatacagtcaagaataacagtgctcagattgtcaatgataccggattccatcagggagaaggatattaatgaaagcagatctgatcataccgacttacagaccggatgacacattttgtctgctcctgcaaaaactgcaggagcagacctttgtcgttcatagggtcattattttaaacacagaagaaaaattgtggaaagaagctgtggaaaagtatccgatcgaacagagtctttgtggacttccatgtgagtatacgctgtatcatatcagcaaagaaatgtttgatcatggcggtaccagaatgtgtggcgtgaaacattccgatgcggatattgttatctttatgacacaggatgcggttccggcagataaaaatctggttgcaaatctggtaaagggtttggaagagaaggatacggctgtctgttatgcaagacagcttccgaatgaaaactgccgcattgtggaacgctatacaagatcttttaattatccggatgaaagcaggaaaaagggaaaagcggatatagaagaaatggggatcaagacgtttttctgttccgatgtatgtgcggcttacagagtggatctgtttcataaacttggcggattcgaatcaccggttatttttaatgaagatatgttttttgccgcaaaagcagtttttgcgggatattatgtaaaatatgaggcagaagcaaaagtcattcactcccacaactatacggtaagacagcagtttcaccgcaattttgatctggctgtctcacagaccatgcatccggagatctttgagcagatcagttcggaagcggagggaatgaagctggtaaagagtacgatgaagtatctgtgctcaattggaaagccgtatcttatctttgaacttggaatccagtgtgttggaaagtatgctggttaccggctcggcaaacggtataaaaagctgagcaggaaacagatcttaaaatgtacgatgagtccggagtactggaaacgtttgtggaatcaggaagtatcagacgggaataggtaaattatgagagagacttctaaaaaagttttattttgggcattgatgtttttcggagcattcctcctgttgacacaggtgggatattccgatggcgacgatgcctttttttatcagtatacacatgaaatgggatttttcgagtatttaagctggcgctatcagacgtgggtcggcaggatgtccggggaagcaatggtgtacattgcattttcactgggaatctggttctggcgtatcgtaaatgccatgatgcttgtgctgcttccatgcggcgtgttgaaactggcagaaaaagcagcgggtatccggacaaaaaattttctgccgggcgagtcggttgcagtagtaagcggttatcttctgatggcgattatgaccgttggatatgcggcaatctggatcaacggttccattttttatacatggtcatttacctgtgggatctgggcactggttccggttgcagatattgtatttgacacgggagatggtggttcaggggatcataatacctggcattttttttattccattccctgcgcagttctcgcaagtatgtcgatcgaacagatggcggcggtgcttgtgacgtttgaggtgctggcggtactggtggtgatactgagaaagcatgaaaagcaaagaaccattcttcttatcatacagacagcagtgacggtcgtggcgtttgtgattctgtttttagcaccgggaaatgatatccgtgttgcatcggaagtacagaactggatgccgcagtatgaggaactttcttttggggagcatctttttgttacagttcaatggctggtttcttcttttgcaaatgaaaaccgcctgttgctgtttggaatctggctggcgggaatcctgcatattatatgtaaaaatgaaagaaaagcatcagatgtggcatgtatgacggctgcaggactgttttctgcagctgcattactgccgtttgccggaatcaaggtgttttcagactgtggtcttcatatcgcagatattacagtacggctggagcaggtaccgcggatcgaagagatgcaggcggcaaactggtttgcaatgtgctggtggatcgcggcacttttgtttacctgtatcttgatatggaaagtttcaaaacataacgtagtccttatgctggtgtggcttggcggaattgcaagtgaggcgatcatgcatttctcaccgacgatctatgcgtccggtgcgcgcgtttattatctgacggattggatgtgtatgtttattatattggttctggcatttaaaatgccgggtaagaaatggagagatctgtattattctatcgtggcaggtcttggcgtttggaatctgctatatcaggttatcaattatatttgagaagaaaacataattttttgattgttttgtcacaaatagaacacaatttctctgtacactcataatcagaaaaggaaaagaaattccgaatacgaaaggagaaatcgttatggatggtaacaattataacaacaacaatcagaatgggtcttcggattccttctattcatacaataacggcagccagagcaatcagcagacagaacatgcaaatgaaggaaacgtaaaccagtacaacaattcttatcagaacacaaattcttattcacaaaacgcaggatatcagcagggcagtgcatatcagaatggcacataccagaacacaggatatcagcagaacggtgcttaccagaatggtggatatcagaataccaacggtgcattttatcagaacgcacagacgactggtaaaaaacaaaagaaaaagagagaaagaaaaccgggtggatttggaacgaaacttgcaaaatgcgcagccatcgcgttagtctttggactggtatcaggcactgcatttgagggtgtacatcttgtatcgtccaaggcatttggcaatgatgaaaccgcagtatcagacagcggcagtcagaatgcactgaccaaagcagacaacaaggtggaggcaacttccacatcgtcgaattatgtagcaacggatgtatctgacatcgtatcatccgtaatgccgtccatcgtggcaatcacaaatgtgagcgagaccgaataccagagtttctggggcggtatgccacagacttatgagagcacaagctgtggatccggtatcatcgtaagtcaggatgataattatctttatgttgcaacgaataatcacgtagtaaacggtgcaaacagtctgacagttacatttaatgatgagtcaacagtcagcgcagaggtaaaaggaacagttccttctacggatcttgcagtcatccgtgtagcgttaagcagcattgaaagtgatacgatgaataatattaaagtagccacacttggtgattctgacagcttaaaagttggtaattcctgtatcgcaatcggtaacgcacttggttatggacagtctgtaaccgttggttatatcagtgcattgaaccgtcaggtatctgtcagtgattcagagagtgacacaagctatactgcagatctgatccagacagatgcagcaatcaaccctggtaacagtggtggtgcattactcagtgcaaacggtgaggttatcggtatcaactctgtaaaatattccgatacttccgtagagggtattggatatgcaatcccgatcaatacggcagcaccgattatcaatgatctgatcacgaaagaaaaagtagatgagtctgacagcgcataccttggtatcgtaggtgtcgatgtaacagatgatgttgcaaaaacttataacatgccatccggtgtttatgttgcacaggtaaccggaggttcggcagcagagcaggcaggtatccagaaaggtgatatcatcacagagtttgacggaaaacagattggttccatggaagaactttcatctacaatggagtattataaagcaggtacaacggttgatgtgaagattgagcgttctacgaatggtgaatatcaggagcagacgatttccgttacacttggcaagaaaaattaatggaatgactgtatagggagtgggcgaaatgcccactccttttttggtgaacgccgtttgtgcgtccctccgctatcgacttttgctaggatgtgtgctatgatatttcagagtctgctgtgtaataatgtttatcgcagatgatgatttcatataataaaaataggtctggggcgtatcgcgtccggaatggaggatttacgttgtcaaagtttgaggatttcagaaatcaatacaattcttttttatataaagattattccgtagagtatatcgaaagtgcatatcggatcgtgtatcattttgagataccggggctgtgtgaatttcagtcaaagtgggagttcccggcaaaggagcgcgtggatgagacaatcttaaaggcgcttgcatttcatcttggaatggcagagacaatcagctactggaaatgtgcctgcccgaagcagttaaaaattttgtgtggaacactttccgcagaacagaaaaaatggtggaaaaagttatattacaacggacttggcgagtttatgtaccgcaatggaatcgtggtttcaaaagaggatcttgttacgatcgaatgtgaggacaaagcgtgcgcaccactgcatgatacaaagtcctatgatggatgcctggtgtctgtcggcggtggaaaggattccgtggtttcccttgaggtgttaaagggagaaaagattactacttacagtatcaatggcaatgcgaccacaaaaaatgtcattgcagtctgtgaccacaaacagggagactacgctgcaaaacgtattctcgacaaaaagattttagaacttaatgcagagggatatttaaacggacacattccgttctctgcagtcgttgcattttcatcctttatttcagcatttttgagtggcaaccgctatatcgtgctttcgaatgagacaagtgcaaacgagacgacggtaaaagattcttttgtcaaccatcaatattcaaagagctttgagtttgagcaggattttgtatcatatataaagaaagtgacagattccgatatccattatttcagcctcttacgtccgctcactgagatgcagattgcatggctgttttcaaaatgtaagagttatcatgaagtattccggagctgtaatgcgggaagcaaacagggaatctggtgctgcaactgcccgaaatgtctgtttgtctatatcattttaactccgtttttatcacaggaagaactggtgcacattttcggagagaacctgttggaaaaagattcgcttgatcttgattttagagagctgaccggcattgaggagaacaaaccgtttgagtgcgtgggaaccagacgcgaagtccttgttgcattaaagacatttattgcacgcggtggaaagagtcttttaaccgagcgctataaagaaacgatcgaagctgctccgggagagttagatgagatgctttccgagtgggtatccgaaaaccaggtgccggagcatttcttagagattttaaaggattttatgaatcgggcataaacagcaggaatagagatgccctggggaacgggcaggaatggagattaagatggacatcatcagtgagttgaatggaaaacggattttgatctggggttacggcagagaaggaaaggcgacagagcactttctgcagagatgcgtaaaaccggcgtccgtggatatatttgaggggaagaaagaagagatcgacgaggatgattacgattttatcataaaaagtcctggcattgtgatgaatgaggaaaatccaaaatatacctcagagacagaattatttttacagcagtttcgtgaccaggtaataggaatcaccggaaccaaagggaaaagtacgacgtctgcaatgctctatactgttttgaaggcatgcagcggcagaccggtgttactgcttggaaatattggacagccttgtcttgattatttcgaggaagtgacagaagatacgattattgtttatgagatgtcctgccatcagcttgcacatacgaatgtgtcaccgcacattgcaatctttttaaatctctatgaggagcatcttgactattatggaacagtagaaaaatattttgaggcaaagagccatattgcggcgtatcagaagagcggagattatttctttgtgggagaaaatgtaccgcagatcgatacaaaggcgcaaaggacagtgcttcatcagcccaaaggtgtgcattatgaattgaaacttgccggagagcataatcagtatgatgcacagtttgtggagcgtgtggcagaactgcttggatgcgaaaaagaggctgtgttaaagagcatggcagactttgaaggactgccgcaccgcctgcagtatgtcggaacttatcggggcgtcagatattatgacgattcgatttcaacgatcccggaggctgccatcaatgcggcgatgagtattccggatgcaaagacggtcctgatcgggggtatggaccgtggaattaattatgatcttctggtcgcatttatcaggaagcataaagaatttcagtttatctgtgcatacgcatccggaaaacgtattttcggggaagtcggcgactgtgagaactgtgtctatgcggaagatttagagcaggcagttgaagcagcagtacagatgaccgaaccgggaggcgcatgtatcctttcaccggcagcagcatcttacggttattttaaaaactttgaggagcgtggagaaacatttcagaagtatgtccatgcttttgcacagtaaggtgacagattttcagggaaaaacatacagaacagagaaaataattttacgtcttgcaaaagcggaaaaattcctgtatggtaatagatgaatgaatttttgaaaagcgaatctgtcatatttgcaggaattattgcaaaagaatgtttttttaaactttaaaatgcaagattgcagaatgaaaaatgcaaaaagagcaaatgtacgcaacagaaagacaggttgaaacatggatttattcgaatatatgagagaacagaaaaaagagacggagtcaccgcttgcatcgcgtctgcggccgacgactttagatgagatggtcggacagcagcatatcatcgggaaggacaagttactgtaccgtgcgatcaaggcggataagctcagctccatcatcctctatggacctccgggaaccggaaagacaacgcttgcgaaggttattgccaattccacaagcgcagaatttttacagatgaatgcaacttctgccgggaagaaagacatggaagatgtcattgctaaggcgaagaataacatggggatgtttggaaaaaagacgatcctgtttatcgacgagatccatcgttttaataagggacagcaggattatcttctgccgttcgtggaagatggaaccatcatcttaatcggtgcgacgactgagaatccttattttgaagtcaatggggctcttctttcccgttcgatcatttttgaactgaaaagcttagaaaaagaggatatcaaaactcttattttgcgggcggtaaatgatacgcaaaaaggtatgggtgcataccatgccgtgattgatgaggatgccttagatttccttgcagatatctcaaatggtgatgcgcgtgccgcattgactgctgtggagcttggaatccttacaactgagcgcagcggggacggtctgatacatatcacgctttccgttgcttccgaatgtatccagaagcgtgtggtaaagtacgataagtccggcgataaccattacgataccgtatctgcgtttatcaaaagtatgcgcggatccgatccggatgcggcagtctattatttagcgcggatgctgtatgcgggggaggatatcaagtttattgcaagaaggatcatgatctgtgcctcagaggatgtgagcaatgcggatccgatggcacttgtggttgcaacctcagctgcacaggcagtagagcgcatcggaatgccggaagcacagattattttagcacaggcagtcacttatgtggcgagtgcaccaaagagtaactcggcagtctgtgcgatcagtgaggcaatggagacagtcaagaatacgatgactgcaccggttccatctcatttacaggatgcacattacaaatcatcatccaaacttggccatggcataggttataaatatgcacatgactatccgaaccattatgtagaacagcagtatctaccggacggactgactgaccggaagttctacagaccgtcagagaacggttatgaaaagcagatcagagaatatttccataagatcaaaggggaatattcccatgaatgataaataatgtataacgaaccaagaggaggaagcaaacaatgcaatcttatcaggaaatgacaaaggaagaactgttagccgaaaagaaatcactcgaggcagagtacaagaagttccagcagcgtggattaaaacttgatatgtccagaggaaagccatcccaggaacagttagatctgtctatgggaatgatggatgttttagcatcttacgtggatctgacctgtgaagacggaacagactgccgtaactatggtgtgcttgatggtatccatgaggcgaaagtgcttatcggagatatgatagaatgtaatccggacaatatcattatctatggcaactccagtttaaatatcatgtatgatacgattgcacgttccatgacacatggtgttatgggtagtactccatggtgcaaattagataaagtaaaatttttatgcccggttccgggatatgacagacattttgccatcacagaatattttggcattgaaatgattaatgtaccaatgctgccaaccggtccggatatggatatggtagaagatttagtcagcaaagatgaggcaatcaaaggtatctggtgtgttccgaaatattccaacccacagggtatcacctattcagatgagactgtgcgccgttttgcaagattgaaaccggctgcaaaagatttccgtatctactgggataacgcttactgtgtacatcatttatatgatatcgatcaggatcatctgattgagatccttgcagagtgtaagcgtgcaggaaacccggatatggtatacaaattctgttccaccagtaagatcacattccctggttccggtgttgctgcgatcgcaacttccgcaaacaacttggaggatatcaaaaaacagttaaaggttcagaccattggtcatgataaggtaaaccagctccgccatgtacgtttctttaagaacattcacggcatcacagagcatatgcgcaaacatgctgcatccttacgtccgaagttcgagatgatcacagacatgtttgacaaagaacttggcgatttgggcgtaggaacctggtacaaaccaaagggaggctacttcatcacttatgagactttagagggctgtgcaaagaatgttgttgcaaaagcaaaaaaagcaggtgttgtgatgactccggcaggtgcaccgttcccgtatggaaaggatccgaaagattccgtaatccgtatcgcaccgtcttatccaagcttagaggatctgacaacagcagcagaaatctttgttgtttgtgtgaaattagcaagtattgagaagatcttagaagaaaaataacagattagattacacacgctgcggtaacattattatctggaatacaggaattaccgcagcgaaaaagtttgtaagtaaaaatgcaggaaccataaaatatgattcctgcatttttttcatgtgatagaatttacatattaattttctgtttcagttccggcagtttcggtggtagaaccgtttttccatttgtcaaatttctccaaaacagcatcataggtacgctgggaaatatccggcaaatctttgccccaggattttgttgcatcttcaaagccttttttgaaagcgtcgatcagaagatctgctttttccggatcgttgccggaaagggcttttgcaaaatcaaggatacggtcagaggtctgctctacaccccagtagccgtcctcagcgatatctgcctgagcctgtttctgtgtttcctcatcaacggtaaagttaccatctgctaagaagctccacatggaatcggcatttgcgattgcggttccctgcttggtcatcattttttcaaccaggctgcgtaactgggaagtacgctgctcagcatctgcttttaattttgcaaccattgcatagtcagtttttttggtaacggtatccttgtctgtttgagaagatttctcatatacgacaccggtttctgccttatcagatgttgtggttttgtctgtagatgtagaagctgtcttagaagctgtgcttgtctgatagctgttagttgttgaatttacgctgttaattgcattcatagtcataaataattcctccattccagtaaatgaatgactgatttgttcatgcattttttcctttttcttctgtaaaatatatcggcttttcgggaaaaataatttagatggaattgacctttttgccttaaaatgataaaatttatgttgtatacaaaaaacaacgaaaatacatgacgatggtatggggattatgaaggaaatatcagtaaaagcacttgcaaaaataaatcttgggcttgatgttgtgcgcagacgtgaggatgggtaccatgaagtgaaaatggtcatgcagaccatccacctgtttgaccgtcttgaaatgaaaaagacagcaggcgggattacaatgacgacaaatctgtcttttctgccgacaaatgagaataatcttgtctacaaggcagcaaaacttctgatggatgaatttcagatcagggacggtatcgatgtgaagctgcacaagtatattccggtcgcagcgggaatggccggtggaagtacagatgctgcagcggtgctttatggtatgaaccgtatgtttgaacttggactgtccaaagaa

SEQ ID NO: 168 - DNA, 15595 bp, unidentified
  source 1..15595: mol_type = unassigned DNA
  misc_difference 12317: note = a, c, g, or t
  misc_difference 12318: note = a, c, g, or t
  misc_difference 12319: note = a, c, g, or t
  misc_difference 12320: note = a, c, g, or t
  misc_difference 12321: note = a, c, g, or t
  misc_difference 12322: note = a, c, g, or t
  misc_difference 12323: note = a, c, g, or t
  misc_difference 12324: note = a, c, g, or t
  misc_difference 12325: note = a, c, g, or t
  misc_difference 12326: note = a, c, g, or t
ctggggggctgccatatccagcaggggccacaggctttcggcagaaacgccagacttgctctcttccccgccgatgttgatctcgatcaaaatttcctgggtcaggtttgcggcggcagcggcgcgctccaccttttgcagcaggtgctcgctgtccacgctttcaatcaaagcagcacggcccaccactttgttgaccttgttggtctgcaaatggccgataaaatgccccggcttaccgcaataagcgttggcgtcggtcttttccaccagttcctgcacatggttttcgccaaacaggtcaatgggcagaacggcgctggcaatcacctcttccacggtgcgggtcttgcaggcggcgcacagcagaatatctgccgggtcgcggccggcttcacgggcggcggcggccatattttcacggatgtgggccacattttcggccatcattgtcagttgttcctgcgtcagcatggttcacatctcctggtaaacggcgctgccgccgatgtatttggggcgggtgcgggcgcagatgatgggcgcagcgccgatctgcttgatggtcaggcgcaccggcacggccacgcgctttaagtgcatgccaatcagcgtaccgccgatatcaattccagcagcggcacgcacttcctccaccagaaccggatgttcaaacgcctgccagcagttggttgcccagctgccgcccgcatggggctgcggcacagcgttcacctgttcataaccatacttttcggcagcttcctgctcgatgacaatggcgcgattcaggtgttcgcagcactgggccgccagataaacgccctgcgctttgagcaccggcagaatacccgccagcacagccgcggcggcttccatgctgctgtccttgccaatatgcccgccaacgatctcgctggaagagcagccgaccacaaaaatatccccggcgcgcaggtgtgcagccgccagcagttcttccgctgcctggcgtgcctgcgccgtaatggcggcgcaatccggtttttgaacggtgttttgttccataatctacccacctttttcatttactgatccggcattattataacacgggatgcaaggtttgtacattcttaaacggttctaaaccaatcttacccccatgcaaaaacggtgcagcaaagccgcagcctgctgcaccgttttggggcactgctgaaaataaacttattctcagcgcttgatatcgtaattcatgtccatcaggttgcggatggtggaaacatcatcggtgatgttggcatcgccatggatggtgtgcttgatggcggagcttgccaccgcaaagttgaccatatccatcggcttgtagttgtgcagcatggcgtaaatcaggccgctggcaaatgcatcgccgccgcctacacggtccagaatattaaaggtaaacagcttgctttcaaaggtatggtcctcataccacataaaggctttcaggctgttctcggagccggaatgggcataacgcacatggcgagcaatgcacttgatgttggggtaacgctccacaaagcgctggaagatctcatcctgctgttcatagctgggctgtaggggcacgccgtctttccagtcgccctgggcgtggtcggcatcgtctttccacaggtggtaaggctcaatgccaaacagaacatccacatagggcaggcacttggtgcagtagtcacgggcttcttcccaagtccacagggtggagcggaagttgccgtcaaagctgacggtcaggcccttttccttggcttttttcaggcaggccatcacaaaatcggcgcagttctggcccaaagccggggtaatgccggaaagatgcagccagtcaaagccgtccagcagggcgtccagatccactttggaaaggtcatactccgtaaaagcggagtgcttgcggtcgtaagtaaccttgctggggcggatgccgtaaccggtttccaggtaataggtgcccagacggtgggtcggggtttcctccggggtggaaaggatcatcggggtgcagtgcacatcattggagcgcagccagcgcaccgcacttttgcccaaagagttgttgggcaccacgctgaaaaacgtgctgtccacacccaggttggcaagagccagggcaatgttggcctcgctgcctccatagctggcttcaaagttggaagccatacggatcttttcatagttcggcggggtcaggcgcagcatgacctcaccaatcgtaataaatttagccgggctgtcgttatgcaggagcagggggttaaaatgttccataacatctacctctcatttctggccccacgggcaaaaccaggtcatggcccgccgcagggtttgttatgtcgtatttattgtaccgtatttccgtcccggtttcaacgatttttacacaaactgcgctcatattttgcgttccttttcactgttgcacaaaaagggcggtaccgggcggcaaaaaacatcgcacacccatgattttttgccgcccggttcgaattgcattttaatgtcttttattgtataatagtagaaactgtgccctggcggcggctgccgcgcggggtgttgatacaagtgccgcacaaaacagcgttctgacgttttatgcgggccataaatctggagggagccaaacatggccgaaacaatgcaggtctccgcgcagcgcgcctggacccacctgaaaaaataccaaccgctgatccatgaacttgtcagccgcgatctgaaagtcaaataccgccgcagctttctgggttatatctggagcattttgaacccgctgctgatgatgctgctgcaaagcatcatcttttcgtacatgttccgcaacgatatcccaaacttcccgctttacctgatctgcggcaacaccctgtttacctttttcaatgagaccaccagcatgggcctgacttctgttatccagaacgccccgttgatcaaaaaggtgtacattcccaagttcatcttccccatcagccaggcggtttcccgctttgtcaccatgctgttcagctttggtgcggttctgctggtcatgatctttacccgtgccaccttctattggaccatctttttgagctggctgccgctggtgctgctcttctttttcagctgcgggctggggctgctgctttccgcgctggcggtgtatttccgtgatatgatgcacctgtacagtatccttaccatgggttggatgtacgccaccccgctgttctaccccatcaccgccctgccggaaaccctgcagaaactgatgaagctgaacccgctgtaccactacatcaacctgttccgcaacctgatgatgtacggcaacattcccggccccaacacctggattgcctgcattttttgcgccgttgcctctatggctattggcctgttggtgttccgcaagctgcaaaagaactttatcctgtatatctgacgtgaggtaacgtatggacgagattattaaagtcaatgacgtttccatgcgctttaaccttgcgcaggaaaaaactgagaccctgaaagaatacaccgtaaaactgctgacccacaagctgttttttaacgaattttacgcactgaaacatgtttctttcagcatgaagcgcggcgaatccctggcgctgatcgggcgcaacggcagcggcaaaagcaccatgctgaaagtgatttccggcgtgatgtacccctccggcggcagcgttgccgtcaacggcgaaattgcccccatgatcgagctgggcgccggttttgacatggatctgaccgcgcgggaaaacattttcctgaacggcgcggtgcttggccacgaccgggactatatgatggagcattttgaccgcatcattgaattttcggagctgaaagattttgtggatgttccggtcaaaaacttttccagcggcatgatcgctcgtttgggcttttccattgccactgaagtacaggccgacattctggtttgtgacgaagtgctggccgttggcgactttatgttccagcagaaatgccaccgccgcatggaagagatgctttccaacggcaccacgctgctgttcgtcagccatgatatcaaccaggtgcagcagctgtgccagcgctccatctggctggatcacggtgttctgcgcggggatgggccatcgcgtgaagtctgcgcggactatgtgcgcgctatggaggccggtgaaacctgatggaaaagctgctgacggtttcggttgccgcctataacggcgctgccacgctgcaaaaagcgcttgaatcctgcctggtggcggatgaaagcctgcaggcgctgctggatgtgatcattattgatgatggctccaccgatggcaccgccgcgctggcgcaggcctttgtacaggcacaccccggcagtttccggctggtgagcaaggggaacggcgggtacggctccacgctgaataccgcggtagagctggcctccgggcggtactttcgcacgctggactgcgatgactggtttgacaccaatgctttgcagacccttttgcgccgcctgcaaaaccgcacggcggatgcggtatacaccaactaccgcaccgtgcaggaaaacggcagcggaaaggtctttgatgtctgctgcaaatttgatacaaaccgtgtgtatgctgtgggtgaagtgcagcaggccacacctgatttgtgcatggagatgcacgcgctgaccctctgcaccaaaactctgcgcgccgcatggcgccctatgccggagcattgcagctacacggatatgggctatacgtttgttggcatggctgcggcgcagaccatctgctttgtgccggtggttctgtaccagtaccgcctggggcgggatggccagagcgtgagcatggccagctaccgcgcccacacgcaggattacatccgcgtagcgcgcattctgttggatgttgccgaaccgctggccgcacagcctgcccccgccgggcgggacctgctgctggtgcagcgggcgcgggatgtggcgcagtacctgattgagctgtacctgcgctttccccccgaccgtgaaaccggcctggccctgcgccggtatgacgagatgctgtgccagacttacccacacatcgctgccatgatgaccaacaaaaacacccgtctgctgcgggccgggcgttacctgccctaccgcacattgagcgcatgggcgcgcggaaaacaatccaacggcggcattttataatgctgtgccggatacttgaatactttgccggatatgataaggcaaaaagtgaaaggagaataccgtatgctgctgcaaaagctgctttggccccgcgtgggcatatgcaccgaggaccaactgtattaccgtatgaaagcccccagcttccgcgatgagggggatatcctgcgcattgagcagggcgaacgcgtctgctttgatacctactttaacagcgtcagcgcagacaaatggcgccgctacaccgccgcgcagaatttttcgctgcggctgaaactgagcggcaagctgcgcgttgtgctgtgcagccgccatttcatcaacagccagagcgtgcgcaccgtgctggccgaaaaagtagtgcaggcggattccgtgcaggaattctgcttcgattttcccaagggcgctgacggcatgctgttttttgagctgcaggccctgagcggcaatgccgcctattgcggcggcgcttatgagtgcgatgccgctgaaaaggatgtgcagcccgtcaaaatcggcgtggatatctgcaccttccgccgggagccgttcgttatgggcaacattgcccgcatgcgcagcgatattttggaaaacgccgccagcccgctgcacaaccacctggaagtgtttgtttccgataacggccagacgctggattacgataagctgaacagcgataccgtgcatgttgtgcccaacgccaatgtgggcggtgccggcggctttacccgcggcatgatcgagatcctgaaagccaacgaaaatggtgcaggcgttacccatgtactggtcatggatgatgacattgtgctggataccgatgtgctgctgcgcacctacaccctgctgagcctgcgcaagccggaatatgcggatgtatttgtcggcggtgccatgctgcggctggaccgccctaacattcaggtagaaaacggcgccgcctggaaccagggccagttgatcagccacaaagccaactttgatctgaccaaggttgacctgtgcgttgccaatgagctggaagaacgccatgagtataacgcctggtggtactgctgcatccccattgccgttgtgcggccggacaacctgcccatgcccatctttatccgcggcgatgacattgaatacggcctacgcaactgcaaacgcctggtcaccctgaacggcatctgcgtatggcatgagccgtttgagagcaagtattcttcctcgatgtactactacatcctgcgcaaccagtgcattgacaacagcatgcactgccccggctatgatgccaacgccctgaaagccgacctgcgcagccaggtgatgggcgaagtgaaccgctaccgctataagaatgctgacctgctgatccgcggcgtgcgcgactttttgaaaggcattgactggctggaacagaccgatgccgaagccctgcacaaagagattatggcatatggctacaaggcccagccggtggaccagctggatgttccgtttgattattcccgctacctgtacgccaccaaagaggaagaaaaaaacaagggcaagctgaaaaacctcaaggtcaagctgacccgcaacggctggctggtgccccccacccgcgaaaacaccgttgtgagcatgatgcacatgaccgcctacaatgcttaccgcgtgcagaaggtgctgaactatgattccaactcccagaaaggctttgtgaccgagcgcagcaaggaagaatacagccgttgcgtgcgcgagatgaaagcctgcatgaaagagatcgacgcccagtttgacgctgccgcccagagctaccgcgagcgctgcagcgaagtgcgcagtctggacttctggaaaaagtatctgaacctggacaagtaattttaccgggcctatccccggttttccctggaaaggaatcttacacttatggccaaaaaaaaggcaaattcgtttgttcttaccattgcgggcattgctgctgccaccgtgatcggcgtggtcggggtcaagctgacccctgccccgcatgtgattttcagcctggcccccagcgcagaaccacaggctaccgctgagccggatcccatcagctgcgtgctggccggtaccgggcaggttgtggattttgcggatcccggcgcagaggaatatgtttccctgctggacaccgacagccagagcctgaccgagcgctatgccctgcccgctttggagcggatgacccagtccgacaccgaaagcctgattgcccctttgcaggtcatccagcgcattcagaccctcggtattgaccctgccacctttgataccccggaggccaactggaaaaacctgtacaactctgtcatgacccggctggcccccctggccaccgccgaaaccgcccaggctgtgaattttaccggttccagcctggcagaactgaatgactttctggcagccaaccccggcagcacggtggaggtcatctcccctgctctggtgatggatgctcccctggtggtacccactggtacgatcctgcacggcaacggcgcagtgctgacccccggcaatgaaacgctggacaaagccattgttctggaccaggcggaaaataccgccgtgaccggctttgtcatcaacggcgggtgcaattacggtgtgtatgtcaagaattccagcagtttctatctggctgaccttgacatcagcaatgtttccctcaagggcctttgcgttatgggggagaacaccggctttgcactggtcaataacagcatccatgaaaaccagaatggtgccatcttcctgaacggcgagatcagcaatggcgtgatcgagggcaaccgcattgaaaataactctggtgcccgcaacctgaccgccgggctggtgctctgctccatgcccattgaggacattgagaccgcctacaatccgttcccggatgaaatgctgtacgatattttacagtctccccatcagctggttgtgcgcggcaacacggttgcgcagaaccattcctccggcatttattcggaaagcggctacctgaactattatgtagagaacacgatctacaagaacgaaaaagagggcatgtgcctggattacggctccttcggcaactacattaccggatgtgagatccgccagaacggtggccgcaaccgcatgagtgatgaggatctggaagctgactttattctggatcagggccgcatggcggatggttcctcccccgccaagctgcccggcatctcgctggataacaccgcctacaacaccatttacggcaacattgtgcgggacaattacggttccggcatcaaggctgtgcgctcggcgttcagcaacaccattctgtgcaaccagatcattgacaacaaccggggtgccagcgataccttccacttctttggtattgagctcagcactgacctgaacgcggacgaagccgtgcagggcctggattttaccccctgctatgagaacatcattgcccgcaacaccatttccggcgggcattacgctggggtgtttatgggcgaagatgcgttcatgaatgatatttttgacaatacctttatggactgcactgactgggctatggaatccctgggtgaaaaatacaactctaccctgaacaatatggcaaacatgcccacccgcgggatcgaactttctaacggtcagggctgatgccgcgaggctgctacatgaaacaaacactgcaaaaccgtttcccgcgccggtggctgctgctggcttttgtgctgaactttgccattgccgcggctgcactgctgccctacatgatacgggacggcggcctgctgttggttgcggcggattttgacgcagaacagctctcctacaacatgctgtgcaacaacgccatcaaaagcggcgaggtgctgtggaactggcgcattgatattggttcggactttgtatcctcgttcagcttttacaccctcggcagcccgtttttctggctgagctttctcttccccgccagcgcgtttccctatctggtcggctggatctatatgctcaaatatgctgttgccgggctgacctcgtttgcctactttcgccgcagtgccagcgagaaaagcgccctgcttggcagtgtgttgtatgcattttccggtttttcctgcatcaacgtggtgttctatcacttccatgatgtgattgccctgttcccgcttttgatgctggggctggacaaacgcatgcaggagggcaaaaaagctccgttcctgtttgccgttgccatcaacgcgctggtcaactattacttctttatcggggaagttttcttcctggtgttttactatattacgcggtatctttttggcggcgaggacgcacgccccggggcggatctgcgcaaaaatgcccgcaaaattccggcctgcatcctggaaggctgtctgggcgtcggcatggcgggggtactgttcatcccctccattgcggcggtgctcaataatccccgcgtatcggatcacatcagcttgagccaactgacctttgactggcccaattacctgcaaatgctgcgggcgctcttcttcccggcggagaatatgttcaatttttccgctgtggtgcatgataactggtattccatcgcggcgtacctgcccttggtaggcgtctgcctggttctggcttatctgctgcgctggaagtgggactggctgcatgtgctgctggtggggctgttccttgtagcagccagcccggtcagcaacagtctgttcgtcatgttcaccagcgagccgtaccgccgctggtattacatgctggtgttcctgctggtgctggccaccatcaaggtgctggaccatctgcaggactacccttggcgtgcgggctgcggtatttcggctgcagtcatcgccgctatcacgctgtatctgtacgtcaagcgcgataccatagtgtaccgcaaatactggctggttgtgttgacattgattgccatcggcggcgtggttctgctgtttgctgccctgggcggggtgcggcggctgcgcctgcgccgccccatggctgccctgacggcctgcactgctctggttgctgcactgaccaccggttttaccgtgggcacctatcagcgtgcctacacccagacgatcggcctgaccaccacagaaatttatggtgacgttatccacagcggcgacggcctgcctgatgccctgccctaccgctattatttctgggagccgtattccaaccgcggcatggcggcttacctgccggaccgtacctcctttttgagcacgctttccccctccatctttacactgtatgatgccctgggggacgagcgccacgccattacccccgccgggccggagggcaccaacgagctgctttccgttgggtattatatccgcaacaactccgactggccggatgaaatctacaccagtttttccaacggtcacgagcagatcaacgtctatcaggattcccacgctctgcccatcggcttctgctatgatacctacatgacccgcagtgagtttgacgagcttgaccccgccgagcgcgcccactccatgttaaagacccttgtggtggcaaacgaggatgaagccacggtttccaccatactgcgccactatgatgccgcgctggatggtaagatcagccaggaaaacaagtatgccgacatggacaagcgccgcgaagcctgcaccgatgtgtttgattatggcacagactatttttattccgaaatcacatccggcagcgagcagtacgcatttttcagtgttccctatgacaaggcgtggagcgccacggtcaacggcgaatctgcagagatcctgaacatcaacggcctgatggccgtcaaggtgaatgccggtaaaaactgcattcgtttccactattcccccaccccgctctggtgcgggatcggggtcagcgccattagcattctgctgacggcaatttacctgctggccgggcggcgcagcagaaaaagcaaaaaagaggtgctgtaaaccatgaaggctacccgcgaaaatccgatcctgtacatcgtgatcccctgctataacgagcaggaggttctgcccattaccagcaagctgtttttgaaaaagatcaccgacctggttgccgccggtaaaatcagcgatgacagccgcgtgctgtttgtcaacgatggctccaaggacaaaacctggtccatcatctgcgacctggccaagagcgacaagcactacatcggcatcagccagagccgcaaccgcggtcaccagaacgcagtgctggccggtttgatggaagccaaggacaagtgcgatatcaccatctccattgactgcgacggtcaggacgatatcaacgccatggacgccatggtagatgcctatgtgaacgatggctgcgaagttgtgtacggcgtgcgctccaagcgcgatacggataccttcttcaagcgctttacggcagaaagcttctacaagctgctgaacgccatgggggccgaggttgtttacaaccacgcggactaccgcctgatgagcgcccgcgtgctgcatgagtttgccaatttcaaggaggtcaacctgttcctgcgcggcatggtgccgctggtgggctttaaatccaccagcgttgcttacgagcgccacgagcgcattgcgggtgaaagccactatcccctgtccaaaatgctgtcccttgcgtttgacggcatcaccagcctttccgtcaagcccatccggttcattaccgggtttggcgttattgtggcgctcatcagctttatcggcgtgatctgggccattgtggaagcgctgctgggtgccaccgtatccggctgggccagcatgaccagcatcatctgctttgtttccggcgtacagctgatctgcctgggcgtgatcggcgagtacatcggcaagatctacatggaaaccaagcgccgcccccgctacatcatcagtgaccgcacgtgggatgaggatgagaagtaatcggctgggcagagttacgcctgtttgctttacctaaggcaataccgcataattctaagtgccgatacggcgagcgaggnnnnnnnnnnaagccgcaaggcgggaattgtgcggtgttgccctaatatagcaccaacaaaataaatttgtgccgcgcgttttgccccttgtatgggggtgggacgcgcggctttttttgttgtttcggaggtttccatgctcacggttgactcattttgcaggagagtatttgcgccgcggcccaccgacatgattctttattatttattctttctcatcccccacccccggcccttctccttccataaaaaatttcccgatattttttgccttcctctattgacaaacgcccctgttggcagtattataatatcaacatatgaacaatcattcatatgataaaatgtttgataccgaggtgatactcccaatgcctgataccaaaaagttcccgcagcccgccacagcaccggatggcttagccaacgccctgcctgatgttccggtatgtgacccagactgccacggtgagccggatatcgttgccaggctgcgcagcgatctgccggacgacgaggttctgtatgacctttcggagctgttccgtgtgtttggggataccacccgcatcaagatcctgtacgcgctgtttgagagtgagctgtgcgtaggcgatttggcccagctgctggatgtttcccaaagcgccgtcagccaccagctgcggctgctgaaagccagcaagctggtcaagttccggcgggacggaaaaacggtgttctattccctagatgatgatcatgtgcgcagcatgattgcgcttggcatggagcatgtggaggaatgaaacgcccccaactcttgttaccccttatttttcaaaaaatattgatcataaaaccaaaggagatattatcatgcagaagaaattcaaaatcgaagttgattgtgcaaactgcgccgccaaaattgaagatgccgttaaaaagctgcccggcgtgaacagcgcttccgtcagctttatggcccaaaagatggttctggatgtcgatgatgataagttcgatgccgtgctgaaggatgttgttaagaccgccaagcgtgttgagccggactttgagatcgagctgtaagctccttgcatcagcattttcggacggtttccaaccgcctgaaagtttcggaatccattccaagcggcggacatgtgccgacgcttggaataccttgcaagcaaaaaagcaggtccgagtgccgtccaggcatgagaacatgcttctttgcggcagggtggttccaaaggaggggtgcaggagcgtagcgcagccacactgcggcgaaccccacctttgtagcgtggagcttttgtgacacgctcagggcggtttccaaccgcccttatttttgccccttttttcctgacgaacacccaaaagagaggtcttatcttatgacaaagaagcagaaaaagacgctgaaacgtatcattatttcagcagtgctgtatctggccattattctggcttccaaactggtggctataccctggtatctggagctggtgctcttcctggtgccgtacttcatcattggccacgatgtgctgcgcaaagctgtgctgggcattgttcacggcgaagtttttgacgaaaactttttgatggccgttgccactgtgggagcgctctgcctgggtgagttcagtgagagcgttgccgttatgctgttctaccagattggcgagctgttccagagttacgccgtcggcaaaagccgcaagagcatcagcgatttgatggatatccgccccgacagcgccaacctggaaactgccgacggcacggtaagtaccgttgatcccgacgatgtgcccatcggctctgtgctggtcgtgcgccccggcgagaaagttcccattgacggcgaggtcatttctggcgaaagcacgctgaacaccgccgcccttaccggcgaaagcaagcctcgctttgtgcatcccggcagcgagatcatcagcggctgtgtgaacggcgacggcctgctgaagctgcgcaccaccaagctgtacggtgaatccaccgttgccaagatcctggacatggtggaaaattccagcctgaaaaaggcccgcgctgaaaactttattaccaagtttgcccattattacacccccgccgtctgcatcggcgctttggtacttgccattttaccaccgctggtgctgggcggcggctggctgacctggatcagccgtgcgctcaccttcctggttatcagctgcccctgcgcactggtcatcagcattcctctgagcttcttcggcggcatcggcggcgcttcccgctgcggcatcctcatcaagggcggtaactatctggaagcacttgccaacacctccattgctgtgtttgataaaaccggcaccctgaccaagggtgtttttgccgtcagccaggtcagcccggccaacggctgcaccgaaaaagagttgctggaacaggctgctttggccgaaagcttttccagccatcccatcagcaagagtctgcgcgaagcctgcggcgagctgaatgcccgccgtgcgaccgatgctcaggaaattgctggccacggtgtccgcactatggtggatggccatgtggtgctggcaggcaacacccgcatgatggacgacagcaagattacctacaccaaaaataccggcaccggtactgtggtttatgtggcgcgtgacggccagtttcttggctctgttctgatcgcggacgaagtgaaggaacactccaagcaggccattgccgccctgaaagcccagggcgtgcgcaccatcatgctgaccggcgacagtgaagccgttgccagcgagatcagcggccagctggggctggatgaataccatgcccagctgctgcccgccgataaagtcaaccgcgtggaagaactgctggccaccaagggcaagaacgatatcctgacctttgccggtgatggcatcaacgacgcccccgtgttgatgcgcgccgatgtcggcatcgcgatgggcgccatgggaagtgacgctgctattgaggccgctgacgttgttctgatggatgacgacccggccaagatcagcctggctatgaagatttcccgcaagtgcatgcacattgtgtaccagaacattgtattcgcccttgccgtcaaagccatcttcctgctgttgggagccttgggcattgccaacatgtggtgggctgtttttgccgacgttggcgttatgattcttgccgtgctgaacgccatgcgtatgctgattgttgaaaagaactaaggcaacaccgcacaattcccgcct

SEQ ID NO: 169 - DNA, 53614 bp, unidentified
  source 1..53614: mol_type = unassigned DNA
ggtggtttaggtttgttcgccttgcagggctgtaaagccccgcaggcagaacaatccgtccggccgaatgtcatttacgtttttcccgaccaataccgtaaccaggcgatggagttctggggccaggaaggttttcgggagaaagtgaactttcggaatgacccggtgcataccccacgcttgaatgattttgcccgggagtcggtggtattgacatctgccatgagcaactgcccgttgagcagtccccaccgtggctctctgttgacgggaatgtatcctaataagagtggtattccattgaattgcaattcgagccgtcccatcagctccctgcgtgaggatgctgtgtgtgtgagtgatgttttctgcaatgccggatatgactgcgcctactttggcaaactgcatgccgactttcctacccccaacgaccccgaacgtcccggacagtatgtggaagaccgcgtacctgcatgggatgcctatacatcgaaagaacgtcgtcatgggttcaattactggtattcttacggtaccttcgacgaacacaagaatccgcattactgggatacggaaggccgtcgccacgacccgcgcgagtggtcgccgttacacgaatcgggcaaggtggtgtcttatctgaagaacgaggggaatgtacgcgacccgaagaaacctttcttcattatggtaggcatgaatcctccccatagtccgtaccgttctttggacgactgtatggaggaagatttcaatctctataaaaaccagcctctggacagcttgctcgtccgtccgaatgccgactccaagatgctcaaggcagagagtgcacgctactactttgcttctgtgacgggtgtcgaccgtgctttcggtcagatacttgatgccttgaaggaactcgggctggacaagaataccattgtcgtgtttgcctccgaccatggagagaccatgtgtagccagcatacggaagacccgaagaattccccgtactccgagtccatgaacgttcctttcctggtgcgtttccccaataagattaaaccccgcgtggacgacttgatgctttcctcgccggacatcatgcctaccttgttgggccttgccggccttgccgactctattccggctgaggtgcagggacgtaactatgcaccgcttttcttcgatgaaaaggcagatattgtacgtcctaccggtgctctttacatccagaacttggatggtgagaaggatgcggaaggtatggtccgttcttatttcccttcatcgcgcggctttaaatcggcgcgctatacgctggcgctctacattgatcgcgaaaaccatacgctggtcaaaagcttgttgtttgacgatgaaaaggatccgtatcagatgaataacctttctttggaagaaaaccaagaagtcgtaaaagacctttgcgcagagatgggcaaagtattgaaagagattgatgacccttggtataaggaaggcatcttgaaggatatgataccttattgattggaaatgggttatagataatcctccataaattgtttgaacgttttttgcgacccgcttcgactgatagtgaactatttgtcggagcgggttgtttgattcagaatagaataaatttaccaatacgtatttaagtaaatgatggagatgaagtatagactatgggcttgtctgttgtttttgccgatggttctttgggcgtccgggcgtccgaaagtggctgtcgtactcagtgggggtggcgccaaagggacggcgcatatcggtgctctgaaagtaattgaagaagcgggtatccctatagattatgtggtaggtaccagtatgggggccattgtgggaggtttgtattctatcggatataccccgcagcaattggacagtatggtgaatgcccagaactggaaattcctactctcggatgtacccaatcctaaggatgtgttgctggacgaccgattgaagtcggagcgctatgtactctctattccattttctttgaaatctgccgctgtttcggatgcgggtatcataaaagggaagaacctggcacgtttgttctccacgttgacagaaggttaccaggattccgtggattttagccgtcttcctattccgtttgcctgcgtgtcggaaaatctggtgaatggtagtgaagtcgtgttccgtgagggaatactggccactgccatgcgttccagcatgtctattcccggtgtgtttgctccggtagacctggatggaatggtgttggtggacggtggaatggtgaataactatccggtagatgtggcgcttgccatgggggccgactacgttatcggggtggatgtgcagagcccgctgcttaaggcttccgagctgaaatcggtgaaagacatcttcgggcaaatcatcaatctgcaaggagagaagaaataccgtgagaatctgcgtaataccgacgtattgataaaggtggatgtcaccggctattcggctgcaagtttcaccaaagaggccatcgacactttgatggtgcggggagaacgtgctgccatggacagttgggacggactgcttgccctgaaacggaagctgggacttgcagacgattatcagcctcgccgtccgggacctttccgcttgcccggcgtggctgttgatagggagattcccgttgattcccaaatagccgtccctgctgtgcgggagaacaagctgaatgtcggttttcgctttgatacagaagaactggcggcgttgcaggcaaatacggacttctatttcggccggcagcgcgagtcgctggtcagccttactgtccgtctgggcaagcgtacactggcacgactcggatatagttaccagtgggacggtggatggcaggcgggacttgcctatcagttcgactataaagatatgaatatttacaatgaaggcaaacgggcgctggatttgacttttacacatcaactggtccgtatgggggcggcgaaggactggaacaatatccaggtcagtctgggcattgactttgattactaccactatcatgatttgctgtcgctcgatccgttagcttcggcactgtttgagaattcgtccttattcagttactttgccggacttgtgttcaacaacttgaatgagaggagcgcccctacaaaaggcatgtcgtgggcggtatcctatcatctctatacggataacttcttccagtataaggacaacaatcctatttctgttttcgatgcccgttggcagggatgtttctctccctcgagtaagttcactgtcactccttcgttttatggacgcgtattgtccggaagcggtaattatccttttgccatcattaatatggtggggggaaccataccggggcgctatatgccacagcagataccgtttacgggcatcaaccgtgcggaactgtcacaagccgcactgctggttgcagggctgaacctcagacagcgtatcttgaaaaaccagtatatatcagtgatgggcagttatgggcgaaactccgggaagtttcatcagattcttgactcttccaaatcggctgatatggcaggggtaggcatcggctatatgtacaagagttttctgggaccagtggagatacagttgaactggtctaatcagacgaagaaactagggtggtatgctgggttcggattcgtattctaacgaggatatatcaaaatattacatggattttattttcagacaaaagaacagaagaacaagagaaaaatatattcttttgttcttctgcctaaaacttaccccaatctgtatgattctgcggtgagttatgatactttcattatttattcagcttccattcgcttccgtccttaccgtctttaatctcgaaaccgagtgcggtgagttcattacggattttgtcggatgtggcccaatctttgttggcttttgcctttgaacgctcttccaatagcatgtccactactttgccgaaggcggcttcacgctcttcgttggaggcgttgtcttcttgtaatcctaagatgtcgaagcagaagaggtggaaggtttccttcaattctttcaggtcttcggctgtgatggaatcgtttccagccaggatattgtttaccatcttggcgccgtcgaagaggtgggcgatgacaatcggtgagttcaagtcatcattcatggcttcgtaacacttggcacgcagggatttcacatctatggtggaggttgcagcaggggtaatcttgtccagtccatgtacagcatccatcagccttgccaatcccttttcggcggcttgcagcgcttcgttgctgaagtctaccgtactgcggtagtgggcttgcagggtgaagaatcggatggtcattgggctgtaggcttgctccagcatggggtgcgtacctttgaagagctcttccaatgtgatgaagttaccgtaagacttacccattttctgtccattcacggtcagcatgttgttgtgcatccaataatgtaccatatcttctccttgggaagctacggattgtgcaatctcgcattcgtgatgcgggaagataaggtccataccgccaccatgaatgtcgaagtgctcgcccaagtatttctttcccatggctgtacattcggcgtgccagccggggaagccgtcgctccacggggaaggccaacgcatgatgtgttccggttgcgcacatttccagagagcaaagtctgcgggattgtgcttctcgctctgtccgtccagttcgcgggtggtgttgagaacatcatccaggttgcgtccggagagcttgccgtagtgatggtccttgttgtatttttctacatcgaaataaacggaaccttcactttcataggcatatccgtttttcaatatctcctttacaagttctatctgttcgatgatgtggccgctggcatgtggctcgatactgggagacagcacattcaatgcatccatcgccttatgatagcggttgatgtagtactgtgccacttccattggttccagttgttccagacgggcttttttcgcaatcttgtcttcaccttcgtcggcatcgtgctccagatggcccacgtcggtaatgttgcggacatagcgcaccttgtagccgatgtgcgtcaggtagcggaacagcaggtcgaaagtgatggcagggcgtgcatgtcccaagtgcgggtcaccgtacacggtcggtccgcagacatacatgcctacatgcggtgcatgcagcggtacgaacagctctttttttctatttaaagtgttgtaaatggtcagttgatgttccataacagttgattattagttcttttaggagtacaaaggtataataaatctgtgaaaatctataatgatattctgttttataagagtaaatgcaacggatttcaccttcgtttattacttttgtatccatgaagtcagataaacgtgtattgcttggcatgagtggcggcacggatagctccgtggccgccatgaggttgcaggaagccggttatgaggtgactggcgtgactttccgtttctatgaggcaggagatgagactgggtatctggaagatgcacgggctttggccctgaagctggggatgaaacacattacctatgatgcacgcgagcttttccgttcgcgtattatccgctattttgtggaagagtatctaagggggcgcactcccgttccttgcacggtctgcaataatgagctgaagtgggtgctgttggctaaaatagccgatgaaaagggaatttattggatttctaccggacattatgtgcgcaaggtcttgtccggagcaaagtattatatagctcctgccgcggataaggacaaagaccagactttctttctatggggattgaagcaggacatcctgcagcgtatgttgcttccgatgggagatattacgaaaaatgaggcgcgctcgtatgcggcggagcgtggtttcgagcaagtggctgcaaagaaagacagtatgggggtgtgcttttgccctttggattaccgttcctttttgaagcgtgaggttcctgaaacactattatccggtaaaggtagattcgtcgatgaaaagggggatttcttgggatggcatgagggctatccgttttataccgtagggcaacgtaggggcttaggtatccatctgaacaaggctgtttttgtgaaagagacaagagtggaaagcaatgaagttgttcttgctccactatcttccctctacaagcaggaaatgtggctgggagagtggaacctggtggagaacagccgcgtgctgggtgcagacgaggttattgtgaagatacgctaccgtaagcaggcaaaccactgcaaggtaagtcttacagtggagggactactgcatgtccgcttgatagagccgctcgaatctattgcgccagggcaggcagcggctttttatgatgaaagcggtctgctgctgggcggtggaattattttgtgataaaatctgcttttatattttgttatttattaagcttcagcatttcttctatgtattcccttgtgttgctgagtcggggtactttatgttgtccaccgagtttccccttgctatccagccaatcgtggaagaggttgggacgggcgacgatgatttccagtggttgcagtgccaggttattctgtcttttagcttcatagtcggagtttacctctttcagggtgtcgtccaatactttggcgaacttctccaggctgtccggcatttgtgcaaattctatcagccactggtggcggcatttagcattccggtccataaagactggggcggcagaataatctatgacccgtgcatcggtttcggcacatgctctggcaagtcctctttccgcattgtccacaatcagctcctcgccgaatgcgttgataaagtgcttggtacgtccggtgatgacgaacttatagggattcttcgatgtaaacttcactgtatccccaatcatatatcgccataaaccggcagaagtggagattaccatggcgtagttcttgttcagttccacctcttcgaggcagaaggtacgcggattctccttgcctacatcttccagcgggatgaactcgtaaaatataccgtagtcaatcatcagtaacatggcaggatcggtagggtcgttctgagttccgaagtagccttcggatgcattgtaagtctctacataatgcatcttgctgctgcggaccacgtctttgtattgctcgcggtaaggagtgaaggcaacgccgccgtggaagaacacctccagattgggccatatctcctcaaggctctgctttcctgtcttttccaatatatgtttgatgagtacaagcatccaggacggtacaccggaaaggttgctgacgtttgcatggatggtttcgcgggcgatggcctccattttgggctcgaagtgctccattagggccgtctgcttgctgggtacgcggacaaagtttaccagcgggttgatattttctatgaggatggcggagaggtcgcctacaagactgtggttggtgttcaggttgggagcgtggctgcctccaaggataagccctttaccggaaaagaaacgactttcgggattctgtcccagatagatggcaacggcatcccggcctcccttgtaatgcgtgtcgtgcaaggactcccggctgacgggcaggaacttgctcttgtcgttggtggtacccgatgatttggcaaaccaacgtatttccgaaggccaaagcagattctgctcaccggcacgcaggcgggttacataaggctttacttcttcgtaagtttgtatgggaaggcgcttcttgaaatcttcataagtacggatagaggtatagtcatacttctttccccattccgtatttgccgctgtccggatgagacgctgcaatacaagctgttgcaattcacctgcatggctggtgtattgttcgatttctttcagacggggagcaaaatataccttattcagaaactttgtaatattcatcgttctttgtgaaatcttattttaaaccgcaaaagtaatcttatttatcggcatctctatcttttttctcttttttttctatctttacggacctatagaacaataattcaaacaaaaatatcatgagaataggtattttgacttcagggggcgactgtcctggcatcaacgctaccattcgcggtgtatgcaaaacagctatcaaccattatggaatggaagtaattggcattcacagcggttttcaggggctgctgaccaaggatgtggagtcgtttaccgaaaagtccttatccggtttgctgaacttgggaggtacgatgctcggtacttcgcgtgagaagccctttaagaagaacggcgtgatgtccgacgtggacaaaccggcactgatagtgcggaatatcaaagagatgggacttgattgtgtggtctgcatcggtggaaacggtacgcagaagacagccgccaaactctccgctatggggctgaacatcgtatccgtgccaaaaacaatagacaatgacatttggggaaccgatttttccttcggattcgattctgccgtcagtattgctacggatgccatcgaccggctgcacagcacggccagctcgcacaaacgggtgatggtgattgaggtgatggggcacaaggcaggttggatagccttatactccggtatggcgggcggtggtgacgtgattctgattccggagattccctataatatccaccgtatcggagagacgattctgaatcggctgaagaaaggaaagccttactccatcgtggtggtggccgaaggcatacagacggacgggcggaagcgtgccgccgagtacatcgctcaagagatagagtatgagacgggtattgagacccgcgagactgtgttgggatatatccagcgtggcggctcacccacacctttcgaccgtaatctttccacacgtatgggcggacatgccacggaattgattgccaacgggcagttcgggcggatgattaccttaaagggaaatgaaatagcttctgcaccgctggaggagattgcgggtaagttaaagctggtgacggaagacaatgacttagttgtccaaggacgtcggatgggaatctgtttcggctaatctttcttgtgaggatttttcaacagcttctgccatgggattatcttctgtggcggtttctgttgaatggtttcgctctttggctgcctggacttcctccttgaaagcggcatccttaatttttttcaatgccatttgtgccgcattttgttgcgactccttcttggaataaccggtgccggtgcctgccgatatcccttcgatgcggacttcggtgtggaacatcggattgtattcttcgtcgagaaactgttcgataagctcgaatgacacttccattttgttcttctggctccattcgatgagttttgacttgaagttgacctctttgcgagacatcttgtcgaggtcgatatagtttttgaaaatcttctcttccatgaactgcttgcagcggtcgtagccctggtccagataaatggctccaatgaaggcttcgaatgcattgccgtacatatagctgttgtgggacgaggagcgggtggagtatttcaccagtttgtccagtccgatttccacggccagtttgttgagtgtttcccgctgtacaattttggaacgggtgttggtgaggaaaccttcgcggcgtccttcgaaatggcggtagacaatatctcctacaatggcgtcgaggatagcatcgcccaagaattccagccgttcgttgttgatgggacgtcctttttcggagcgcatggagatggatttatgcagcaaagcctgctgatagaccttgatgtcacgtggaaagaagccgagaattctgtaaaaacaaaaataagactctctatccttgcggaacaagagccttattttatctatttggttacgtaacacgaccttattattctgcgtatttcttgaaaatgacacacgcattatgaccaccgaatccaaaagtattggacaaagctacgttcacttcgcgcttttgtgctttgttgaacgtgaagttcaggtcatagtcgatgttttcgtcgttatcaccctcttcgtggttgatggtcggaggaacaatgccattcttgatggcgaggatgcttgcaatggattctaccgcaccggcagcgcccagcaaatgaccggtcatggattttgttgaactgatgttcaactcatacgcatgctgtccgaatacctctttgattgcttttgcttccgaaatatcacctacgggagtagatgtaccgtgaacattgatataatctacttcttcgggtttcatttctgcatcttccaacgcattcagcatcactaacttggctcccaaaccttcggggtgagaggctgtcaggtgatgagcgtcggcagacattcctacgccggcaacttccgcatagattttggcaccgcgtgccttggcgtgttccagttcctcgagaacgagacaaccgccaccttcacccatgatgaatccgtcacggcttgcgctgaacggacgggatgcagtttcgggagaatcattgcgggttgacaatgcatgcatggcattgaaaccacctacaccgcaagcggcgatggcagcttccgaaccaccggacacgataacatttgccttacccaaacggatgaggttaaacgcatcggcaatagcatttgtggaagtggcacatgcagaacaagttgcgtagttgggaccatggaaaccatacatgatggaaatttgtccggcagcaatgtccgaaatcatcttggggatgaagaacggattgaatttggggccgttttccttaccggtcagggcatagttgcccgcctcttcttcgaatgtacggatgccaccgataccggcgccgaagatgacaccgattctgtttaaatcctcattttcgacgtcaagcccagagtcacctaccgcttctttggctactgcaatggcatattgtgtgtacaagtccatcttgcgggcctctttgcggtctatatatttggtagcatcgaagccttttacttcgcatgcaaactgagtcttgaaaagcgatgcatcgaaatgagtaataggtcctgctccactaaccccattcacaagattttcccagaattcgggaacactgttgccaatgggagtaatggcgccgagacctgttactacaactctttttaattccatgttataaacgaatggataagattacttagcgtgttcttcgatgtaagatacagcatcacctacagtaccaatcttttcagcctggtcatcgggaatagagataccgaattccttttcgaattccatgataagttctacagtgtcaagagaatcagctcccaggtcgttagtgaagctagcttcgttagtaacttctgattcttctacgcctaatttatcgacgataatcgctttcactcttgatgcaatttcagacataactttaagtttttaattaataattagttttatttctttaaatttgcggtgcaaaggaatgaatatttatcattcctcgcaaatatttgatgaattaaatgcacctttttgcacatttttcacggttttgtgcagtaattggagggattatgggaaaaaatatcgcagttttagcgtcgggaagtggtacgaatgccgagaatatcatccgttatttccgggaaaaaggttcggcacgtgtggctctggttttgactaaccggcagaatgcgtttgttttagagcgtgccaaggggctgggagtgccttgtgtctggtttgccaagagcgattgggaaagtggagagcttgttttgtcgacgcttcgagagcatgatattgattttgtggtattggcaggattcctggcacgtgtgccggacaatattctgcatgcttatcccaataaaatgataaatatacatccttcgttgctgcccaagttcggtggaaagggaatgtacggcgaccgtgtgcacgaggcagtgattgcttccggcgaaaaggaaagtggtattaccatccattatacgaatgagcattatgacgaaggcggcattatctgccagcagaaatgccccgtattgccgggcgatacgccggaggagctggcgcaacgcatccaccggctggagtatgaatactatccgaaggtgatagaggagttggtggaaggcctctctcccagttatttatagaatcggttaagggagaggatggcctcgttcagcttacggttgtctatcttgtagttttccaggggattcaatgcactgtcgctgatttctatatatccggaagggtgtttttccagaatagtatgattttctacgataaaggcataattgagattgtcgcccacgatatgccagttccgtggacaagtatcggttattaaatgccccatactgtaatcggaaggcggattggttacacccagcactttattcattagggttggtgcaaaatcatagtgcgtggtacggtgatggtaggtatgtggctgttctcccggttcatataataggaaggggatatgtgtttgtaccggtgaataattactgccgtggccccaataatttttatgattctcattgaattcttgtccatggtctccggtaatgatgaccagggtattgtctagcagtttcttttcctcaagtttgtggaggacgcatcccaccagtgagtcggcttctgccacgcagttgtagtagaggttcaggaaaggagtagggtctatgtcgttgttcagtttcatatagtcggcgaactcccaggacggttggaaacgataaagcttgtccttcggcacttcatatccgtgtgccaaatcatagaagagaaaggaaaagaaaggttttgtaccgctgcccagcgtatcgagtgcttgcagataatctgctgtaatacggcagtcgcggtcataaacggtttttccttcggtatgggtacgcaagtcgggtacctttgagaaaagtattttggcaaatggcgggttgacgattgtagcactgggataaatacctatctgataattctgcttcaatagttcttctatgagcaggggctgtatgcccgatacctcaaaatcagtccagtagatggatgagagactgaagaaaagcccgaagatacttccacgtgtgccattgctgctgcttagatgggaggtgaatctgctgcaactgtcggcaaagtggctgatatgaggtgtaatgtcctggttaaaggcgcggtagttccatgagtctatggctatcagcactacattcttggggttggaatggacttcgtatttcaaagaatctatcggatagttgaggtcagcagactgctttttgttgttgaagttcattttaatgacatccttggatgagaccactcctaacttcatcatcaggcgggttgccgtaagcgggaagtaatagggcaggcagggggcgctgcgaatcactgaagtcttttgcgctacagcggcataggcatgataaaagttagagaatagtgcaaacaaaatcagagtggcaagtacaggacggaagccacagcggtgaaagcgggtataacaatggcctgcaagtattcttagcaaagtattggcggcaaatatacccactaatactcctgcaatcttcagataaagccagaagctgaatgtgaaaatctcactgttgccctctccaaccaggagattcagtacaaaaccattgatatggaacttgtaaagactgtacacactgccgtctatgtaagcaagtatattgagtaatgatacaagaataatgtgtgtgatggcggcggcttgatggcgccggacggtaatggctacgattaaggatatgatgtaaggaataagtgcccacaaggcggcatgtgagcaagcggccgttatataaaacatccagcctcccacgtccatcatggcgagccggggactgtgaatcagataaaacagaaattgtatggcaatcgtcagagttgaaattgcataaaaaataaatccttcactgagtgatttctctaactgtattttttgcattgatattgtaatgttttgcctatagtttcctctgattcggcattgatagtaaaggcgtgaggagcttatatagtgacgtcttttgtattatcgggctgtatctctaaatgtatgtgctactttgggatataagtgtaagcatctttttctcttcgtagcgggtagtctccccgcaatttttcaaattgttcgggatgtgttttcagtgcttcgctgtcccttctcgggtcatacatttgcagatatgcttctgccaggctgtcggcggtaataatcgggttccggggttgggggggagcgatgcggtagtcggctttgatgtgaaagaaacggcaaagggcatccagggacatacgggtggcattggcttttccgtcggctgaataaccggctatatggggagttccaaggaacactctatttaataaggtaagattgatatcaggctcattctcccatacatcaatgatggcatcggaaatcagtccgtcttctaaggcattcaggagcgcattggtttcaatcacctctccacgtgaggtattgataatgacgggacagcgttttaatgaccggaagaaagtatggtctgccaaatggaatgttttgtatggcccttccttatataaaggtacgtggaaggtgaggatatcacattctgctgcgagtgcttgcaaggaactgaaatcgctctctccttccttgtcttgccggggcaggtcattcttcaggacacgcatgcctagttcttgccctacttgggctattttgctacccacattgcctacgccgatgatgcctaatgtcaattcggacagttgtactcctttgagttgttgcaataatagtaaggctgattgcacgtattgagctacggatgctgaattgcatccgggggcattggtccaagcgatgcctgcttcacggcaatattccgtatctatatggtcgaagcctatggtggcggtagcaatgaagcggactttactgccttccagcaattccttgttgcagcgggtgcgggtacgtataatcagtgcatcggcatcttttaccaactccggagtgaagtctctgccgggagtataaatcacgctgtcggctattttttcgatggcttccttaataaaaggtatcttgttgtcaacaatgactctcataatgctgctgttcttttcgacgattctccatcgtgcgaagatacgactaatccgtcaaagtggctaagtaatgcccggaaaataatttggctctttccgtttttaagtttgcatttctgccctcaccgctctcactcttttcttcaacttccctattcatcggcattgcaggggtgggtgagagcaatcgaaaagggtgagggtaaattttgctctcacccgtgttttcttccgttccgcatccttctttcttctgttgcatccttttcattctttcgttttacttttggattcttcagcagcccacgttagtgagccgtgatgttcacttgagtgaactaaacagctcactagtgtggttgaattggttcataacagtgggccgatgatgaataaagtagttttcgggaaggagataaggtgtttgaaggataaaacaatgggccagtacggattgaacaatggggatgtgcccgattccgtacttggtttttgtaacagacagcaagtgattgctcatttcaagtttcgtacattgttgaatttgccagttaacaaggttttagttaacaagtttacgaaagaggttactaattccttgaagatggaattatgtgaatgaatttttagattattgaaattcaggaatagttgttgatgcattattaaaaaatgtggatgatatcttttgcttgttttataaaattgattatatttacaaaatattattaacaacttaaaatcaaatgttatgaaaaggaaagaatttattgtgcttgtaatgcttcctctatggttgttctcttgtaatcaagataatgacttgttagaaaacaactttgctgagctggctaattatgatgtgattgctggaaaagtaacttctgaatcagatgatttaggagatgaaaatgttattggtgtacttaagtttacttataagggagaaacttatgtttctgattgtgtgtttggtgatgggtttcaaataaaggatgaaactattaaacgtatctttgatgaattaaataatattcctaatgtagctatagaaataaagccggacttgtctattgaattttatgattctaaagaagaactagattatgcctatgaattgagaagacagtatcctcttacgagagcggagtttgagcccgatggctcatatataaggaattttgaattgcggctttgggatcgtgctaaagggcgtaagaaaggtggtccatatacgcatttttattcgaatggcatacaaggaaatcaatctccagctcctgtaagatatgatgaagcctatatgactagaatagggtttaataataatatttcttcttgtcaaatgtggggagaagttcatatgaccaatgtcatgggatgtctgtctggtcaatataagagcgttagagtgacattctatgatggaaattttaccggaaaaactttgacttttgatgatgttactgtgaagaaaacatattcagaaagagattattttagtggctttggatttaatgatttaacaagctcttttagcataagttattattgatatcactttgtgtacatcgtgtactgtgaataattcttttttgtaataaaaggctgttgtgtttttattgtcagttgtttttgttttaagccttttattgttcttatttgggaatgtgtacatagaacctactgactagtcggagagaatttcaggctggtcagtatttcttgaagatttgtttaccatttgaaatatttgagttgccacctcaaccttaacttgcggaaaatattaaggggctttgatttgatgtgtccttgatgatatgtaatgaaatcatccactgcctctaatacgcgagcagagttttttccatcgcggtgactttcatggtaggaagtgtatttttgaatttcttgcattagctcattcggatgagttaatgccctttctattgcgggacctacttcatcttttgtttgcacatcaagtagaaaaggtccgggatgggtgttgcggaaagttactacgggtttgtccagcatcatatattctacaatcagtgaagaactatcgcataataagatgtcgctttctctaaaggtttccagtcctttgttcactgaacggaaatctatatttgtatacttttctgccagttttatgtattgctgtcgaagaattgcatcgtccagtttaggatgaaaggtgataatccaattccattctttttctttagcaagtttttcgatgacggaagtcatttcccaagcggaagatattcctttagtaaaagtaggggcataaagtatagttggtttttctcggtggggttctgctggcagttttggattgaaaaaactgtctactttgcaccagccggtttcgtatatcttgaaatagcggtgttttttttccaaataggtgaaatagggtgtactactcttaccttgtgtacaatatatatcgaaccaaccacgtaaggtaaaatggtcgtcaattttttcaatacgtttcttcatagggtagccatgaaaaacttccacttttactccgggaaagaagtcatagacccagttaccaggaacaaatacagcaatgggattaaagcggaacacttcatcgaacgtctttagccgaatttcatgcttttctaataaatccgggcaagaatcttccaaataccaagctactatgtcaccacgccggtgtatttcttcttgcaaagggcgcaagatgctgtaagcataagttaacgaggcaaaaaaaaggtaatgttttttcattgcttttcttgttatagcttaagttgtatttaaacagtgaagaatacttgctgaaagcagttgttcgtattttgggagtaaatatagatatttgtttttaaataaactcgctatatggatgttttaagtctaaataatgaaactcatgttggcgctgttcgcctaatcggggtatggtcatataatctccatatttttgtgtaaggtacttgtcgtatttttctataccccatacttcttttccttcaaacataaactgagttggccgacctaccacttctttaggcatgattccctttagcccatcatcatagtcgcatacgaaacggctgttgtcaaagtcgtgttttgtcattaactttcgtatcttcatctggatttgggatgaagtgaatagtttacggcatattagtggaacccacgaattgattcctttaccatgtttgtaggggtcacggtgtattagatagagtaattgtttatatagcttatagtaggcgaaatggcaatgttgcgatagttttccggtgggtacgccatccaacgggaagatatctagataaacacctcctagcctagagtgcttgcgctcgataagtgtagtgctggcgtcttggattttagcaaaaggaaaagggtatttgctattgttctcggcacagaccaattcgtagggaactggcaaccattcggaggcatgcgctatcagtttgtcgtaatcggctcttggcatacctatatccaaatcatcgtcccagggaataaatcctttgtgacgtatggcgcctaataaagtgcctgccatgatgtagtatcttaattgttgttctttacatactcgatcaatagcaagcaaaatttgcaggatatggagttgtagagggcggatgtcgtatgttgccatagggttttattagtagaggtgggacggtattaactgctgtgcttggtgaaagtcttctacggtgtccagctcaattgagaaaaactgcgaggtgtccgtcgtataaaagctgtatccttgtgggattaaacgctcaaatgccccttcatagaatatgttatctaacttttcttgtcgaatcataacatccagttcttgaaaaagggcatcagtatatgctgctgacattttttcaatgcctatggattctcccattgcttgactaatggagcaggttttgctaatttcaattatcttcccttcggcgtctgctatgactttgatttcttcttctcctagtttatgcttgttgactgcaagtgtgtctgctttttcggattggagtaattccgtgataactttggggtcaaaaagaatatcactgtccaagagtaggatgtcttcttttgttgtctgcggggcagtaagccataaagagtagatgttgttggttgatgcataacgttcgttgtatatgaacgttatgttttgtagtggatagcgcttctgaaggaagtcgataatctgctgctggcgatagccggtaacaatgataaactccttgatattgttgctgataagagcgtccatagtgcgttctaaaagacaacgttttcctattttgaggaggcacttgggttgggtgtcagtcaatggacgaagacgtgaggcaattcctgcggctaagataatggctttcatcgtgtggcaatctttttgatagtatcaatgacaatacggttctgttccgggcgtcccagtgtgatacgtaaatgtgtattgatgtccggttcgttcatgaatttaattttgtagctttgttctgcaaaggccttctgtagagcctctttcaattcaatggggtatttgataaggataaaattggctacggaacgatagaccttgaaaccgggaagagaaccgatttcggcttcgtaatgtgtacggtcttcgttcatcatgtgtgcgatgttacgatagtgtgtatctgattttaaagcggcaatggccaaatcctcggatatacgattgtagccgagatatttattgctgtatttaatgaatcgttccaactctttgctgatgaagccgaagcccatacgtaatcccggcaatccatagaatttggaaagggtgcgtgagataatgagatttggatatttgttaattaatttgcggatataagaggcatcggctgaaacaaaagaagcatatgcttcgtctaccactactgtggtatatgctggaatgtctgccaataatgtatcgagttcttcgggtgtcagtccattgccggtaggattattgggagaagcgattaagatgactttaggcttttcgtgttctaccatctcttttattgtatgaaaatcatacttaaaagtatctccatcctcataaagtggatattgcagagcgcgcccacttacttcatcggcaattgatttatagtaccaccaggaaaacttggggattaatatggttttgttcgttttgtcttcggtcaggaagtagtgtacggcttgtttcagaatgtcttcgcctccatagccgagtaggatttgggattcttctatattataaagttctgataagaaaacggatagtatactttttttcccttcgtcatagatacgggtataaaagcaaagttttttcacatcgaagttttttaaagcttctaccacttcctcggatggctgaaagttgaactcattacgatctaaaaagtttgattcgtttttcatactattttttgtattatttcttaggcttttaatacctctctttaaaattttacaaagataaagatattatttaggagtggcaagaaaatgggatataactgataatatacattagtaggcaatgttatatggtatcttttttacagtctggtttgttttttcgttgttaacgcttacttttgtgccgaatcagcaattctaataaatttgttatgaccaaattcttaattatccgtttcagttcgataggggatattatccagtgtatgggaattatcggtggaatacgtgaacggtttgcagatgtggaaattcattggattacccggaaagatatggtggggaccttgtcgatggatggcaggattgataaaatctgggcgtttgacaaggagaccggacttgccggattgttgaaaatggcggctgatttgagaaaagagcatttcgactacatttatgacgctcatagtaatatccgttccaacatattgaagctgatagtgtctccattgccttttgtgaaaccttacgttgctctgcggagcaaagagagaggcaaacgctttttgttgttcaaactgggaatcaaccatttcgacaagcctttcagggggatggtgtcttttcagaaaccattgaagaaatggggaattacgcattttccggacaactatcacgactggcatttctcggatgaaatacgtagcaagtatgagaactttgtaaccaaagatatgattacgctggtgccgtctgccaactgggaaatgaaacgctggcccgtttcctgttggaaagaattggttgcccttcttcctgagtatagatttgttattctggctggtccgaaggatactttctgtgaggaaatcagaagtgctgcaccggaacgggtagttaaccttgcgggacaaacctcattgatggagtcttcttacatagtgttgcgttccaatctggtaatcagcgctgatacgggttttatgcatgccgctgatttgttccgtgttcctgcttttgccttgatggggcctacagccttcggtttccctacgggacctacggtggaaatactcgaaacagccctgccttgccgtccgtgcaccaaagacggacggggtaaatgcaagctggctgtttatcagaagtgtatggtggatattaccccccaacaagtcgctgaaaagattattgcttctcttggttgatggcgcctatcgtctttgtagtggaataaccgtctacgaaagggatagttactgtttcttgggcgtactccctgcctacaatgttttctatggcatagtcgccaccttttaccaacacgtccggtgcaactgtcttgatgagattcagaggggtgtcttccgtaaaaatcactacgtagtccactgcttccaaggctgccaggactgtggagcgggcgttttcatcattgatggggcgcgattcccctttcagacgttttactgagctgtccgaattcaatcctacgataagtacgtcccccagtcttttggccttttccagatagcatacgtgtcctttgtgcagaatgtcgaagcagccgtttgtgaatacgattttgcgctcctgcgcacgcagttgttttatagtatctgcaagttggggaataggaataagtttgctggccggtttcccgatttgtagctcgtcctgcaactctttgaacagaatggggctggtgcctattttcccgactacaatgccggccgctttattggcaagataaatggcatctgcaatagggataccggctgccagcgcagctgctaaagttgccacgacagtatcgcctgcacctgaaacgtcatatacttcccttgcttcggtaggaatgtcttgtgagacttccggagctatatatgacatccctttttcggaacgtgtcactaatagagaagtaaggttatactccttcagtatccggtctgctgcgctatggatttctttatcctcatttctcacatccactcccgaaacagccgaaagctctttcaggttgggggtgatgatggttgcggaacggtatttctcccaatttgtccctttggggtctataatgaccttcttcccttgcccggcagaggcggatataacctgctggcatactgtatcattgcatactcccttgccataatccgaaatcacgacaatgtccacttcggggagtgcacgcttcacggcatccagcagtttctgctcagtctcttcgttcaggcattcattttctgtttcaaagtccagccgtactacttgctggctgttgcctattacgcgggttttggtgatggttgggtgttctgtatgaaacagttcgtttctgatacccaaatcagcgaacatctcctgcattgtgtttccgttgtggtcgttgccaagcaggctgacgacatacggcgagcaacccagtcccaacaaatttcttgcaacattggccgctcctcccaatacattgtaggtacgggtgacacggaccactggtacgggggcttcgggagaaatccttttcacgtcccctatatggtaagtatccagcatcacgtctccgataacgagtaccttctttccctttatactgtttaattctgtattcataataggttgttttttaattggttggcccaatatagaagtgaatgctcagaggtgacccggaaggacttgacaccacttctttcgccgcattccgtatccgatttcttatctccgaacatataggattgggatgggtcgatttcatatttcttcatcgcttccgtcaccatgaaaggagaaggcttacggcattcgcaatgttcttccggagcgtgagggcaagtatagaaatcgttcagtataactccatgtttttccagctcttgggcgagtgctcggttgaactgttcggcgtcctccagtgtaaagtagccacgtccaataccggattggttcgtgatgacaatcagcagataacccaattcttgaaaaatacggagtgcttcggctacaccgggcaataattcaagctcttgggtcttataaacgtagccgaaatcaacattgatggtaccgtcccgatcaaggaaaatcgctttattcatgggagaacagtttattgtcaacgatgccgcacaagatatgtccgatggtaatgtgcacttcttgaatcctggcagattcggcgtgctgtataatcaacgggtaattgcaaagttccttgcaccttcctccatcccttcccaggagccctatggtggtgatgcccatagattgtgccttctgcaaggcatgctctacgttgggagagttgccgctggtagaaaggcctatcagaatatcacctttcgttcccaaggctgctgtctgccgttcgaagacgcgttcgaagccataatcattgctgactgcggtcaggatggaagtgtcggttgtcatggcgatggcgggcaggccttcccgttcggtcacgaaacgtccgacgagttcggcagcgatatgctgggcatcggctgcactgccaccgttaccgcaaagcaagactttgtgcccttgtcgaagggcttgtactatcagattgccgacagtttcaatgtcggcaagcatttgccggttgttcaggatattttctttgagcctgataccttcttggatggactgggtgatataatcttgcataattttctaatctcgttggtacaaagatacgacatttcagaaatgaagcttgcttttgacgaaattttttaattgtctttgctttctccatttcagtctgctgaagagagtgaagaatatgcattcttcaatatcgaatcctctttgctcggcatatagaggtattattttcatgaagtcatcggcgggaatacccagttggctgaaggcattcatggacattctgataccgggcactttaccgagcttcaggcggttgatgtcaatgagggcgaagtgatatttgccgtttgtcttccggtaaaatatattcttgggattatagtccagaggcaagaccttgttcagatgtaattggagagtgaagtctacgaggtcatgtcttagccgttttttctcttcttcctccatttccgtaccgagcatatccgttacaagcgggtaggggaggtattcggaaataaagtatccggtgtggaagaaaccattctttttgatttctatataagctaccggaggggcggtctctattccccgttgcagaaaaagttctgcatattcaaaggcgcgctgcgctttgcttttgcgaaaccaagtgtaaatgaggcagtttatgagggcaggccttttgtatttcttgattacgaagtccttgtctccgaaccgcactctttcgactgtgtttcttcggttacaataaacctcttcccgttcatattcttccgatgggatggctcggatataactctcgtaggcggcataatgcggatgaatatgtaccttcattgtttttatttacattttacttcttttgaacggtgcaaagatagtgcaaaccgaaagcagaacaaaatgaacttgttcattttttattttgaggtgccgcctatcttcgcttttgagcaaagataatcaaaatgtatcatctggtcggaaatatcgtatgcttttttggcgaactcggcttccgccggggtgggctcttcacctaccacctccatttgggggctgatggcgaaccctttcttgcatgggtcgaggatactttggcccaatccgctccagtagtaatcatccagttggagcaggttcagcagggtggggtacatgtcgatttgtcccatcactttatcataacgcatgcctaccggagaatttactatgatgaaaggggtgaatgtcttgtcggatacgatgcccttgccaccgggggcgttacacaattcttcacggtaggtagccagtccttcgtggtcaccggtgatgacgataagggtctcgtcgtattgtgggagtgttttcaagtactccacgaattttcctatcgccttgtccgtatagcgtgcagtggtcatgtagtcattcattttctgtggaatggccggagagaaatgaatctctttcaattcttctggcaatttgaagggagcatggccggagtaggtcaccagctgcatgtaaacattctcccccttcttccagatttcccccttctctattttttggcggcattgcgccaggaaggagccgtctccggtacgtttgtgcgtgccaaaggcttctgtcagttcaaagtcatgataagcaatgatggtgtcggtcccgaaactgtaggctatgacgccttggttccaggtcgatactttatcaatggtcaggaggtagttgcgcgagttcttctgctgatgcatggctttttgcagggttccgtaggtgtggtcaggatattggctgctgtatgtgccgctgttgataggcagcataccggcgcaaagcaacagctgtgcatcaatggaacgtcctcctttcacttgcgtcagtacgtggggggcgtatagggtggtggagtcttgcagcagtttgttgagatatggggtaatctcttgcccttccacttccctttcgagtacccagctttccaaagattctgccaggatgacgatgcagttgttgcggattccgatacgtccggccaaagggtgatgtccgggtttctggctcagccactcctttatctcttgctgtatctgtggggtggcctcctgcttctggttgatgaggtcatagcataggcttccgaagacggtatacatggaagtggtgcttgcacacagataggctttctggcggacggtgttgtatgcttccttgaatcctcctttggccagggtggtgatggcaaacagcaggataccgattcccaaagcccctccgtaatacttgtatgatgttcttccggcggtatttcttttgtaatgccaataaagggggatactggcaatggtagatagagggaagaagatgtcgtaccagcggaaagagtcataaacgcttccggtgaaatcggctaggtttccagaaagtccatagctgttaagtggaatggcagtatagtaggtgcggaaatacatcaggttgacaatcagtagtatatccagcaaaagcatgatgactatctctgttttccagaaccggaagaacttataggggacgagaagtacgagggtggctattattttggtcgcataaaattcgatggtagagaatgaagcgaatgtggtgggtatgctccagatgaaatcgaatagcaggaatttgaaaaaaatggtgattccgaataaaagagtcactttatctgttgctccttgttggctgttggagcaatgaaaaagatttcttctcataaaatagtacttttaaaatagtggggtgcaaagatagatattttagagaagaaaaagcttcataaacagcaacttttggagaaaagttgataaaagtcattttttttctggattgatgcagtatatgcagaattcttgtatttactttgcagacgtttaaagcaaagaaagcaaaactgttacaaactaagggctgaattttattgttctattggtaaaatgaggtgacgattgtgtcgttgccgtgatattttgagtgtatgaagaagcattatttatttttcgtttcggtagcctattcctatcctatacttcgcccgcttcaggacgaaatcaggcgtagaggggatgatgttgcatggtttatcgagtcagactgcccggttctgttggcccaggatgagaggtggcttcaatccgtccaggaagtgatggattatcagcctattgctgtttttgcaccgggcaattatatttatgatttcttcccgggagtgaaagtctcccttttccatggctaccccatcaataagcgtggcgatgaaaaggatgaccatttttctgttcgcggatggttcgatgtctattgcacacaaggagaaacgagcactcttcccttcaaggagcttgagaggaaatacggcttctttaaggtatatgaaactggctggtgcaaggcggatactttcgtgaaggaacgtgcacatactcctcataatgcacgtccggtagtcttgtactcttctacgtttaccaaaaatataacttctgctcctcatctgtttgataccatcaagagactggtacgcgagaagaactgggattggataatttcgttccatccgaaattttcggatatggaagtcctcaagaaatacaaggaactggccgcttcctaccccaatattactttccacgagagtggacttgttgatgccaagctgctgaacagtgcggatgtgttgttgtccgatgcttcgtctgtgattgttgaggcgatgatgttggacaagccggttgtgacctattgtaacaccatgccaggggatcatttgctgaatgtcactgaaacggatgctgtagagggagccattgaaaaagccatttcccgtccggcagagctgatggagcggatgcgtgcttatgtgcacaagcatgaagcccatctggacggtgaatcctcttcacgggtactggatgccgtaaacaactacatctggtattttcaaggtaagaccagaaccaagccttggaatctggtacgtaagtttaaattgcgatggcgggtgggctatccgttgatggccactttgcggttgtggtaattgtcatagcttatggagaacactgagacactacctctgataagtattattgtaccggtctataatgtaaagaattacttggagaaatgcctgcaatccatttgcgggcagacttataagaatctggaaataatattgattgacgacggctcttccgatggttcgggagagctttgtgatttatttgcccaaagggatggacggataaaggttatccatcaggcaaatgcaggtcagagtgcagctaggaatagaggtttggcggtagctcaaggtgaattccttggtttcgtggatagcgacgactggattgaaccggatatgtacgaattcttgtatcacttactgaaagagaatggggcggatatatccatttgctcgcattatatagaaactgccgtaaagaccagagtgaagcactcttctgggcaattctccagcttttctcgtgaagaagctatccgaacattggtagaagataagcgtataagaaattatatgtgggataagttgtataagcgtcaattatttgctggaatatattttccggtaaatagagtttttgaagatattgcagtttcttatcagatattttataaaacgcagaaagtcgttatgcaagactgtcctaaatatcattatttgaaacgtgaaggaagtactactcaaggtaaattgtacaattacgaaaaggaatatctgctctttcaaactgtctatgaacaagtgaaatttgtgcgagaaaaagaaatatgggataaagctccttattgtgtacatgaacggggaattcatttgattgaccatttgatgatgcttcctcaatcttctttgatagatgatgttatcaatgatgtattagccagaatgcaggagtttgataatgtgtcgtggccgcaattgggtgttatgcatatatttaagcgccgtatgatgtattgtcatctaaaggtttatagatgtatttaccgtttagtgaggacattcttcaaatctaaacggtataaattccaaacattataactttaattgaatctcaataatgaataaagcaagggttatagctttttatctacctcaatttcatccaataccagaaaacgacagatggtggatgaaaggttttacggaatggactaatgtaggaaaggcacgtccattgtttcctggacattatcaacctaaggtgccggcagatttgggatattatgatttgcgagtgccggaaacacgtaaagcgcaagctgatatggcaaaagaatatggtatcgaaggcttttgttactggcattattggtttggaaatggaaagagactcttagagcgtccgtttaatgaagtattgtcttctgatgaaccggattttcctttttgtctggcttgggctaatgagtcatggaggggcttttatcacggcataaagagcaaagatactttgataaatcagctttatccgggagaacaagattatatagctcatttccacgaggtattacctgcttttaaagaccatcgctatattacagtggatgagaaaccgttgtttatggtttatcatcctttggatcatccggagatgaaagagttcattgaactctggcgtactttagctgtgcagaatggcttgaagggggtttatttcataggacaaacctatcatttgaaagaagaaaaagagagacttatgaaaatggggtttgatgctattaatgttgtacgcttgtttgactttgagaagaaagctgctctgacttataaatatgcgaaatggaaacataaaatatttcgtattcctaaggttgtggagtataagaaggccagttctttctttgtgggtgatgaagaatatgaagagaatattatacctaccattattcctaactgggatcattctccacgttcccgtggtaaatcgttggtcttgaatcacgctgaaccttcttattttgcccgacatatgaaagaagcaataaagcgtattgagaataagcctttagaccatcggcttgcatttgtaaaatcatggaatgagtgggctgaagggaactatctggaaccggatttacattatggaaaacgttatctggaagtgataaaaaagaatgttgtagagggatgatttctatggaagaaaagatagcaattgttattccggcatataagtgccgcttcctccggcagactttggattctattgtcgtacagacttgtcggaattttactgtttacataggtgatgatgcaagtcctcagaatctgaaggaaattgtttctgattatgcggataaaatgaatattgtctatcgacgttttgatactaatctgggtggagtggatttgccggggcattgggaccgttgtatagcacttgcaaaagaaccggttatttggttcttttcagatgatgatttgatgccgcaggacggggtagagcgtattataaaagcattagaatgctatggtacgaggcatgggatgttccgttttccccttgctgtgatagatgaaaatggcaagataatacataaaaatccttcattgcaggaatatccggtttcgggctatcagtttttgttggataaattggaaggaagaatttattcggctgcttgtgaatatgtttttactcgtgatatatatgaacggataggcggttttgtgaagtttccattggcgtggtgttcagacgatgcaacgtggacaagcataggtgaaaatgcaggtggaatgattcctttgccgggtaagccggtttgttggcgaaatgtgatgggcgagaatataagttgttccttcaattatgatgaagagaagatagtagctacaaggcaatttataaaatgggtttcagttttttactcggacagacttcaagatagaaaactacagcatgcgataaagaaatatgcccatacgatattgcattacagtttgcaagatcgttataaattacatgatcttatgggtatttgtcgtagtttatggtatatttgcccttctgtatcattaagtgtggcattccgcatgtgtaagttgaaacttagaaatcgaaagagataatgaagaaaattctttttatacttccttgtgtgccttatccgttgactgctggaggtaatcaggcctttttcaatatggtggaatatatccggcacaaaatgtctgtgtctttgttgctttcgccgggaaataaggagatgaatgatgtcgaaagtttaagggctttatggacaaatgttgatttctatctttttagggaagaagatgcagaacctaagactcgttgcccccgatattaccgttggttaaaaaagatgtctgaatccatttcccgcaagatgcaacggcaactgtattcttttcagcaagagcatccgtataagaatatgacgttgaagaattcttgttttaaaccttttcccaaggcatacgtagagtatgtgtctgacatctcacgtcgtggatttgatattattcaggttgagttctatccattgataaccttggggtatctattgccaaaagatgtacaaacagtgtttgtgcatcatgaactgaggtatatacgtaatgaaaatgaaatggaatgccttactcatgtaacagatgaagacaagatgctctatggtattgctaaggatatggagaaagccgctttacgtcaatataagcatgtaattgcattgacggatattgaccgtttattgttggcagacttggttggacaagaatgcaatatttatgtttctccggcagtggtacagatagagtctgtttatgacagaattgtgaagccggcctctgttcgtctgacatttgttggaagtgaaaatcattacccgaaccaggatgcagtagattggttttgtcatgaagtagccccttgtttgcgtgctcagggttttaaatttgtttttcaagtgattgggacatggaagagccgttacgtgaaaagtcttcaggcagtatgtccggaaatggagttagtgggttatgtggaggatttgcaggaatacttgaatggaagcatcgttctggtgccaattcgtattggtagtggtatgaggatgaaaatattggatgcggtttcctctatggcttcttttgtaactacgacaaaaggagttgagggaattgacctacgtcacaatgaagagtgtttgattgctgatagcgcaactgattttgcagcagcagtcattcgtttggaggcggataaaaaattgcaagtcaggctggcgacgcaagcattgaagcgtttgcgtgaactttataatcctcaggaaatgttggagagaagactggctgtttatgatgagatattgcaaaataatacaaactaatagcatcagattatgctttcaatcataatttgttcggtatctcccgaacgtttggagcaagtaacccggaatattcatgatactattggtgttgattatgaaatcattgctattgataatcgtgaaaaacaatggccgatagcacgtgcgtataatgaggagcttctcgggcacattatccctttctgtttttgttcatgaggatgtaaagtttcattcggtaggctggggaaagtgcattgagaagaaacttaaggaaccggattgtggtataatttaagtattgtgacataaatagactatataaaatttgactgttatgaatggaaataagattaccttttggagacgtaaatttttgtcatttatatatgagaagaagattcgtggaaatggtatatacactattgaaaaatatagaatactgaaagtaactttgcttaaaaaggtgatttcttatgatgaagttaattttacatatttaaaattccttcattttactaggaaagtttcagaaaaagaactattgtttaaagtgaataatcgttgttttgatgttcttgatattcctttggctcaggatagtttacctttagttagtattattgttccaaattataatcatgctctatatttaagagaacgtttggattcaatttatagccaaacgtataaaaagtttgaggtaattctattggatgatgcatcttctgataatagtgttgaaatattgactgaatatgctcagaaatatccacaaaaaacccgtttaatagtcaatgagaagaattcgggaaaagtttttgctcaatggaataagggattgagtttggccaaaggagagtatatatggatagctgaaagtgatgattattgtgataaaggttttttaaaagaagtacttttagggttgcgccaccaatcggtaatgctttcctttgcaaggagtgtattcatgaaagatggtaaaaaaatatggtcaatagagagatatctaaaggattcgtcaatatcttggaatgctccttttgttatgtcggctcacatgcttgtgaataaggcttttgggattaaaaatgtagtcccaaatgtcagtagtgcggtttttagaaatgtgggtactatacctgatgagattactgctatctggaaagatatgtccttatgtggtgattggttattttatctatggttgattcgaggaggagctgtcagctatactaataaagtgaccaattattatagaatacatgagaatagtacttcattgaaagttcaagatacattggattattatattgaaacttttcgtgtttcttgttttgtagcccagaactatgcagtagatttatcgatttttgatactgttaagaataacttagtacgacattgtatagatagaaaacatgaaaacaaggtagaggaggttgagagaatatacgatcttaatcagataaaagagtgtgcaaaatgtcggcgtccgaatgttgctatttgcggctattctttaattcaaggtgggggagaggtatttcccatttatttggcaaatgaattgaaaaagcaggggatagcagtaacttttgttgattttagaagagcaaattatgacgaaggaatcaggaaaaaactggatagagatataccattaatcgaacttagtgacgttaaattctttaatggtgtaatttctgctcttggaacggagatcgttcatactcatgaagggactgtggattactttgtagctcgcgttataaggaataaggaaggtgcttgtaagcatattattacacttcatggtatgtatgaagctatttctaaaaagaacttggatggaatattggagtttgtgatcccaagctgttcttgttttgtatatattgctgataaaaacttgcttccgtttaaggggctatttcaaaacttgcaatttcggaaaataggaaatgggcttccgcaaatacctattgttccccacaaaagacttgagttgggtattgaagaaaatgctttttgtttgacattggttagtagagctatttttgagaaaggctggatagaagcgatagaggctgtaaaaatagcaaggaggaagtcagagcgaccgattcatttgatattgattggggaaggagaatgttatgactttttaaaaggtaaaaaccttccttcttatattcatttgctgggacgcaaaagtgatgtcaggaattattttgctatgtctgatgtgggattgttaccttctcggttcaagggtgagagtttccctttagttgtgatagaaagtttgatgagtggttctccagtcgtggcgagtgatataggagaagttcgtaatatgttggctgatgaagctggtaatatggctggtatgttatttaaacttagggagggtgaaataccagttgatgaattggcgcagattattttgcttttggctacagataatgaaaagtacatgcagttgaagaggcggactagtgaggttactaaaaaaatgaatattactcatactgcagaacggtatattggtgtgtataatgaagccttgaatactttgccaaaggaatgaagttgtagtagtaagcctatgatagaagcattttgactgctttatatgattaattgttataactaaagatggagaaaaaactggcaataattatacctgcttataaagctcgttttttgagagaaactctggattcaatacttaagcagaatagttcagaatttattgtatatgtgggtgatgatgcgagtccggagaatatagaagggcttgtccatgattatgatgagaagttagatattgtttaccatcggtttagtacgaatcttggaggcgtagatttgcctgggcagtgggatagatgtattgctttatccaatgagccgttggtttggcttttttctgatgatgatataatgccgtttgatggggttaaaagagtaatgcaggctgttgagaaatatggagataagctggtgtgtatgcgtttccctttaatggtaatagatgcttgtggtaacatgaaatatcagaatcctccttttgaaacggaacggatttctggatatgagtttttattggataagttatcaggaaagattagttcggctgcttgtgagtatgtttttagccgtgatgtttggaaacaaataaaaggttttgtgaagtttccgtttgcatggtgttcggatgatgctacttgggcaagttttgccgatttaacagaaggaattatttctctacctgggagggctgtgtgttggcgaaatgtagaaggtgagaatattagtaattctgtaggttttgataaggaaaagcttagagcaacaggccttttttttaattggataaacagacattatccttgcaatcttagagatgctagattgagaaaagctttagaagcttatactcatacgattttgtcttgctcagttcgtggtaacttcagtttgtgtgatcttgtccgtttatgttatgctcttggtaaaatagattatgttgccgctttacacgtggcgtatcgccatttgttgaaaaaatgagtttttgagaaaatatgaaaaagatactttttataattccctatattccatatcctttagattcaggaggtaatcaggccttttttaatatggttaattatatccgtaatcgaatgtcggtgtcaattttgctttgctcaaaatccgaagaacatgataaaaatatagtggccctgaaaaaattgtgggcaaatgtagatttttttgtatataaatggcctaaaaagaaatctgtacatattgaagtccgtaatccattatattacaatgttttgaaaagagtgaaggcttctgtggagcgcaaaatgagaaggcagattgtgaatatgggggtagatatggaatcaggtttagatccagttcgcgagaattctgctcttttaagatcggtttttgagccccttgaatctggatatgctcaatatatttgtcaggttataaagcaaggatatgatattattcaggttgaatttatgaattgatttctgtaggatatttattgccggaaaatgtacaaacgatttttgtgcatcatgaattaagatatgtccgtaatgctaatgaaatgtctttgtttgaagagatgacagatgaagatcgcatgcttttctctgtggcaaaggactatgagcgagctgccttgctaaaatataagcatgtaattgctttgactgaagtagacagacaactgctgattgattttcttggtcgtaaagaacgtatttatgcttctccagcggtggtgcagatgtcagatacttctattgaagaatttactccggcaattactcatagattaacgtttgttggaagtggagatcattatccgaacttagatgcgattacttggttttgcaaagaggtggctccttatttgcataagcaaggattctcttttgattttagggttgcaggacggtgggattgctctcatatagtaagactttcttctgtttgtccagaaataaaatttgtaggttatgtggaggatttgagtgattttcttaaaggtagtattgctcttgttcctatacgcatcggtagtgggttgagaatgaaaatattagatgctgtatctttgggcattccttttgttactacttctaaaggagtagaggggattagttttaatgataatgaagagtgtttaaaggcggatacagctatggattttgcagatgcgattattaggttggctaatgatagtaacatgcagtgtagacttgttttacaagctaaacgtaaattagaagatttatatgattggaaaaagatgttagaacagcgtatagctatttattctcatattctgaatttttaaaatttttattttgagtatttaggtattttcgtgtaatttagcaatttaattataatcaaaacttatggtaaaacagtttttctctttgatgaagcgatatatcatgccgtatcgcaagtatttaacgtgggcattgatactgaatttcctttctcaatggctgaacgttttttcttttatggctattattcctattttaaacatattgtttaagattgacactaaagtgtatgaatatatgcccatggactggggaaactttgacaaagatgttcttattaataatgcttattattggatcagtaattttgttttggaacatggcgcttttcttacacttgttatgatgggatgtatattggtttttatgacgttattgaagactgcaggttacttcgcttcttctgcaattatggtccctcttcgtacaggtattgttcgtgatatccgtattcaagtatataataaagtattggagttgcctcttagtttcttttctgaggagcgtaaaggggatattattgctcgtatgagtgcggatgttactgttgttgagaattctttaaccagttccattgacatgttaattcgtaatccgatagctcttttggtttgctttgtcactttgtttactgtaagttgggagatgactttgtttgtccttataattcttccattggctggatggctcatgggaataatcagccgtaaattgaaaagacaatcatcagcggcacaagcccaatggggagatataatgtctcaattggacgaaaccttgggaggattacgtgtgattaaagcttttcttgcagaaaagaaaatgtctgcgcgttttgcaaagaccaataatgaatttagaaatgctgtgaatgaaatggtaatccgtcagagttcagctcatccgatgagtgaatttttgggtacttgtatcatcgttatcgtattgctgtttggtggttcattgattttgagtaatacttattctcccatggatgcagccacttttattttctatttagttattctttatagtatcattaatcccttaaaagagttctctaaggctttttataatatacctttagggcttggcagtatggaacgtattgacatgatattaaaggctgagagccatataaaagatcctatgcagcccttatcattaaatggctttgagaataaattggaatttcgtgatgtaagtttcagttatatagagggaagaccagttttgaaacatattaatttgacggttcataaaggtaagactattgctctggtaggacagtcaggatcaggaaaatccactttagtagatttggttcctcgttatcatgatgtcacagaaggagccttattgatagatggtaagaatgtgaaggatgtttccataagcagtttaaggtcattaataggcaatgtgaatcaggaagctattctgtttaatgatactttttttaataatattacatttggtgtcgagaatgctacgatggagcaggttgttgaagctgcaaagatagctaatgcacatgattttattatggaaactgagaaaggatatgatactatgattggtgaccgtggtgggcgtttgtctggtgggcaaagacaacgtgtcagtatagcgcgtgcgattttgaagaatcctcctattttgattttggatgaggccacttctgcacttgatacagagagtgaacgtttggtgcaagaagctttggaacgtttgatgaaatcacgtactaccattgccattgcccaccgtttgtctacaatcaaaaatgcagatgagatatgcgtactttatgaaggtgaaattgtggaacgtggaacgcatgatgagcttatagctcttaatggatattataagaaactgaatgatatgcagtcactttcataaatatattttgtgaggaatatatgactattgatggtcagtgattttttatgtagacagcggattagttaatagtccgctgtcgttttatatttagagataagcatcgaacttagatgtttttcattttattcttgtacctttgcaaccttataattcacttaactacaatcaatgaaggaattcctacaactgatgcggcgctttgtgtcgccttacaagagatatatcggttgggcaatcgtgctcaatgtgctgtccgctatattcaacgtcttttcatttacattgttaatccctatccttaacatccttttcaagactggggcgaataccgaggtatatcacttcatggagtggggaagcggcagcctgaaggaagtggcggtgaacaacttctactactacgtcacccagatgattgagacacacgggccgcagatgacactgctgttcatggggctcttccttgctttcatgaccatgctgaagacctcctgctacttcggttcttctgctataatggttcctttgcgtacgggagtagtacgcgatatccgtgtgatggtctattccaaagtgatgcacttgccacttggttttttctctgaagaaagaaaaggggacatcattgcacgtatgagcggtgacgtaggcgaaattgaaaactccattaccagttcactggatatgctgctcaagaatcctatcctgattctgctttatttttccactttgattgtaaccagttggcagctgaccttgtttactgtcctggtattgccgggtatgggctggctgatgggaaaggtcggcaagaagctgaaacgcaagtcgctggaagtccaggggaaatggagcgacacgatgtcgcaactggaagagacgttgggcggactgcgcatcatcaaggctttcatagccgaagacaagatggtggaccgtttcaaacaatgtagcaacgagctgcgtgatgccaccaacaaggtagccatccgtcagtcgttggcacatcctatgagcgaattcctcggtacgttgctcattgtattggttctgtggtttggtggtctgcttattttgggcgatggtacttccatggaagcttcaacgttcattttctatatggtgattctgtacagtatcatcaatccgttgaaagactttgcaaaggcaggatacaacattccaaagggtctggcatccatggaacgtgtggacaaaatactgaaagccgagaaccccattaaggaaccggtaaacccgttgccgctgcacgggatgaatgaccggattgaatttaaggacctctccttcagttacgacggcaagcgcgaagtgttgaagcacgtcaatctgatggtgcccaaaggacagaccattgcacttgtcggtcagtccggctccggcaagtcgacattggtggatttgctgccgcgctatcacgatgtgcagttgggtgagattacaattgacggtgtgaatattaagaattttcgcatccacgacttgcgtgcgttgataggaaacgtgaaccaggaggccatcctgttcaatgataccttcttcaacaacattgctttcggtgtggaaaatgcaacaattgagcaggtggttgaagctgcaaagattgccaatgcccacgatttcatcatggagaccgagctcggttatcagaccaacattggcgaccgtggcggcaagctttccggcggacagcgccagcgcatcagtattgcccgtgccatcctgaagaatccacccatcctgatactcgatgaggctacttccgcactcgacaccgaaagcgaacgcctggtgcaggaggcgctggaacggctaatgaagacccgtaccacgattgccatcgcccaccgcctttccaccatcaagaatgcggatgaaatttgtgtgctctatgaaggtgaaatcgtggaacgtggtaagcacgaggaacttctcgagaagaacggctattataagaggctgaatgatatgcagtctctctcatagaaataaagttctgcgcaccttgcttccatccgcttgtgctatgttgttatgactaaataggaagttaatccattgtaaggcaatgtattgatttcgtgtatcccttcttgttgatactttgtaaataggaagttaatttcctgcaaacagcatattaattcttctttctcttctatacttcttacgcagaatttatgatgtaggtgggtgttgatggctaccggcagagtgtttcacggctgttaggcgatgatgaataaagggcgttcttttgccttttacgcttttttaacatctgcttgcttccattctatcactaattatcctatttttgcaaagaacacatacataaacattgcaaatatcatgaaaaaattatacccaatgtctacgacaacagctactatgactattagtccaagtactcttaatcatgtaattcaattgaccccgataatactataactgtaaatatttaatattcgcctaccatgaaaataaaagttggtttgatagggttcggcagaatggggcaaatgtattgggaggaaatgcagaaaagcggtcgatgggacatcgcatatatctgtgataccgatccggcctcccgagaattggcaagaaacttttccccttcatccagaatcatatccgatgaacaagaaatctttgacgaccagagtgtagaagctgttggtctttttgcattggcaaattccagaaaagaacaaatagagaaagctgtccgaagccataagcacatcctgacggagaaacccattgccgataccattgacaaggaatgggaaattgtggacctgattgaaaagtatgaccgcattgctgctgtcaacctttatctgcgcaactcctggtatcaccaggctatgaagcagtttatcgatgaaggcgaaattggcgaactggccatcttgcgcatctgccacatgactccgggattggcgccgggcgagggacacgaatatgagggtcccgcctaccacgactgcggcatgcactacatagacattgcccgctggtatgccgacagtgaatacaagacctggcatgcgcaaggcatgcggatgtgggactacaaggacccttggtgggtacagtgccacggtacgttcgagaacggcatcgccttcgatgtcacacagggattcgtctatggacaactctccagaaaccagactcataatgcatatacggacattattggtacaaaaggtatcgtgcgcatgacgcatgatttccggactgccgtggtggagcttcatggcgtgaaccgtacgcttcgtctggagaagccgtttggcgggaagaatctggataagctatgcaatattatggctgactccatcgagagcgggaaacgcgatccgagattgccgcagatgcgagactcggccattgcttcccaatacggatggaccttcctggaggatgcgcgccgccacgacctgcctggcataggcgacttgcagacgctggaggaaattagggagcgccggaggcatatgaaggaaggttacggactgctccgtccgaagaagacggtagtctgatgcctattgtaatgagaagtgttttaaaacttaattatattaaccgattttaaaatctaaagaaccatgtcgaaatttacaagaagagagtttcttaagaccggaggtttagctttggcgggtcttaccattgctccaagcagcattttgggtaagagtcacggacacgtacctcccagtgaccgtttgaacattgctgccgtaggtatcggtggtatgggacacactaacattaatcatgtgaaggctacggaaaatatcgtggcgctgtgtgacgtagactggcgctacgcgaaaggtgtgttcgatgagcttcccaatgcgaagaagtattgggattatcgtaagatgtacgatgagatgggcaaggatatcgatgccgttatcatcgctacggccgaccatacacatgccatcatcactgctgatgccatgacgatgggcaaacatgtatattgccagaaaccgttgacgcactctgtatacgagtcccgtctgcttacccgcctggccgcttctacgggagtagttactcagatgggtaaccagggttcttcggacgaaggtaccgacttggtatgcgagtggatatggaacggcgaaatcggtgacgtgacaaaggtggaatgtgctaccgaccggcccatctggccgcaaggattgaatgttcccgagaaggaagaccgcattcccaaaactctgaactgggatttgttcaccggtcctgccaagatgaatccgtataacgaaatctatcatccctggaactggcgcggatggtgggattatggtacgggtgctttgggcgatatggcttgtcacatcctgcaccagccgttcagagctttgaagttgttgtatcctaccaaggtagaaggttcgtctacattgttgctcaatgcctgcgctccgcaagcacagcacgtgaagctgactttccccgcacgtgaaaatatgccgaaggtggctatgcccgaagtggaagttcactggtatgatggtggcatgatgcccgaccgtccgaaaggcttccccgaaggaaagcaactgatgcagagcggtggcggtctgactatcttccacggaacgaaggatacgctgatttgcggttgctacggacagaacccgtggttactttctggccgcgtgcccaatgcaccgaaggtttgccgccgtgtaccgaaggctatgaatggcggtcatgagatggactgggtacgtgcttgtaaggaaagtccttccagccgcgtaatgcctaagtctgacttctccgaagcaggaccgatgaacgaaatggtggcaatgggtgtattggccatccgtctgcagggcctgaacaagacactggaatgggacggagccaacatgcgctttaccaatattggcgacgacgagacattgcgtacagtcatcaaggacggcttcaagatacacaacggccatccaagcttcgacaagacatggacagatccggtaaatgccaaagcttttgcagaagagctcatcaagcataactaccgcgaaggctggaagttgcccgatatgcccagataaacattaaaaggggcatcagaacttgttttctgatgctcataaacgaatactaatcatttaatttttcagattatgaagaaaatatattatcctttggcttgttgccttatcggaggtatgctcgcctcttgcggtggcggtgcaaagaaatcgaacgctacggaagaagccgcagctcctactactactgcggtgtcttactccaagtctttgaaagcgcctgaaacggacagtctgaatctgccgattgatgcggacggttatattactatttttgatggaaagagcctggacggatggcgtggatacggtaaggataaagtgccttccaggtggattattgaggatggttgcctcaaattctgtggaaccggtaccggtgaaggacagaccggtgaaggtggtgacttgattttcgcccataagttcaagaattttgagttggaactggaatggaaaatttcgaaaggtggtaactccggtatcttctatctggctcaggaagttacttcaaaggataaggacggcaacgaagtgctggaacccatctatatctctgctcctgaattccaggtgttggacaacgccaatcatccggatgccaagctgggcaaggacaacaaccgtcaggctgcttccttgtatgatatgattcctgctgttccgcagaacgccaaacctttcggtgaatggaataaggccaagattatggtatacaaaggcactgtagttcacggacagaacgatgaaaatgtactggagtatcacttgtggaccaagcagtggactgatatgctccaagccagcaagttcagcgaagaaaaatggcctttggcttttgaactgttgaacaactgtggtggcgaaaaccatgaaggctttatcggtgtacaggatcatggtgatgatgtttggtaccgcaacatccgtgtaaaggttctcgactgattccttctaaaaagatagtactatgagaatcaaacatatgatgattttgtcagcactgtgtttatccatgatggccacaagctgtagcagccagagtagggaaacgacgccggaaacgacgaaaaaggaagttgccatacagctctactctgtgagagacttggtgaaagacggtagtaaccttgaccagattttgaaggacttggctgatatgggatataccagtgtggaggccgccaactacaatgacggtaagttctacggcaagactccccaggagttcaagcagatggtggaaaagagcggtatgaccgtgctttcttcgcacactacccacgggttgtcggacgaggaactggcttcgggcgactttacggaagccttgaaatggtgggatcagtgcattgctgcccataaggaggccggtatggagtatatcgtgactccgtatctctccgttcccaagacattgaaagacttgcagacctactgcgactattacaatgaggtgggcaagcgttgccaggctgccggtctgaaatacggttaccacaatcatgcccatgaattccagaaagtggaagacaaggagctgatgctggactacatgctgcaacacaccaatcccgaatatgtattcttccagatggacgtttactgggtagtacgtggccagaacagcccggtggattactttaacaagtatcccggacgcttcaccatgctccatatcaaggatcaccgcgagattgggcagagtggtatggtaggttatgatgctatcttcaagaatacggatactgctggcgtgcgccacatcgtagctgagattgagaaatacagctgccccgtagaagagagtgtgaagcagagtcttgactacttgcttgatgctcctttcgtgaaggcatcgtatagcaaataaaacatgatggcggctattcattcataagctcggccgcatcattttcttgacgcgggcacaaccggatgaagaatccggggtgcccgcgtttttttacttccttccgaagtcggccggaatttccccccattgctttgtctcccattttaggatgcgggtggtgtaggtgttttcgcgcaaccacttctccgcacgttctatcaggcagaaaagctcttcggtcttggcgtcgcgcggcagtttggtcttgcattttttctgttttatccagttgatggcgttcacgctgtcactgtagatgggcatgtcgaaacctttctgtttcaacaaggcaagtccgtggacaatggcgaggaattcgccgatattgttggttccatacatcggcccgaagtggaagatttcctgacggctggcgacgtgtactccccggtactccatggcaccggggtttccgctgcaagccgcgtctacggcaaggctgttttccgcgacggcggtgggaaggggagcgtcggcgccgggaatagtcttggcaggagaaggggctgaccgcttgatgtacgcgtacggcgaagaggcaaaggctttttccgcttcctcgcgtgattcgaatgacttgtattttgctccttcgtagcctttggtctgcagttggcagtctgtccaggaagtgtagatacccgggctgactcccgcccatacgacgtaatatttttctttcttcataactgcggacaaaggtaaaaaagaaaatccgaacaacttaactctttcatttgtttctttgtatggcggatataaaataaagaagagaagactcaataaaaaaagaaaggacaaaaaatgaagagaacatttgcagaagccatggcgcatcgccgtagttattactctatcggcagcgattcgccagtactggatgaagaaatagtacacattattcgtgaagccgtaaagaatgtgccgtcagctttcaattcacagtctacaagaattgtattgttgctgggcgacgaacataaaaaattgtggaacatcgtgaaggaaaccctgaaagcacgcatctctgccgaggcttttgccaagacggaagccaagattgacggctgctttgccagcggacacggtactgtgctctattttgaagacacttctgtagtcaagaagctgcaggaagcattcccttcctataaggataatttccccacttggtcacagcacacctccgctatgcaccagtttgccatctggactatgctggaagatatgggggtgggcgcctccctgcaacactataaccccttgattgacgacgaggtacgccgcacctggaacctgcccggcgactggatgatgattgcacagatgcccttcggtacacccaccggtgaaccaggagaaaaggaattcgaagatttaagcaagcgtatcaaaatttttctctgatacagaggcgttttcagcttggaattgctacctttgcaggaaacctgtaactcgtagcagatatgatgcgtattttcttgaccggctacatgggagccggtaaaactactttaggaaaggcttttgcccgcgaaatgaatgtgccgttcattgatttggactggtacatcgaagaacgttttcacaaatcaatccgtgaattgttcaccgagcggggagaagcctcttttcgtgaattggagcgaaacatgctgcatgaagtaggggaatttgaggatgtcgtggtttctaccggtggcggtactccttgtttttttgacaatatggagtatatgaacggttgcgggcagacggtgttcctggatgtacaccccgatattctgttccgccggctccgggtggcgaagcagcagcgccccatcctgcaaggcaagacggacgaagatttgcgcaccttcattgtggaggcgctggataagcgtgcgcctttctactcgcaggcccgttatcgctttgatgccggttatctggagagtcgcagccagattagcgaatccgtgcaacggttacgccaacttttaggactttaatcccttgtaaatgtgtatttttcagtccgatgagctggatgtattagatttatgtgtatttttgtcgccccttttataaaacacactatagtgggaaaatagtaaattgtaaatagtctaatagtaaatgtactgatgagaaaatggcgtattgaagattcagaagagctgtacaacataactggttggggcacttcgtactttagtatcaatgacaaaggtcatgttgtggtgacaccgcgtaaggatggggttgccgtcgatttaaaagagttggtggacgagttgcagttgcgcgatgtagcggctccggtattggtgcgttttcccgatattctggacaaccgaatcgagaaggtgtcctgctgcttcagacaggccgccgatgagtatgggtataaaggagagaactttattatctatcccatcaaagtgaatcagatgcgtcctgtggtggaagagatgattaaccatgggaagaagttcaatctaggtctggaagcgggttcaaagccggagttgcatgctgtgataggggtcaatacagacccggactccctcgtggtctgtaacggatataaggacgagagcttcattgaattggcactgttggcgcagaaaatgggcaaacgcatttttcttgttgtagagaaacttaatgagttgaatcttattgccaagatggcgaagcaattgaaagtgaaacccaacattggaattcgcataaaattggcttccagtggaagtggcaaatgggaagaaagtgggggagatgccagcaagttcggactgacatccagtgaactgcttgaagcgctggacttcctggagaaaaaggacatgaaggactgtctgaagctgatacatttccatatcggcagtcagataaccaagatacgccgcatcaagaatgccttgcgtgaagcttcgcaattctttgtgcagctgaacaagatgggattcaacatcgaattcgtggataccggtggcggtatgggagttgattatgacggtacacgttcttcaagcagcgaaagctccgtcaactattccatccaggaatatgtcaacgatgtggtgtcgacatttgttgatgctgccaacaaacacggctttcctcatcccaatatcattaccgaaacgggacgtagcttgactgcccatcactccgtgcttatctttgaagtactggaaacggcttccctgcccgaaatggatgacgactgggaaccgggagaggatgcccacgaactggtgaaggaactgtatgacatctgggacaacctgagtcagcgcagcatgctggaaccctggcacgatgcacagcagatacgcgaagaggcactcgaccttttcagtcatggcatcgtcgacttgaatacgcgcgcgcagatagagaaactctattggagtatctgccgcgaaattaactccattgccagcggcatgaagcattgccccgaggaattccgcaagttgagcaagctgcttgccgacaagtatttctgtaatttttcgctgttccagtcattgcccgattcctgggccatcgaccagatgttccccatcatgcccatacagcggctggatgaaagacccgaccgcgaggctactttgcaggatatgacttgcgactctgacggtaaaatagctaatttcgtcagctcgcgtgccgatacgacgaccctgccgctgcactcgttgcgcgacaaggagcactattatctggcggttttcctcgtaggggcctatcaggagattctgggagatatgcacaatctgttcggtgatacgaatgctgtgcatgtgtctgtcaattccaaaggctacaccattgaccaactgattgatggagagacggtggcagaggtgctggactacgtgcaatataatcctaagaaactggtacgtacgctggaaacttgggtgacgcaatccgtcaaggaagggcgtatctctgtggaagaaggaaaggaattcttgtctaattaccgttccggactgtacggatatacttatttggaataaaatggagaaactgactgtaataaaggtgggtggcaagattgtagaagaggaagccaccctctataagttattggatgactttgcagccatcgaaggctacaaggtcttggtacatggaggcggacgctcagctacgaagctcgccgcccaactggggattgaaagcaaaatggtgaatggccgtcgtatcactgatgccgaaacgctgaaagtggtaacaatggtgtatggcgggctggtgaataagaatatcgtcgctggcttgcaggcgcgcggtgtcaatgcactgggcttgacgggagccgatatggatgtaatccgttcggttaagcgtcccgtgaaggaggtggactatgggtttgtgggcgatgtgaagcaggtgaatgctgcttttttggcagacctcattcataagggtgtggttcccgtgatggctccgctgacgcacgatggagaggggcacatgctgaatacgaatgccgacaccattgccggagagactgccaaggctttggcgggcttgttcgatgttactttggtattctgctttgagaagaaaggggtgctgcgtgacgagaacgacgatgatagcgtgattccacagataacaccggaggaattcaagcaatatgtagccgatggagtgattcaaggtggcatgattccaaaattggagaactctttcgaggcgttgaatgcgggtgtgtccgaagtcgtaatcactttagcatcagccatcaacgggaacagtggaacccgtatccgaaaataattcaaaaaaaacggcaataggctgtaactttctgaatacttaaccgtcaatttattagagatgcaagaactcagctttcgcaatgacattctcccgctgaaggataagctttttcggttagccttaagaattacgtttgatagggcagaggcagaggacgttgtgcaggaaacgctgataagggtttggaacaagcgtgacgagtggtcgcagtttggttctattgaagcctattgcttgactgtggcaagaaatctggcgatagaccgtagcgagcgaaaagactcccgtaccgtggagctactccccgaaatggagcaagtctccgatgcatcgagcccttacgaaaagctggtgaacaaggaacggatggcgttgatacatcggttgatgagcaagcttcccgaaaaacagcggttgattatgcagcttagggatgtggaaggtaagagctataaagaaatagcagcggtcctgaacttgaccgaggagcaggtaaaagtgaacctcttcagggcgcggcaaaaagtaaaacaaacgtttattgatatagaaggttatggactctaaatatatagaacaactcttggaacgctactggcagtgcgaaacttctttggaagaggaagcatgcctgcgtgctttctttagcggtaacgatgttcccggacacttgcttcgctacaaggacttgttcgtatatcagcagcttcagcaggaagtgcatttgggtgaggattttgatgcccgggtgcttgccgaagtagaagttccggtggtcaaggcaaagcgcatgacattgaccgcacgtttcatgccgttgttcaaagccgctgcagtagtggcagtggtcctttctatggggaatgtgatgcaacattcatttttctcggatgtagaggaggtggccgcagccgatactatcggtaaacagatttccgcaccgtcggtagctctttcgggagatgtgcccgtgtctcatgaaaagcaggtaatggatagcctgcgtcgggtggacaagggtctggaaatcagtgaatagatattttcatttgcttttaaaataacattttcatttgctttaaacataatagttagtgtgctttattaaaacaacttgaggctgtgaagtttcaattctctcaaaatcttataaaaactaactaaaatagaagggacgctgcgtgatgcagcgtccctttattgtttgtacgcccagcatgggtggatgcacaaagaacgaagaacttcctcgcgggagtccttcgtcatctttataggtaattatttgagagagaatttagtttaggttcattaatcttaaagtctatattttccaatgttaaagcttatacagtccttttttcggatagtccagttccggattacccttgtagcccacactgccgcttccgctagtgcgtacttttaggaaatctgtggcatggcacttgatgtcgcctgaaccggcaacactggcggatgctttcttggcaacgaaatcggaagcaaacaaatcacctgaacctgccacgctgtattcagcttcttgggtgctgccgctcaggatagcggtacccgaaccggcaacggatgctttggtgaagttggccgttacgttgttcagcttcatgtcacctgaacctgcaacggatacttggaggtcattgcaagtgatgtcgctgctgttgatgtctcccgagcctgcgatggaaatatcgaggtctgtgcaggagatgttgttcccattgatgtcacccgaacctgccacagagattttgaggttgtctgtcttcagtccgtttttcagttccacgtctcccgaacctgcaacggcaatgccgttcaacttttctgcggacacacgtacttccagtttattataggatacgctgacattcttcttgaagccgatgtagagggtattgtccttgacacggatatccagtaagtctacaatgttgtccgaggtgtatacttccactgtcggtttgccggacttctgtgtgtaggtcacgtcggggctgccggctacactcagcttggtgaaattgtccacttttatgtctttggttacatagttcttgcttgccttgactgttttgctgccgaagcctccggaacggtatgtgtgttgttgtgaacaagcggttgtactgaatgccaataaggcgattgcgataaatgttgttagagctttcat

SEQ ID NO: 170 - DNA, 6813 bp, unidentified
  source 1..6813: mol_type = unassigned DNA
atgcgcattatcttctgtctgatggttttcttgttcataggaaaaaacacgatgctggcacaacaactgtcctcattcgtagaatatggaacaaccctgcataccggtgacaacacccctctttggcaggtcagcaaccagcaaggactcacttcgctcgacaacaatacttacatacgtggaggaatatcctacaaacaccaacttggaaaatggaagtttgaagaagcactggatttggttgcagcagccggattcagcacgacctccttcattgtacagcaggcttacgtagacatccgttacaagtggtttggattctttgccggaagccgggaacagaattctccattgctgaatcaagagctgagcagtggcggcatgacctggtcgggtaatgcgcgtcccatcccacaagtacagataggcatacccgagtatgtacagttgctaccccgtttaggcctgaaaggagaaatctcgtacggatggtttacagataacaaataccagcgggagcaagtcggagaaaaatactggtacaccaagagtatcaaataccatcataaagaagggttcctgcgtatcggtatacccaaaggaaaatggcaactggaactcggaatgaccctcgacacccaattcggaggatacaagattggaggttccgaatcgggagacttgggcaacggatggaaggattacgtacgcgtattcttccccggccacgggcgtgaggacggaccggtaggtgaacatctggctttccaaggcaattttctgggtagcgaatatatcaaaatgacttatcgtcctaaggaagatttctccatcagcgcctatctggacaatcattttgatgacttctccgccatggccaaactcaacggttgggatggcttatggggtgtggaatataaatccaaccatagacaagccatcaacggaatcgttatcgaatatctccagactaccaatatgagcggtccactgcacggtttgcaaaattctgtagtaggtaagaccggaggagccgacaactactacaacaacggttactacccaggatgggcacattggggtatggcgatagccaatccgttgatagcatcgcctatctataataaggatggcgatatgagtttcaagtacaatcgcgttaaggccctgcatctgggatggagcggcgacatcagcagtgagtggagatatgtggcaaaattgtcccacaacagaacttggggaactcctcatcgtccaatacccgatatattagaaaatttttctacttttgcatcgttttactatattccccgtaaatggaagggctggtgcttcaacgcgtcccttgcattggatatgggagagatatatggagacaattttggattccaactgaaagtacataaaacattttaagaaaatgaactacatacaaacagagattgacggcgtatggctgattgagccgaaagtattccatgatgcccgcggatactttatggaagcatttaaggaagaagagttccgtgcacatgtcggaaacgttcacttcatccaggacaatgagtccaaatcctctttcggtgtattacgtggtcttcattaccagaagggtgattgcagccaggccaaactggtacgtgtcattaagggaaaagtgctggacgtggctgtcgacttaagaaaatcttctcccactttcggaaagtatgtcagtgtggagctaagtgaggggaacaaaagacaattcttcattccgcgtggttttgcccacggttttctggtgctgagcgatgaagctgtctttacatacaaggtagacaacgtatacgcaccacaatccgaggcatccatccgttttgacgacgaaaccatcggtattgaatggcccgttgctacggaacagcttctattatcagataaagacggacatgccgtatcgttcaaggatgcggtctattatgaataaaatatgaaaatagccattgtcggtacaggatacgtcggtttggtaaccggaacctgctttgcggaaatcggtgtcaacgttatttgcgtagacacgaacagtgaaaagatagagtcactgaaaaagggtgttattcctatctatgaaaatggactggaagaaatggttagccggaatgtgaaagcaggacgcctgcaattcaccacgtctctggagagttgtctgaatgaggtggaagtggtattcagtgccgtaggtacaccacccgatgaggatggaagtgccgacttgagctatgtgctggaagttgcccgcaccattggacgcaatatgcagaaatatgtgttggtggtaaccaaaagtaccgttcccgtaggtactgccagaaaagtgcgggctaccattcaagaagaacttgataagagagggatgaacattgacttcgatgtcgcttcgaatcccgagtttctgaaagaaggtaatgctatcaacgattttatgagtcccgaccgtgtagtggtgggagtagagtccgaacgagccaagaagataatgagcaagctctacaaaccattcctgctgaacaacttccgtgtcatctttatggacatcccttctgcagaaatgacaaagtatgcagctaactccatgcttgccacccgcatcagcttcatgaacgacattgccaatttgtgcgaattggtgggagcggatgtaaacatggtgcgcagtggtatcggttcggatacccgtatcggacgcaagttcctctatccggggataggttacggcggttcatgcttccctaaggatgtaaaggcactgattaaaacggctgaactgagcggctacaagatgcgtgtactccatgcagtagaggaggtgaacgagaaacagaagagtatcttattcgaaaagttgcagaagcatttcaataatgatttggagggaaagaccattgccatttgggggctggcctttaaacccgaaacagacgacatgcgtgaagctccggccctgatattgattgacaagctgctgaaagccggctgtaaagtacgtgcctacgacccggctgccatgaacgaatgccgacgccgcataggagaaagtatttattatgcgacagatatgtatgatgccgcactggacgcagatgcactgatgctggtgaccgaatggaaagaattccgcctgccttcatgggcagtcatcaagaagaccatggagcagccgttggtattggacggacgtaatatttacgacaagaaagatatggaagaacaaggtttcacatatcattgcatcggaaaataaagtcgcagaaagaagaaaagaaataaacagggacgttatgacaataaaaggaagtgcgattctcattgtacttgttgtctcattagcctcatgcagcaacagacaaacaggagaggtttccgtaaaggaagatctcattgcaaagcaactgttacaaggcatctgggtgaacgatgaaacagaaatgccgttgatgcgcatcgaaggggatacggtatattatgccaacccgcaaagcgctcccgtatctttcaaggtcattcacgatacaatctacatatacagcaatgaaccggtggcctataagatagaccgtcaaacggaatacagcttctggttccactcgctggccgacgaagtaattaaacttcataaatcagagaatgcagaagattctttggttttcaccagccgggaagtagaagtcatttccactactccagaagtgataaagaaagacagtatcgtaatatacaagaatacaaggtataggggatatgtatatatcaacccctcaaagatgaaggttttcaagacttcctattctgaaaatggaatcagtgtggacaatgtgtattatgataatgtaatccatatctgtgtatacgaagggaagaagatgctttacggccaggacatcaccaaaaagatgtttgcggatatattccctgccgaaatactgaatcaggccattcttgccgatatgaacttcatgggtgtggacagtaagggataccattaccaggcaacccttggcatacccgaaagctccgtatacagtctggtaaatatgattattggttttgactgtacaatgagcatagaaaaagcggaataaatccgctttttctatgtcttttcttcaccacaccacagtgtttatttcttctcaccgccattctgtggccgtttggcactgggctttccgcctttattgttgttacggccattcttatttcctcctggcctacgtccgtttccatggccgccccgtcttcctccgtcaaatgctctcggcttgtattctggtgcttcacccagctcttcgggaaccggtatcttatagatatccctatctaggaatttttcgatattcttaaagttaccctgctccttttcggaaacgaaggtgatggctacgccgtcattattagcacgcgccgtacgtccgatgcggtgcacataatcttcactgtcgtggggaacgtcgtagtttatcaccagacggatgtcatcgatatcaatacctctcgcaacgatatctgtggctaccaggatattgatacgtcctgccttgaactcatacatcacttcttcgcgctgtgcctgctccaagtcggaatgcatttcaccgacgttcagtttcatctgcttcaaagctttggtcacttccttcactttcagtttggaagaagcaaagatgataacgcgttccggtgtctcctctgcaaagaggctacggatgatgcccagcttctgattctcgtagcaaacgtaggctgcctgcacaatcttttctgccggtttggaaacagccagcttcacctcggcaggattgttcagaatgttaccagccaactgttgtatcttagcaggcatggtggcagagaacatgattgtctgccgctctttaggaaggaatttgacaatttgcataatatcgtcataaaatcccatatccagcatccggtctgcttcatccaaaataaaataagagacacgggaaagatctacataaccaaggctaagatgggctatcaaacgccccggggtagcaataacgacatcagcacccagtgtcaaccctcttttctgctgctcgaacagtattccgtcattaccaccatacacagccacgctggaaaccggcatgaaataagagaaaccttccatctgttggtctatctgttgcgccaactcgcgggtaggagccatgacaatgcaattgatggcatcggcagggtgtccgccttctgagagcttgttcaatataggcaacaaatatgcggcagtttttcccgttccggtttgtgccactgctattaaatctcgaccttcgagtatgacgggaattgatttttcttgtatgggggtgcactcttcaaagcgcatggcatccagtgcctccagcacattgccatttaaatgtagttctgaaaacttcatgtatctcttttaaatttgcgtacaaagataggaaaaagacttataaaatagactcttacagtaaaaaaataagcccttgggacaataattatctcaaggacttgcaaatttgtttcaagcatctgccttcaacggggaatatcaatgtatgaatccttaaatcccagaaagtaaagtacgccatctaagccgatggtgttgatggattgcttagcattggcaacaactttgggctttgcatgaaaagcgattccaaggccggcaattcccagcatgggcaggtcgttggcaccgtcgcccacagcaatagtctgcgcaatatccactttttccacctgagctatcaaacgcagcaactccgccttacgcttaccgtcaactacatcaccgagatagcgaccggtcagtttgccatcctctatttccagctcattggcatacacatagtctataccgtacttcttctggaggtactgcccgaagtaggtaaaccctcccgaaagaatagctatcttgtaaccgtatttcttcaaaacatacatcaggcgatccacaccttccgtaatgggaagattctctgcaatttcctgcatcacggactcatccaatcctttcaacaaagccactcgttcgcgaaagctctcaatgaaatctatctcaccacgcatggcacgctcagtaatagcctttacctggtcgcccacacctgcacgtatggccaattcatcaatcacttccgtttcaatcagagtagagtccatatcgaagcaaatgaggcgacgcatccggcggtacatattgtccaactggaaagagaaatccatttccagttcggttgccagtttcatcaactgttcttgcatggcaatgcggtctttcggagtgccccgaacggaaaattcgatgcaggcgcgtgtacgcgattcacattcgtccagcggaatacgtcctgtaaggcgcttgatggcatcgatattcatgccttgctctgcaagaatacgggtcacagcagatatttgacgggcagacaacttgcgccccaataaagtaagaatatagcggttctttccctgcatattcacccaatcctcgtactctttggcagtaatagggtaaaaacggacagtcactcccagggaggaagccttgaaaagcagttccttcataatgaaccccgaatgttgttcttccgtcttgcataaaatgcccaatgaaagagtattatgaatgtctgcttgaccaatatcaagaatagtagcatcatatttggccagaatttccgtcacggaagctgtcagtcccggacggtcttcacccgtaatacgtatcaggatgagttcagtgttcaatggttgcat

SEQ ID NO: 171 - DNA, 33290 bp, unidentified
  source 1..33290: mol_type = unassigned DNA
  misc_difference 30293: note = a, c, g, or t
  misc_difference 30294: note = a, c, g, or t
  misc_difference 30295: note = a, c, g, or t
  misc_difference 30296: note = a, c, g, or t
  misc_difference 30297: note = a, c, g, or t
  misc_difference 30298: note = a, c, g, or t
  misc_difference 30299: note = a, c, g, or t
  misc_difference 30300: note = a, c, g, or t
  misc_difference 30301: note = a, c, g, or t
  misc_difference 30302: note = a, c, g, or t
  misc_difference 30303: note = a, c, g, or t
  misc_difference 30304: note = a, c, g, or t
  misc_difference 30305: note = a, c, g, or t
  misc_difference 30306: note = a, c, g, or t
  misc_difference 30307: note = a, c, g, or t
  misc_difference 30308: note = a, c, g, or t
  misc_difference 30309: note = a, c, g, or t
  misc_difference 30310: note = a, c, g, or t
  misc_difference 30311: note = a, c, g, or t
  misc_difference 30312: note = a, c, g, or t
  misc_difference 30313: note = a, c, g, or t
  misc_difference 30314: note = a, c, g, or t
  misc_difference 30315: note = a, c, g, or t
  misc_difference 30316: note = a, c, g, or t
  misc_difference 30317: note = a, c, g, or t
  misc_difference 30318: note = a, c, g, or t
  misc_difference 30319: note = a, c, g, or t
  misc_difference 30320: note = a, c, g, or t
  misc_difference 30321: note = a, c, g, or t
  misc_difference 30322: note = a, c, g, or t
  misc_difference 30323: note = a, c, g, or t
  misc_difference 30324: note = a, c, g, or t
  misc_difference 30325: note = a, c, g, or t
  misc_difference 30326: note = a, c, g, or t
  misc_difference 30327: note = a, c, g, or t
  misc_difference 30328: note = a, c, g, or t
  misc_difference 30329: note = a, c, g, or t
  misc_difference 30330: note = a, c, g, or t
  misc_difference 30331: note = a, c, g, or t
  misc_difference 30332: note = a, c, g, or t
  misc_difference 30333: note = a, c, g, or t
  misc_difference 30334: note = a, c, g, or t
  misc_difference 30335: note = a, c, g, or t
  misc_difference 30336: note = a, c, g, or t
  misc_difference 30337: note = a, c, g, or t
  misc_difference 30338: note = a, c, g, or t
  misc_difference 30339: note = a, c, g, or t
  misc_difference 30340: note = a, c, g, or t
  misc_difference 30341: note = a, c, g, or t
  misc_difference 30342: note = a, c, g, or t
  misc_difference 30343: note = a, c, g, or t
  misc_difference 30344: note = a, c, g, or t
  misc_difference 30345: note = a, c, g, or t
  misc_difference 30346: note = a, c, g, or t
  misc_difference 30347: note = a, c, g, or t
  misc_difference 30348: note = a, c, g, or t
  misc_difference 30349: note = a, c, g, or t
  misc_difference 30350: note = a, c, g, or t
  misc_difference 30351: note = a, c, g, or t
  misc_difference 30352: note = a, c, g, or t
  misc_difference 30353: note = a, c, g, or t
  misc_difference 30354: note = a, c, g, or t
  misc_difference 30355: note = a, c, g, or t
  misc_difference 30356: note = a, c, g, or t
  misc_difference 30357: note = a, c, g, or t
  misc_difference 30358: note = a, c, g, or t
  misc_difference 30359: note = a, c, g, or t
  misc_difference 30360: note = a, c, g, or t
  misc_difference 30361: note = a, c, g, or t
  misc_difference 30362: note = a, c, g, or t
  misc_difference 30363: note = a, c, g, or t
  misc_difference 30364: note = a, c, g, or t
  misc_difference 30365: note = a, c, g, or t
  misc_difference 30366: note = a, c, g, or t
  misc_difference 30367: note = a, c, g, or t
  misc_difference 30368: note = a, c, g, or t
  misc_difference 30369: note = a, c, g, or t
  misc_difference 30370: note = a, c, g, or t
  misc_difference 30371: note = a, c, g, or t
  misc_difference 30372: note = a, c, g, or t
  misc_difference 30373: note = a, c, g, or t
  misc_difference 30374: note = a, c, g, or t
  misc_difference 30375: note = a, c, g, or t
  misc_difference 30376: note = a, c, g, or t
  misc_difference 30377: note = a, c, g, or t
  misc_difference 30378: note = a, c, g, or t
  misc_difference 30379: note = a, c, g, or t
  misc_difference 30380: note = a, c, g, or t
  misc_difference 30381: note = a, c, g, or t
  misc_difference 30382: note = a, c, g, or t
  misc_difference 30383: note = a, c, g, or t
  misc_difference 30384: note = a, c, g, or t
  misc_difference 30385: note = a, c, g, or t
  misc_difference 30386: note = a, c, g, or t
  misc_difference 30387: note = a, c, g, or t
  misc_difference 30388: note = a, c, g, or t
  misc_difference 30389: note = a, c, g, or t
  misc_difference 30390: note = a, c, g, or t
  misc_difference 30391: note = a, c, g, or t
  misc_difference 30392: note = a, c, g, or t
agcgacagactatggttttgatgacaatctgtggcaaaactatctcactttcttccttatgatgagcgagaatccgttttccatcacctgtgagaaggtcggagccagcgatggcagcgtaaacgggcttgtggcaaacgatttcaggatttttaagaagcttttcgattatgatttcaagccaatcgagtcagcactcggaatcgactgcttcacacagatcagcaattataaggccattgtgaaaaaggaccttatgtacaatcacaatgtcagcgagaaggtaagggcgctgagcaagaagcttgaggcagctaaggatgagcaggagttctttgatgtggtaacaggcttttacaaggcatacggagtcggcatgtttgggctcaacaaggcattcaggattgaggagcatctggacgggggcttctccttcatgccaatcaacaatatggatgcggtcatgctcgatgacctgatcggttatgaaatccagaagaaaaagctcacagacaatacagaagcgtttgtacagggcaaaaaggccaacaatgtgctgcttttcggagacagcggaaccggaaaatcaacaagcatcaaggctattgtcaatcagtattatgatgacggactgcgcatgattgagatatacaagcatcagtttaaatatctgtcaaagattatcgcagcaatcaaaaacagaaactacagatttatcatatatatggatgacctctcattcgaggagcatgagattgagtacaagttcctaaaggcagttatcgagggtggcgtggagacaaagcctgacaacatactgatttatgcaacctctaaccgccgtcacctgatcaaggagacatggaatgaccgtaatgaccaggacaacagcaatgacaagcaccactcagatacagttgaggagaagctgtcacttgtaaaccgttttggtgtgacaatcagctactcaaagccatcgcagaaggagttcttcaacatcgtaacagagcttgcgagaaagagcggctgcacactttcagacgaggagctgtgcagggaggcaaacaagtgggaactcagccacggtggtatttcaggacgtactgcaacacagtttgtcaactacattatggctagcaattaagcagcaggcataagcatgaaaggatagtatatgctctaccagataagtaatggcgctgtcgcatttggcgacgacgtcattttgcatagtatagattttgaaatcagaaacacagaaaagatagcgatagtcggcagaaacggctgtggcaagacaacacttttaaagctcatttcaggcgaggttgagatggaaaagctcgacagcgatgagagcgcctttattgcaaaggcaggaaatccggagatagggtatctgaagcagattgcgtttgatgatcctgatgtgacactcgagcaggaggtgcgtaaatgcttcgtgaaaatggacgagcgaaaggcagagcttgcgcgcgcggcggcagagctcgagcatgattattccgatgaaaaggtagccagatataccgcgatggaggaggccttcaaggatgatggcggctactattatgagaaggaatatgaggtcatgatccgcaagttcggcttctcagatgatgagcgtaaaaagccaatccgtgacttttccggagggcagcagaccaagatagcattcataaagctgcttttgtcaaagcctgacatactgcttttggacgagccgaccaaccacctcgatgtcacgacgattgagtggcttgagggctatctgaagtcgtacccgaaggcagtggttgtcgtatcccatgaccgtatgtttctcgacaatgtggtagatgtggtatacgagatagagtacggcacagcaaggcgctatccgggtaattataccaattttatcgcccgcaaaaaggaaaactacgacaagcagatgaaggatcacatcgcccagcagaaggagatagagcgtttacagcgtatggttacgcgattcaagggcaagccgaccaagacagccatggcacagtcaaagcagaaggctatcgaccgcatggtgattatcgaggcaccggacaagtacgacaacaagaccttccatgccaatttccagcccgaaaaggagaccggaaacgatgtgctttatacatcagagcttgcaatcggctatgaccatccgctctccgtagtgtcgcttgatttgaaaagaggcgaaaagcttggcatactcggcggaaacggacttggaaaatcgacatttttaaagactatcgtgggtaagatccctgcactttcaggcgagtaccgcttcggaaccaacgtgcagataggatatttcgaccagcagatggccatgtatacaagcagcaagactgtgctcgatgatttttgggatgagtatccgaatctcacggaaaccgaggccagaaatgcactcggagccttccttttttcaggggaggacgtgttcaagaacgtaaatatgctatctggaggagaaaaggtcagactggcgctttgcaagattttaaagaccagaccgaacgtgctcgtgctcgatgagccaactaaccatatggatatcgtaggcaaggaaacgctggagagcatgcttaaggactacaagggcacactgatttttgtatcacacgacagatattttgtgaaaaaggtagccacacagctgcttgtgttcgaggatggcacgaccaatctctatcagtttggctatgagcagtatcaggaaaagctcgatcgtgaggctgaggaaagcaaaaatgtatacagaggcaatgcaatatttggcggcgcgataagccagaacggcagcagtcagacaggcagtgatgtaaaacggagcacgtcacaaaccggtgcagcaggtaatgtgggcgaaagcaccaatgcaaatagcgcagcccaggcaggcggaatggctgtctcatcaaccggcaaggcatactacaacccgggcaaggagcgctcaaagatacaaaaaaaggtcaaaaaggccgaggaggacctggcggtcaaggaagcaaagctcgatgagctcaaggctgagctcatgaagccggagtatcagtcaagctactcaaagctcacggaaatccaaaacgagatagacgctctcgaggaagaaatccttattgatatggaggcgtgggaggagctttcctctcagcttgaggcactgggataggttagatgcgctgtggtagcttagaaacgttgtgatagcttagatgtgctgttgtagttgagaaatgttgcgatagtgtataaaaaatcactcgacttgatgttttttattctgatgaaatccctaatcatagcgaaatcaagcgatttcgcgaaaaaccgtaaataaacccttgattatttatataaattgcataaaaatgattgatgaaaacgaaatttatggtataatatttacatgatacagacaacgtatcaaataaacgataaaggggttggacatcatgagaataacaatttcaggaaaaaacatcgaattaacagaggggcttaagcaggcagtagaggagaagctgtcaaagctggagaagttttttaaaccggacacagacgtatacgttacactcagcgtagaaaaggatagacagaaaatcgaggttactatcccggcaaagggacatgttatccgttcagagcaggtcagcaatgatatgtacgtatcaattgacctcgtagaggaagtaatcgagagacagcttcgcaaatacagaaccaagatttccgcaaagaagtatgcaccggcgatattccaggatgatttcgtggaggcagacgatgcagaggacgaggaaatcaagattgtccgtacaaagagatttggtatgaagcctatgtatcctgaggatgcatgcatccagatggagctctcaggccacgatttcttcgtattcagaaatgcagagaatgacgaagtaaatgtagtctacaagagaaaaggacatacatacggacttatcgaaccggaatgttagactcttgtttttcatcataatttaacctttctttcatcgaaaaccggcagccgttggctgctggtttttatgtctgtttaacctcatttggtcttggatatgcgattggttccaatggcagtaagaccacaaaaaaataaccgccccagcctggaaactgaacggttattttaactaagtaaatgatcaggcgaaccgttgttataggtagcacctttttgttaactatattttaacattcatttctaatcatgtcaaaattatttcaaaaaatgaaataattgagagaattacataattcatagtcattgattttactgatgtttaaggacatataaaaaacaatatattttttagtttttagttttcaaaagaagcttgcacagaaatgtggaggctctttttatgtgaaataattagaggcttccactattatgccagaagcctctaatttttaagctgttttggagatttttgcggtttcagctacttttttttggaattttttcggcttatggactggttttgggagctgttttgggaatttttgcggtttcagctactttttcacgcgattttttccggcttatgggctgagtttgagagctgttttggagatttttgcggtttcagctacttttctcgtattttttccgccttatgggctgaattttgggagctgttttaaaagttttatggattatagctcctcaagacctgcccactatgctatcaacctagggctattgtacattatgctatgcaaatagagcaattatcagatataaaggcattggttatgcgtctcaaatctgacccggttaccggttctaagacgcagtcttggttacgattatgtcgaaaaatcaaagataattcaaggtttattacagcaccattcagagaaacaaaagcatttgaaaaactatataatcaacgaaccagcgtagagcgtacgttcggagatttaaaagataattacaaccttgataacatccgggttgcaaaaatggcaagggcaaaagtctttatggatttatcttgtattgcccttattgcatcaagactaccagatgcagccagcaaggaaaaaaccacaaaaatagtacaaatttatcattacaaaaattctgatataaaaagagcaatattaaacaaaaaccaactaaattaaacctaaaaccatgtcgtattttgtcgaaaactgctaatcacatatcaatattgaagcttctaatagaaatcttcaaaatacaagcgcgtaacgcgcctagaatattgatatattatatggaaaaatgaatccaccaacaaagagtgaaatttcgcaaaagcgacaaaatttcaaaagaaagacaaaaaaagaagttctacgaaaaatacaatcgatggagggatgaaatatttgggaagaatttattatgaacagaaaggacttattaacctcgatgatatcgtagatatatttattgaggtgggaaatatacacaattacctggaaaatgcagccttgcggattttgctttttggcaatcctgagctgaatttttatcagtgccgattattagtattgaagtacggagaatcactttcacaggatgatttgcacgggcggatggtatttatgagaatgatacagctgctggaagccaacatagtttaaaataaaatgagaatttcttttttgaccgggcaaccggtctttcttttttgcacaaatggtgttataattttggaaaaattatgttgattactcatagctttaaaaaagaagtattgcattgtgtttaattaaaccaaagcatgataattcaatcaaagaaaagaggacaaaaatgaacatcgtagtacttgccggagggctcagcacagagagagatgtttccttcaagacaggaagcatggtagctaaggcgctcaaagagaacggccacaaagttatattattggatgtatttatgggatatagtgacagggaggaggacctgacaggtatatttgaccgcgcggacgagataagcgtgcaggtcagcgatattccgacagaggcacctgacctcgcaaaggtaaaggcttccagaaaggaccagtcaccttgcttcttcggaccaaatgtcatcaagatgtgtcagatggcagacattgttttcatggcactccacggagaaaacggagagaacggaaagatacaggcagcatttgacctcttcggtgtcaaatatacaggcagcgattatttaagctcagccatcgccatgaacaaggagacatcaaagcagttcttccttgcaaacggtatccctactccaaagggcatttccatgaccagagcgaccagacaggacgatatcacaaagcttgacctgacacttccatgcgtggtaaagccatgctgcggcggttcaagcatcggtgtcactatcgttagggatgcggcagagttcaaggcggcacttgacgatgccttcaagtgggaaaatgagctggttatcgaggaatttgtacagggcagggagttctctgtcggcgttatcgagggaaaggctcttcctattatagagattgcaccgaaggagggcttctacgattataagaataaatacaaggcgggcagtacagtagagacatgtccggccgagcttcctgagcaggtgacaaaggatatgcagcactatgcagaggaggttgcgcgtgttatcgggcttgacacatattcacgctcagactttttgctcaacgacaaaaatgagatgttctgcctcgaggcaaacacactgccgggcatgactccgaccagtcttctgccacaggaggcagcggttatcggtatgagctttaatcagctctgtgagcatctgattgacatatctttgaaaaaatatgaggtgtagcatgtcggataagtacatgaagaatcttacatttgcaaatattgcaaaggcctgtgagggcacatacataggcgatgagacactgcttgatacgacaatcaccggcgccgtcatagacagcagacaggtgaaggagggctatctttttatcccgataaagggagaaagggtggacggacacaaattcattccgactgtgtttgagcagggggcggcaattgtgctctctgagcatgagctgacggatccggcaggcccatatgtgcttgttgaatcaaccaccgatgccatgaaaaagctcgcggcattttacagaaaaagcctagatatcaaggtggtgggcatcaccggaagtgtcggcaagaccagcaccaaggagatgatatcatcagttcttgagcagaaatacagcgtccacaagaccgcaggcaatttcaacaacgagataggcctgccactcactattttcggaatcagggaaagtcatcaggtagcggtgcttgagatgggcatatctgattttggcgagatgcacagactttctactatgtcgtgcccggatgttatggtcatcaccaatatcggctactgccatctggagtttttgggcgacagggatggtgtgcttaaagccaagacagagtgctttgagcatatgatgccggatgcggtcgcagtgctgaatgcagatgacgacaagctggtcacagtgcagacggtaaatggaaagtctgccatatactatggcaaggaatcagcatcaggcgttcataaatcagtatataccacaaatattgaaaacctgggctttgacggcatgaaggctcattttgtcactccggagggtgagtttgatgcacaaatccacatcccgggtgagcacaatgtatacaatgccatggcggcagcagctgtcggattgcagcttggcctcacaatagctgagataaagtcaggaatcgagaaagcagaaacaatcgcaggacgtaccaatttcatcaaaacacacggcatgacagtgatagatgactgctacaatgcaaatcctgtatccatgaaatcctctatcgaggtgctttcacatgcaaagggaaggacaatagcagtgcttggcgacatgggcgagctgggaagcgatgagaaaaagctgcaccatgaggtaggcgaagcagttggagagaatcatatccatacactttttgccgcaggagagcttgcaaaggaatatgcagccggagcagcggagaaatcatccgatgtagacatccactatttcgaggatagggagactatgacacaggagcttctttcatatgtgaaggagggcgacaccatactggtgaaggcatcacacttcatggagtttccgaaggtagtcgaggctctgagtgagtaaaatcaggtaagatcaatcgggtagaaattaatttgatatttaataattgcgaggaatggatattctccaagcctcataatattataaaagaaagagagaaaaataatggcacagaatccaatcgtaacaatcacaatggaaaacggcgatgtgatcaaggcggagctttatccggaaatcgcaccaaacacagtaaacaactttatcagcttaatcaatcacaacttctatgacggagtatgcttccaccgtgtaatcaagggcttcatgctccagggcggagatccggacggaaacggcacaggcggccctggatatgaaatcaagggcgagttcacacacaacggcttcaaaaatgacttaaagcacacagccggtgtactttcaatggcacgtaccatgatacctgattcagcaggcagccagttcttcatcatgcatcaggatgcaccacatctcgacggcgagtatgcggcattcggcaaagtaatcgagggcatggatgtggtaaacaagatcgcagaggtgcgcacagactacatggacaaaccacttgaggctcaggtcatgaagacagttacagttgagaccttcggagtggactatccggagccggagacagtttaatgataataattattgatgaggcaagcgcaaaacttgcctctttttactatcatgacgagatattcaagccacagtggaagtgcgcagccgatatgtcatctgcgtcagacgagttgcatgatgaatttcaggaaaaactgcaagaaaaactgcctgatgagctgcgggaaaaactgtatgttgtgctaccggcagatgaatcaattaatgacttccaaaaaacaacgatacaagaatctgcagataacacagcgaaagctaatacgggaaatctaagaataccgaaagctcccaccgactgcatctggatagtatccgacaggcagcagaagcaaatagctgactcactcggcatagcatcggtaggagaaccgcagtgtggcacgcgctatgcagtggaaagccttgcagagcttgatattgagtatcttgagcgggtgcgcaggcggtataatcatatcccatgggatattggcgagacagacagatgcctgatacgtgagctttcactggcagaccttccggcgctctatgagctttatgacaagcccggcatgacagactttgtggaaccgctttacgactacgagacagagcttgaataccagaaagcatacatagagaacatgtatgacttttacgagtatggtatgtggcttgtgttttcaaaggaaacagggaagctgataggacgggcgggacttgagcacaatgaaatgggttatatgatagcaccggaatttcagaacctgggctatgccacggaggtgtgccgctttatcgtagactatgcgcggaaaaacacagactttgaggagctctactgccggatagatgagaaaaatgtggcatcggtgcgtcttgcaaaaagacttggatttgtcagaaacggacaaatcgggaatgagagaaataccggtggattagataggtatgttctttcaatctgacagttcattatatattttatatgttcagcaggaacagctcggcaggattcattcagatataagaactgaataattgcctgatagaaaggaatgtgcataaatatggcgaaaataggaattgttatatgtaactataataaacaaaatgatgttattgactgtatacagtcagttcttgaatcaaaatatgaggattatcacatctatgttgtggataacgcatcgacagacgagtcggtgaggttgataagagagtgttacggaagctgcgacaggctcacacttatcgaaaacagtgaaaatcttggaggctctggtggctttaatacagggcttcgcgtggcgatggctgagggacacatgtatctgatgtgcgtagacaatgacgcactgcttgacgaaaactgtataggaacactttcggatttccttgattcacatgagaaggcaggcatagcggctgcaaagatttatcataccgggcaggaaaattatgtgcagcagtatggctcgttcatagattatgataattacagcgtggactcgacgtatctaaatcatatagaggatggttcaatgcctgatgtggtatattctgatgcagtcccggcatgcgcgctcatgataagacgtacagttgtagaacagattggcgtcatgcctgaggagaatttcctctattgggatgacaccgagtggtgtgtcaggtgcagggaggcaggctacgaggttgcatctgtaggtgcagcagcggcaagtcatgcgatgggggcaaaaaaggaggatattaatacatttccaacctactatgcatggcggaactggatcaagttctttttagaccatattgatgaggaaagactttcagatatggcagagacatttcttggctcgatatttgagataaactacacagatctatatcgcggggaagaaaaccgctcaaaaacagttatggcggcattagatgatgcacttcacaaagttatgggaaaagcgaaggaggacaggatatttaatctggaattgacttatgacgggcttgagagggcgataggcgataagtcggatatagctataatggcaggtgaatttccgttatatgcagatgcacttaaagaaaaaataaaagtcatgtggcctgataaaagggtttacattgttggtttgcaggatattgacgaagcatatggtacagcacattttcaaccggatgccacaatcaccatctgtgagagtattttcaggcaggatgacctcagcctttccacatatgtgatggacctggatggaaatgtactggtcgatgaggatgacgtgctcatggtcataaactataacttcagccgcagaagttttatcttttctatgaagccactttttatgaggctttcaaggcaaaattacggattttaaaaaaatagtaaaaaacattgaaaaatatacaattaggcaataaaatataaacatagtttaacgatttggaggacgaaaaaatgaagaaatatgcatacggagtagatataggtggaacaactgtaaagataggcttttttgagaccacaggaaagcttgtcgatacatgggagattcctacacgcacagagaattcaggcgagctcatcctgcctgatattgcagcatccatcaaggaaaataacgagaagcacggcatcgagatgggtgacatcgagggcgtaggcatgggagtgccgggacctataaaggatgacggaacagtattgaagtgtgtcaacctcggctggggtgtgttcaacgtggcacagtcactctcagtactgtgcggcggcatcaaggtaaaggccggaaacgatgccaacgtagctgcgctcggtgagatgtggcagggcggtggaaagggccatcaggatgtagtcatgatcacactcggcacaggcgtaggcggaggaatcatccgcgagggcagaatcgtagccggaataaacggagcaggcggagagataggacatatgcctatggtagatgatgagtcagagtgctgtggctgcggcaagaagggctgcttagagcagtatgcatcagcaaacggtctcgtaagagtggcagagagatacattgcagcacacagggatgtggcaacaaagcttgatttaaatgcaggcttcacagccaaggatgtatgcgatgcggcaaaggcaggagatgcagcgagcattgcggcagtagagcagtctatgaagcttctcggcaaggcaatggcagcagtagcatgcgtcatggaccctgaggtatttgttgtcggcggaggcctttcaaaggcaggcagcatcatcatcgatacagcagcaaagtactataaagagtatgctttccatgcaagccgtgagacagagatcaagctcgccacactcggcaactcagccggcatgtatggcggagtaaagatggttatcggctaacaacataagattgcaatttttaaagaaataaaatataatggctactaaagatacactacaatcgaggtgagactattggcagattactcaacagaagaattagaaaaaatagcggacaaatttcgctcagataccagcggtataaggggaacaaaggattttacgagcccagaggagctttacgatgagctgaaaaaggaaatcaaaaagtaccatccgtcggatgacacgagccttgtggacaaagcctacagggtagcttatgatgctcataagggtcaggcgcgtaagtcaggagagccttatatcatacatccgctttgtgttgccataatactcgccgagctcgagctggataaggaaaccattgcagcaggactgctccatgatgtgctggaggacaccatcatgaccatggatgagatgcgtgcggagtttggagacgatgtcgcacatctggtggatggcgtcacgaagttaaagcacctgcatctgacagacagcaccaaggatccaaaggataagaatgcggacaggcttgagatgcaggctgagaatctgcgtaagatgtttctcgccatggcaaaggatatcagagtcatcctcataaagctggcggacagactgcacaatatgcgtacactcaagtaccagtccaaggaagcacagcagcgtatcgccagagagacacaggatatctactgtcctatcgcgcagcgacttggtatcagcaagataaagatagagctcgaggacctttgtatgaagtacctctatccggatgcctactacgatctggtagagaaggtagccctcagaaagacagagcgcgacacctacatccagggcctggtaaacgatgtcaagaagtatgtttcagatgccggtatcaaggcagagatatacggcagggcaaagcatttcttcagtatatataagaagatggtcaatcaggacaagactatagaccagatatatgacctctttgccatcaggattctggtggataccataccggattgctacgcagtgcttggtatcatacatgagaagtataagcctataccgggccgtttcaaggactatattgccatgccgaagcagaacatgtaccagtcgcttcatacgacactcataggcccgagcggacagccgtttgagatacagatacgtacctatgagatgcatcgtactgctgagtacggtatcgcagcgcactggaagtacaaggaaacaaacaacggcaatgccactaccaccactgtcacagaggaggagaagctcagctggctgcgccagatactcgagtggcagcaggacatgtcggataataaggagtttatgactttattaaagagtgatttaaatttattctccgacaatgtatttgcattcacaccgtccggcgatgtaaagaacctgccaaagggctccacacctatagactttgcctacagcatacactctgcggtcggcaacaagatggtcggggccaaggtaaacggcaagctcgtgccgatagactatgtcatcaaaaacggtgaccagatagagataatcacctcgcagaactccaaggggccaagccgtgactggctcaaggtggtaaagagcacacaggccaagaacaagatcaaccagtggttcagaagtgagctcaaggaggagaatatacagcacggcaaggacctgatagcagcctatgccaaggcaaagggtatcaactttgctgagataaacaagcccgagtatcaggagaaaatacgccgcaaatacggcttccacgactggaactcatgccttgcaaccgtcggccacggcggactcaaggagagccagatagtcaacaggatgtacgacgagtacaagaaggatcatgtggtgccggtgacagatgcagatgtgcttggcagcatcgcagaaaagcagcaggcagcagcaggcacacagcccgagcacaagtcaaagagcggtattgtggtacacggactctatgacgtggctgtgcacttctcgaagtgctgcaatcctgttccgggagatgaaatcgtgggctttgtcacaagaggccgaggcatctccatccacaggacagactgtgtgaatatcatcaatctgtccaagatagaaaaggacaggctcatagaagcagagtggcaggatacagccctcatggacaacggtgccgagtatcaggcagacctaaagatattctgtcatgacaggccgggactgctcgtagatatcacaaagatatttaccgagaaggaaatcaatatcagtggtatccagtccaagaccagcaagcagggcatcgctacaatcgaggtatttttcaatatcagaggcagggaccagataaaggttctcgtggagaagctcagacagatagaaagtgtaatagacgtagagaggaccaccggctaaatcccggtggttcttgcgtgaagcataacatataacagacaaggagtacactcatatggtaaatatgaagatagaccacttcgtagtgggaccggtgcagaccaactgctactttgtcaccaatataaagacaaaggaaatgataataatagacccgggcgcgtgtgctaatcagctcgccaaaaaggtggacgaatcaggcgcaaagccagtagcaatactgctcacacacggacactttgaccacgccacggatgcaaagccgctcgcagaccgttacggcatcaaaatatatatccatgaggcagacaaagccacactcgatgacccgcagcttaatgtcagctacatgatggggcagtcaaagaccttttatgcggatgtatttttgaaggataagcaggagcttgacatcgcaggctttcacatagtagtgcttcacacaccggggcatacaccgggcggctgctgctattatttcccgtatgaggacgtgatctttacaggagattcgctgttttgcggatcaattggacgtacggatttcaagggtggcagcatgtcagaccttgtgcgcacagtgaaggaaaaaatcatgacactgcctgagcatacagaggtgtacccgggccacaacgacacaacaaccatagaaaacgagaggatgtataacccttacttatgatagtagtagtatttaataaaccggattttgaatatgatgtgcactcactgctcaaggagttcttcccacaggaggatgtgcagatgtactatagctgctcacctgatgaggtggaggggaaaaacctggcctgcacacaccacgagatgacagatgatggcgtaaaggaatttgcggatgcctcacaggtatttaagatagactatgtgggcgatgaaattgcagtggagtggacgctgaatagagccggtggaaataattccatgacaggtgatatgcagcaagccgacgaaagtgacattaaaacagccggaaaaagaatctgcacaaaaatatccgtgaccggcacagaccgcaaggaaaccaaaaaccgcctcaagctcgccctgtattctatgatagaaaagggcacaggaaagagccttccatggggcacactctcaggcatcagaccgaccaagatagccatgaagtgcatagaggacggcatgagcgataaggaaacctacgactatctgaaggaaacctacctcgcaagcgatgagaaaattgacctctcaataggcatagcaaagcgtgagaaggcactgctcgataaggtggactatgacaacggctacagcctgtatataggcatacccttctgcccgagcacctgtgcatactgctcgtttacctcatacccgcttggtgtgtggaaaaaccgcgtggacgattacctcgacgcactcgagaaggagatagactacacggcgcagaaattctaccacaagaagctaaactccatctacataggaggcggcacaccgaccacactaagccctgcgcagcttgacagacttatcagaaaaattaaatgcagctttgatttaaaggactgcctggaatttacggtggaggcgggcagaccggattccatcacgagagaaaagctcatggcactgaagaaaaacggcatcagccgtatatcagtaaatccacagaccatgaagcagcagacacttgatataataggaagacaccacacagtagacgatacgatacaaagcttcaagctcgcgcgtgagctgggctttgacaacataaacatggacctcatcatgggacttcccgaggagacactcgatgatgtaaggcacacaatggagctggtgaaggagctggcacctgacaacgtcaccatccactcactcgcagtaaagcgagctgcacgactcaccatcttcaaggaccgctacagcgatatgcagatggtcaacactcaggagcatatggatctctgcgcagcctactgtaagcagatggggcttgagccatactacctttacagacagaagggcatggcaggcaatatggagaatgtgggctatgcggcaaagggcaaggccggcgtatacaacatattgataatggaggaaaagcagaccatcgtggcctgcggagcaggagcaagcaccaagcgcgtctggcccgtaccgaatccggatggcacacaccgcatcgatagatgcgagaatgtcaaggatgtagggcagtatatcgcaaggattgatgagatgattgggaggaagcagaggctgtttgaggaaaaataagcagcatgacatataataatgtataattatgggtgctgtaatactatagcggttagcgaatgtgtcaaaaattataaagaaaacctaatattcattgacaaagaattaaaaatgggtgaaaatatattattgaataccctgattagatacagaaaaagatataaataacctaataaaacatacgtaaaacaaaacaggttaaaataattcgggggggggtacaaaggtacctccactagaacaggtataaaggaaaataaaagataccacaaggagaatttggaaagaatgtacagaaagaaaggcagaggatggacaaagcatatagattttatgcttatagatatcgcatgcattgttatagcattttttatttcatatgtgatacgcttcggctttaataacccatatgtggacaaggactaccgtatactgggtgtagcatttcttctgatagatttctttgtggagataatggcagattcattcaagaacgtcctaaaacgcggatatctggatgaattcatatcgacctgcaagcacgcagtgcttgtatttctggtgacagcgctatttctgttcaccacacagatggctgatatatactcgcgattatcattttatatcatgtttccaatctatgtgacaataacatatgtagcaagactagcgctcaagagcttccttaagaaaaagggctttggagcatcaagaaaatcgctgtttgtcatagcacctgatgccatgcttcgtgatacactgtgcacagtggagaaaagctgtataggctatacaaagatagtagcagcttcactggatacagacatgaagggtatgactatatgtggcatacctatagttgcaaaccacgatggtatagtggactatgcgtgtgatgagtgggtggatgaggtgctcatcccgccttgtagcgaggatgaatatccagagcggatggcagatatattccttgagatgggaatagcggtacatacaggaataaccaaaaatggcacagcccagggaggctacaagcagatagaaaagataggcgactataccgtagtcacatcaagcgtgaactatgccaacaccagcgcgcttctggtaaagagaggcatggatatagtcggaggattggtgggctgcctgttcacacttatcataatgatatttgtgggtcctatgatatacatagcatcgcctggacctatatttttcgcgcaggagagagtcggcagaaacggaagaaaattcaagatgtacaaattccgcagcatgtatatggatgccgaggagcgaaagaaggagcttgcggcacagaataaagtgggcgacggaatgatgtttaagatggacttcgacccgagaatcataggcaataagttgctgccaaacggaaagaagaaaaccggaattggacagtttatcaggaaaacaagcttggatgaatttccacaattcttcaatatactagtgggagatatgagcctggtgggcaccagaccaccaacactcgatgagtgggaaaagtatgaaccacatcacagagccagaatgtcattcagaccgggactgaccggactgtggcaggtgagtggcagaagcaatatcacggactttgaggaagtggtaaagctggatactaagtatattggggagtggagtgttaagggggatatgaagattctctttaagacaattacaggcgtattaaagagtgatggagcagtttaaagacgtgaacagacgaaagagtaagcctaaggaaaaacttaatattgcaatgtttggacaaaaaaggattccttcaagagaaggcggagttgagatagttgttgaggaactttgcaccaggatggttgcacaaggacataatgtaacttgctataacagaggtggccatcatgtgagcggttcagagtatgattcaaaacgacttaaagaatataaaggaataaagcttaagacagttccaacaatagaaaagaaaggtcttgcggcggtttcgtcctctttttttgcagcattatgttgtgcttttggtaagtatgatgttgttcatattcatgcagagggaccggctttttttgcttggctaccaaaaatgtttggtaaaaaagtaattgttacaatacatggattggactggcaacgtgaaaaatggaagggtggatttggttcaaagtttattcatcagggagaaaagaatgccgtaaagtatgctgatgaaattattgtacttagtaagggagtacaggattattttgaaaaaacatatggcagaaaaactgtatttattccaaatggtgtaagtaatcatatagaaagagaaccgcagattataaaaaataaattcggattaggtaaagatgaatatattttgttccttggacgattagttccggaaaaaggaatcaaatatttaatagaagcatttaaacaggttgatacagaaaaaaaattggttattgctggtggcagttcggatacaagtgaatttgaaaatgaaatgaaagaacttgctaaagaagataaacgaatcttatttactggatttgttcaaggacaggagttagaagagttgtatagcaatgcatatgtgtatgtactcccatctgacttagaaggaatgcctttaagtttgttggaggcaatgagctatggaaattgttgcttggtatcggacatacctgagtgtgttgatgtggttgaagataaagcacttatatttcaaaaatcagatgtaaatagcttatatacaaagctcgttgatatatgttgtaattcttcgaaggtgcaatcatttaaacgtactgcagaggaatttgtatgtaataaatatagctggaataaaattgtaaaagatacttgctgcttatacagataaaaataaaaaaggttggaaataaaatgtcagaaaagaaattaaacggaactgtaatagtaacttatagatgtaatgctcgctgtagcatgtgtaatagatataaagcaccttcgaaaccagatgaagaaattagtatagagacaataaaaaaacttcctaagatgtattttacaaacattacaggaggcgaacctttcataagaactgatttgaaggatattgtaagagaattatataagaaaagtgatcgaatagttatatctactaatggattttttacagaccgaattgtggatttagcaaaagaatttcctcaaattggtataagaatatctattgaaggacttgaaaaaacaaataatgagattcgtggcttggaaaatggatttcagaggggatatggtacgttaaagaaattacgtgaaatgggaatgaaggatgtaggttttggaatgacagttcaggataaaaatgctccggatcttgtccctttatatgagctctctaatgaaatgggaatggagtttgctacggcgagtctacataatagtttttattttgttgaggcgaaaaatattataaatgatcgcccgatggttgcaaagaattttgaaaatctagtgaatgaactgttgaagagtaatagtccgaagaaatggtttagggcatattttaatcatggacttattaattatatatatggacagaaaagattattaccatgtgatatgagttttgacactttttttattgatccttatggagatgttatgccatgtaatggaacaaaagataaagaggttatgggaaatctcaataatcaatcatgggatgaattatggaatagtgtggaagcagaaaatgttagaaaaaaagtacgttgttgtgatagagattgttggatgataggctcagtttctccggctatgcacaaatatatttggaaaccggcttggtgggtatttacgcataaagttaagagcgtttttggtggaaagtattctatgtatgagaacaaaatatgcagagaatatcgtgacggtaaggtgtgtaaagatgaattggataaatgtagtacatgtgataaaaactgcattgtaaataatggcttaagtgaagctagtaaggcacagttggttggaaaaactggtgaagaaatagttgatgctgatattgcactacagatgggagaaaagtcatgataaaagttttaatgacattacctgtaaaaataggatttgatggtatgagtaaacaggtattatcttatggaaaatatatggacaaatctgatgttattattgatttggtttcttgtagaggatttgatcctaaaatgaaatctaatgttgatgaggctaattttcataatatctatagattagaatatagagatacaaatcagataaaatattttttagatctttataaaattatgaaaaaagaaaaatatgatgttattcatgtaaatggacagagtgcgactatgtcagttgagatgctggctgcgaaattagctggttgtaaattgagagttgcacattctcataattcgagatgtttgcataaaaaggctcataatatgctgaaaccattatttaatgctacttataacgatgctattgcctgtagtaaggaggcgggcgattggctttttggagataaaccatattggattttaaataatggaattgatattgataaatataaattttcaacaacaacaagaacagaatttaggaaaaagttaaaattatcagataaagatatagcagtatgccatgttggagcatttgaaccatggaaaaatcataagtttttaatagacgtttttgatgagattaaaaaggaaaattcaggatataaattgttcctgtttggaattaatggaacaacacaagaaagcatattgtctctgattaatgagagaaggcttgaggatacgattagatttatgggaactgcagatgatattaacaattatttacaagctatggatttaatgcttcttccgtcattatatgaaggatttccagtaactgtagttgaatggcaagcaaatggtcttccatgtattgtatccgatacaattacaaaagatgtaaaaattacagatttggtaaaacagttatctatagaggatggaactactatttggaaaaatgaaatactaaagcataataatgaagtagatgttgaaacaagaaagtcatattatataaaggtttctaaggcgggatacaatattaagaataatgtgtcatcgttgaaagaacactacatagaaagattaggtgataattagtggttaatatggtagtagacattattgtgcctgtatataatgtgtcaaaatatttgaacaaatgtattgagagtttactggctcaaacttataaatatatcaaaattatattagtagatgatgggtcaacagatggctcggaaaaaatatgtgataactatgctagaattgatgatcgcattaatgtaattcacaaggaaaatggtggtttagtatctgcgtggactatgggcataaagaattcaaagtcagaatgggtagtgtttgtcgatggagatgactgggtggaatataagcatatagagctacttgtaaaagagcagatagaatcatcggcagatattgttgtaacccgaatgaaacaaatcgataaaggaaacgagaagtttattgaattttgtgttccagaaggaagatacattggagaaaaactaaaaacggaattacatccggttatgataaatgcaggtggatttgaaagaaggggtgtaccattttctagatgtagtaaacttattagaaaaagtattataattagaaatcttaaatactcatatgaaaaagctacctatgaagaagattttaatattattgcgccatgtcttatggatgcaaaagcaatatcaatgctaaaagtagagggagcagcgtattgttatagaaaagttgaaagttctatgcttcatggatatgatcgtaatatgtctaattcaatatatcatatatatccaatattgttgaaagcatgtaaatcaaagaatatggggggatttgtcagacagattcaatttgaatatgtttctgcggttgtcagattatttttaaacgaaacaaaaaattctgaaggctatataaatatgagtagaattataaaaaaatatttgactgatagattatttcagcaatctcttgaaatagttgatgcgagaatgtatcctgttaagtttcgtataatactatatttcttaaaacattatgacagttttatgagtaaaatcataataaaattgatctgtttgattagaagacaaggaataaatcatgcatagatttcagattaaaattagaactatttttttagagctattgttagtatatccagttataaatataatgggatgtgttttttttcatggagacaatatgacaacactttcattgagttattgttctatattgatactattatatgtgactgatgttaaaaaattatcacgaaaaaatatatatattttaattatatttgcttttatattaattttagagatatatagagatcaaaatatgtttattctatttgtgacttttatttttgctaacataatgctaagtatatattcttctaataaaatcatggtaaaagaatatattgaatattttgtgaaaaaaaagaaccagttttatatagttcagttggtgtttttaataatcctttttttatttgttatgaaaaatggccttacagcgggatggaatacttgggttttacagggaccttacaattatccacatacattggcatatctttttttatttatgatgatgttagacactttttattttatagagtttcgagaaaagtttgtaattctatttatagcagtaagctttgcttgtattattttgacagcagtaagatcagtcttaatagctagcattatagtaattgggtatatattttatagagtgttttcaagaaagcaatttataaaatttattttgtattgttttttattatttgtttgtatatatatagcatataattatggattgtttgatgcgttgcttacaaaaagtaaattggcattggaaaatggatctatatctaatggtagaagtagtattcttattagctcattatatgcgttgaaacagggaaatgaatatgtaaatacaatttgtggagtaggaatgacaaatttattaaaatggaatggaataaatataaatgcaaatattcatgcacataatgattttgttgacgccttagttggttttggattaattggtttaggaatatacgtctataattttgtgaaattctgtaaaaatagttttatatggatgatgggaacagtgggatttttagcgtacgtaaatggactttttgtatatagtgacattattccaattttaatatacgctaagctcttattttcacatagtaaaatacaaaaaaatagaatagggaaaagtttgtaattatgaaaagaattttttatttaagaacatattatcaagtaattgttgcacttcaaatggtaaatactatatgcatagatgatcaagttgtttttttgatttcagatgattcagaaagcacagaaatgcttgttgaatcgttgggaaaattaggaatagtttataagagtatattagttaaaacaaaaaaacttacttatcaaaaaagtatgattgataagatcaaagattttgttgaagtttgttttttgaaaaaaaatagatatgttatatttttaaaagaagtactaaatgaaaagtttgatgagtttattttttttaattatggagttgatacggttgctttctataatttaatggttagaaataatattaatcttagagtgtcttgcatagaagaaggaattttgtcatataatagtcaatttgataatgatcatgggaaaatagttgaaatttcacattatacaagaaaaatattaaaacgtaagacattaaaagataatttacataatttttattgttattatcctatattatatagaggaaatttagtacctgtacagataccaagaataagtgtggaagctaaaataacaggtatacttcggaatatttttaaaccagataataccatctatacaaagaagtatattttttttacttcagtttatgattttgaaggtggaaaccctattggggaatatgaacttgtgtgcaaagtggcaaaattagtgggaatagataatttgttagttaaaacgcatccacgtgattcaagaacaatatataaagaccatgggtttaatgtagatgtaaattcatctataccatgggaagcaatacaattatctggtgattttagcgataaagtatttttaacaataaattcaggaagcgtattgtcaggaagtacaatgtcagaaaaaccggttaaaactttttatatgtataaattgtgtgatattaaagagaataagagttgtcaaaaaaatgctcgagatatagaagcattactttgcgaaagttctatgaaagaagtttttagaaacgtaagaattgcagaaaaaattgaggatattttatgagtaaatccagctacttgataaagaacatgggaattttaactataagtaatttctcatctaagattttagtttttttattagttccgttatatacgagtgttttatcgacaaaggagtatggaacatatgatttggcagtatctacagcaacgttactatatccaattcttactttgaatattgttgatgctgtaatgagatttttaatggataaagaaagtgataaaaaagcaattgcatctattggcttgaaatatgtatctataagttcagttttatttggttttattatgttgtttttttatataacaggtatttggtcagatattaatggactagagggatatattttttcttattatatatcgtatgtgattaatcaattttttattcaatttgctaaaggcttagaaaaagtaaagaatatgggggttgcaggtgtattaagtacaatagtaacaataattgctaatttattctttttattggtaataaaatggggactaattggattctttttagcaaatattttggcacaaattgtatcagcaatttatctgtttttgaaaactgaaatatataactatatagaaataaaaagacaacctattgcacttcgaagagaaatgcttatttattctgtaccattgattgcaactgttgttggttggtgggtgaatagttgtgcagataagtatattgtaacttttattttgggtatttcggcaaatggcttactttcagtttcatataaaataccgcaaattataaataccattcaaggtatttttactcaagcatggcagatttcggcaataaaagaatatggtagtagtgatacagcagacttttatgggaaaacttttatagttataaatcttatgatgtgtattgtatgttcgtttctgatttttatgacgagaccattagcatatattttatatgctaatgatttttatgaggcatggaagtatgttccgtttttattggtatctagtgtgttaaattgtgcttcaggattgttaggaccaatattatccgcaaaaaaaaattctaaagcaatgatgtggtcggcaatagtaggtgctgtcgcaaatattattatgaatattgtatttgtaaatcttacaggaatccaaggagctacatttgctacgttagttagttcatatattatttatataattagaaagtatgcagtaggagaagatgtatatatcaataattattatgtgattattgtaacgtggcttattttagtagtgcaaggtattatagaaagtaattttatgaattattatttggaaatattatgcgtagtagttattattattatcaataaaaattcggtgtggcaagtacttaatttggtaaaaaacatatataaaaatatcaagtgaaaagagggtaaaaaaatgaaaacagtagcatttgttccaattaaattaaataatcaaaggacaccaggaaaaaatattaaaaaatttgacgatggaagttccttaattacagtttttttaagaaatctaattaaagtaaaatcatttgatgatgtatatgtattttgcagtaatcctaagattaaagaatatattgtaccaggagtaaaatacttggaacgaccagtatatcttgatacacaggaggctacaccacaagatattatgggagaatttattaaaagaattgatgcagatatttatgctgtatgtcattgtacgtcaccttttgtttctgtagagcattttgaagagtgtgttgctgcaacaaagagtagtgaatatgattcttcgttcacagccgaaaaacttcaacatttaatgtggacagataaaaacgaaccattaaactttgatccgacaaatgttccaagaacgcaagatttgccagtatattataatgaagtttcagcagcttatgtttttaaaaaggaagtttatgaaaaatataaacggagaataggaattaaacctcatattacggaagttagcggagttgaatgcgttgacattgattatccagaggattttgaaattgcgaatgcaatatatatgtctatgataaagggaggaaagtaataatgaagcatcatacaatgttgttagattgtacattaagagatggggcatacttattagataaaaaatttggtgatagtaacattagaggtatagtttctggtttggtaaaagctggaatagattgtattgagataggtttctttcaagatgaaggggctggtgatggaaaaacagtttatttaaattctgaagacgctaaacgatttattccgaaagaaaaaaatggatgtttatttactgttttagctgattgtagcaggtattctgttagtaatctggataagtgtgatggtacatctatagatgccgtaagggagtgtttttttaaaggagaacgttcaagggcagtagaaaattgtaaagtaattaaagataaaggatataagtgttttgttcaaccagttgatattttaggatattcagatgctgaacttatagatttcctacaggaaattaataatgttgaaccatattgtctatcaatagttgatacttttggctcaatgtatcaagatgatttacatagaatttttgaaataattaatcataatctaattccgacatgtaaagttggatttcattctcataataatatgcagatgtccaatgctttatctcaagagtttattagaatgacctatggtaaaagagagattgtggttgatggaacaatttctggaatgggaagaggagctggaaatactccgacggaattaattgctcagtatcttgtttcacaaagagaatataattatgatatagatgctattcttgatttaatagatgattatatggataatataagaactaagtgttcatgggggtattctacaccatattttatcgctggatgctatggtgctcacgtaaataatattgcttatttaacccaaaagaacagcattagatctaaagatataagatatattttaaataagataggtgctattcctagaaaaagatatgattacaatctcttagaaaaaacgtatgttgattatacatcgtctgaaattgatgattcaaagacaattaaggagttgtatgatgaattaaatggaaaggatatattaattctagttccgggaagcagcgtgacaagtgattattttaatgtacaaaagtatattgagaaaaaaaagccggtaataataagtgtaaattttattcatgataaaattgattcagattatgtttatatgagtaatgtacgacgttattctttgatgattggaaatgaaaaattacaaaattgtaaaaagataactacatctaatattaagacaaaaccagatgataatgaaatgattatttcatttaatgatttaataaaatgtggttggaataatcttgataattcgacaattatgttacttagattattggataaattccatttagatagtattgcattagcaggttttgatggatatgatgtgaatattaagagtaattatgctactaatagtttagagttatctaatgtaagagataatcctatggagttgaacgaagaaatccatagtatgcttgaggattataaagcaacgagaaatagtcatactaagattcaatttattactccttctaggttttcagaaatatttgatgaggggatacaatgattagatatttaataatggatgttgatggaacattaactgatggaaaaatatatatgggagcttcaggagaagttatgaaagcttttgatataaaagatggatgtgggattaaagatattctgccaagatgttatattactccaataataattactgcgcgagaaagcaaaatacttacaaacagatgtgatgagttgggcattaaacatgtctatcagggaataagaaacaaactagaaaaacttcattctcttgtagatgatttaagtgaatgcgcatatattggagatgatatattagatttgcaatgtatggaaccaataaaggaggcgagaggtatagtagggtgtccagcagatgcagctaaaaaagtgttaaaaattgcagattttatttctaaaaaagatggtggaaatggagctgtaagagaatttattgaatggttggagataaataaatgaaaaaatgtactatttttttaaaatcattattagtgatatgcttagtttgtatgtcaataggatgtacaatggtaagtgcgagtgatcttggattagcaaattctaagattgttgaattgggatctttcggttcaaatggggaaaatatatcttcatcgaatagagcaagaacaaaaaacatctataaaacatctgagcaggcatttaagtttgaaagcagcaaagcagcgggaatgagatatgcagtcgtaggatttgatgcaaatggcaagagagtgcttgattcaggctggcagacaggagcaacatacatacttggaaaagaagtggtaagctacagactgttattctcatatacagataacagaacaatgacgtcagcagatacattaaaaattgagagcagcataacattcagtgcggtggaaacaaaaagcagtgttattgaggtgggctcgttcggaacagatggaaagaatacagtgtcatcaaacagagcaagaacagtaaatagttataaggtatctgaaaagacattcaagtttgaaagcagcaaagcagcgggaatgagatatgcagtcgtaggatttgatgnnnnnnnnnnnnnnnnnnnnnnnnnnnnnnnnnnnnnnnnnnnnnnnnnnnnnnnnnnnnnnnnnnnnnnnnnnnnnnnnnnnnnnnnnnnnnnnnnnnnaagaagtggtaagctacagactgttattctcatatacagataacagaacaatgacagtagaagatacattgaaaatagaaaagagtctatctattataccagctagcgcaattgatgattgggaattacctataatgtgagatatatcaatttactatcgtgattacattgaaaaaacaaatcaatgtaatcaccatcatattaatatctgctatgattagtaaacgtcaaatcatacgcaggtcgttaaaatcaacgccgcctattatgagcgacgtggtttccggcattcatccggaaggctatctgaccatggcatgagataatccaattttgtaggatctatatttcctctttcatcacagagtttaggcaactctgtaaggatatatttaaagtaataatacggtcgcagattattcagctttgcggtttcagaaatactatataccattgcgctggcagaggctccttttgcagtattgtggaacatccagtttttcttgccaaggcaaaaggtacgtatagctctctctgaggcaaaattattaattggaacatcaccatcttcgagaaatattcttaggtatttttcctgattaattacaaaattaagtccatgacctgttttggattttggaggtactgtacagtcactcgcctgctgttttacccacgcaaaaaactcttcaaccatcggcttgatcagttcctgccgtttttgaagacgttcctttgatgagcgcttacatacattgtgtcagtataaaaatgtagacattatagctagcaggagtggtatgcgtggatcatgtgcatctaagcgtggtaatatcgccaaaactaagtatttaaattttataggatacttgaaaggcaaaagtacgctgatgatatatgatagacatccggagctacaaagtaaatgggataatgtattttggaatagaggctattaagtagaaacaattggtaatatcactgatgaagcagtgcagaagtatataaatgagcaggcagaagaatctagaaaagaagattcacggaggagcgttttatagacgaccggtaaaagtgcatgcgataccgccctattgggcgaagcagtaatgtatgccctttggagggctaaaattaaaccatcacttgaagaggtggttgctaacatagaaaaaagttaatatattgatatagaagattgttgatagaattttagaaaaatagtaattgagtaagtaaatgaggagcataacaatgggaaaggcagttaagacaaaaaaagaattagacgaaaataaacgtgcgtgggagagtacaacattaaaaattggattagtttcaagtattgttactgttttaaatttgatattggatggtatatcgatattttatgttaaccgtttagtgtttgcaataataggaattattgttgcagtaattttagtaattgttttttcaagcaaaaaattagaaaagaaaattgataaaataaaaaataaagaatatgttagaagaataatagaggctacaagtctttcggcattgtttacgtttttaattgagcgtacaatcataccttttgcaacagaaaatttccaatgtaaaatttcggctatatatatgatcgcaatatttatagcattacctgtcattacttttatagtcttatttaaaaagaaagaatggaattataatgtagattaatcagtttgtatttttggggtctctttctgggatcaggcaccattaaattggcaccattaaattttataaaataataaattcaatacacagactattgattgtatataaacctgacttttgcaggaaaataagtataaaatatccgtcaagcccagtaatacaaggcttggcgggtttgttgtttttccagattttcagtaagcacaaaataattcgatatattgcataactgatttgtaaaattcataatgaataacaggaagtgctagtgttttattacattttgctttgctagtgaataatctggttctaattgttccacctgtccagtgtaaagtgagccacttcatctacaattgtgtttatgattccttatcttgtctcacttgacctcttgattgtccagccatagaccattatactgtccttattaagagaaaaggaaaggctccggagccccctcctgcaagatcggcttccggaaccttggtaaacaccatatatattgtaacagattttacaagaaaaggacagcatatttttatcagagagcagtgaatatctttgtctcatatgtcagaaaggcagtcttatcttccgtgattactgcagccgcattataagatacgaggacggaacacatgaatggctcagaattccaaggcatcagtgcagcaatgataagtgtcgcagaatccaccggatgctgcctgatatacttacaccgttcaagcactataatgagtttaatatagaggagcatatgaagtcgataggttacagactgcttggattaagcgaggaactgctggaaacaggcatttcgctgctcagtcacatgtaaaatgtagtaaaacgcttgaatctagcaaacagatgcaagagttattaaaaatctagcgttggaatattgagcgcttactcaaagggaggaaatctttagaatgaaaggtcaatatacgaagctttttctaattggaaatggatttgatcgctggcagggacttcctacctcttacgataattttagacaatattattttgaacacattcttgaaatttctaagcaactaagaatcaaaacagaagtggataaagctggaaatataattacgcctgtcgaaaaaatttttggagatatttttaatcccaagaaattaccaggtgagttcttctggaactttgaatcatcaa

SEQ ID NO: 172 - DNA, 37800 bp, unidentified
  source 1..37800: mol_type = unassigned DNA
tgacaactgcgaacttccgaagaattccttaatagcagctgttacaggcttaatattaataagtgactgtggagatattccgctaagatcctgtgtagacattctctcacggaccactctttccattcttgagataccaattctgaactggttctgaagaagctctcctacagctctgatacgtctgtttccaaggtgatcgatatcatccttagtaccaacaccatattcaaggtgcatattataattaatagaagcaagaatatcttctactgtaatatgcttaggaataagatcagcaatattcttagtaatagcttccttaatatcctctaaagattcattctcagcaagaatctgtgcaagaacaggatagtatacatactctgttacaccaagctccttagcttcttcttcgctgatatcaacccatttagtaatatcaaccgcacggttagaaagaatcttaacaactctgtcagatactgtaccatcagcagccttaacttctacagtaatgaatactgaaggaacagctgcatcctgaatagcctgtgctgattctcttgtaagcttctcacctgctgttgcaataacagttccgttctcatcaacaacatcctcagcaagaacctgtcctgtaattctgctcttgaaagaaagcttcttattaaacttatatcttcctacgtgtgcaagatcatatcttcttgggtcaaagaacatacctgaaataagtgcttcagcactctctacagataatggttctcctggtcttaacttcttataaagttcaagaataccttcctgatagttagtagaagtatccttctccatagtagcaagaagcttaggttcctcgccaaaaatatcaagaatctccgcattagtaccaaatcctaatgctctgataagaacagtaataggaaccttcttattacggtcaaccttaacatagaatatatcattagcatctgtttcatactctaaccatgcacctctgttaggaattacctgacagctgtacaagaaaatcttaccatacttatctttctgtatatcataataaataccaggtgaacgtaccaactggctgacaataactcgttcagcaccattaattacaaatgtacctgtcttagtcattaatggcaggtctcccatgaaaatctcatgctcgctgatgctttctgtctctttgttatgaagtcttactgtaaccttaagaggcgctgcatatgtagcatctctttctttacactcttcaattgaatacttaacttcgtcttcacataacgcaaaatctacgaattccagacttaatcttccattatagtctgcaattggagatatgtcatcaaagacctctttcaagccttcattcaaaaaccactggtaagaatccttctgcacctcaataaggttaggcatctcaagaacttctttctgtcttgagaaactcatacgcattgccttgcccgacgttattgggcgtaatctgtttttctccattgacgtttcaccccttagttttcttcacattaatatattacattatcagtaaatgtgcaaagaataagcacaatttaccacaatagtgcattgtccatagtacatcaaagatatatatatgtcaagggatttttaaaaatttccatgaatattcagaattgtataaagataatagtgtttctgccatagctggcataataaaataaagatgtgatttatagaaaaaagaaaagacaggagccgtgaaggcccgctgtctttcttattatattcattagaacaatcaagtgaattacttaagagtaaccttagctccaacttcttcaagcttcttcttgatttcctcagcctcttccttagaagcctgctccttaacaaccttaggtgcgccatcaacaacgtccttagcttcctttaatccaagacctgtgatttcacgaacaaccttgataaccttaaccttctgatctccagcttctgtaagctctacatcaaattctgtcttctcctcagctgctgctgcgccagcacctgctgctgcaactacaacgcctgctgctgcagatacgccgaattcttcttcacaagccttaactaaatcgttaagctctaatactgataaacctttaataacttcaatgatttcctgtgttgtcattattataatctcctttttaatattattctaaaattgaaagagtatctatgctgctttcatagttaattcagtgttaaactgattaagcaacttcctcgttcttctcagcaatctgcttaataacacgagcaaagtttgtaataggtgactggatacttccaagtaactttgaaagaagttcctctcttgaagggatagtagcgattgtagcgatacctgctgcatcgtagaatgttccttcaacaacgccacactttaactcaagagcattagctgtcttagcaaagttagctaatattcttgcaggtgctgtagcatctgtcttgcagaatgcaatagcattagttccttcaagagcatcagtaattggctcgaactctgttccagcaacaactctctttactaaagtgttcttataaaccttataaaccacaccagcttctcttaactgcttacgaagctgtgtatcctgttctactgtaagaccgctgtagttaactacaacaacgccctgagcgccgtcaaagttatctttaatctcatcgatagtagatgtcttaaggcctacattctttaaaatagccatgaataattacctcctgttagattcttgcttcatatagaagcgattttgcctaagtgaagattattcgtctatagtttccctacaaacaaaaccctctctgccagcgacagagagggaataattaatcaaatccttaaatcctcggtaggcgtgttacctttaaccatcatcagtaatactgaatccggacctgctgtctacggcaaaatattatgttaacagcaaaatgctgctcacaagctgatagtatactatcaaaatatattaatgtcaaccgtttttaatcaaaaatctgattaacccacatacttggctgtgcttaacttaacaccaggtcccatagtagaagtgagaactacacttctaagataagctcccttaagtgaagatggcttagccttaacgattgcatccataatagcctggaagttgtctgataactgctcctctgtgaatgaagccttaccaattggcacgtgaatgatattagtcttgtcaagtctgtactcgatcttaccagccttgatatcattaacagcttttgttacatccatagtaactgtaccagccttagggtttggcattaatcccttaggaccaagtacacgaccaagacgaccaacaacacccatcatatctggagttgcaacaacaacgtcgaactcgaaccagttatcgttctggatcttaggaataagctcctcgccaccaacgaaatctgctccagctgcaagagcctcatcagccttagcacccttagcaaatactaatacacgtacagtcttacctgttccgtgtggaagaacaacagctcctctgatctgctgctcagcgtgacgtccatcacaacctgttctgatatgtgcttcgattgtctcgtcgaatttagcagtagcgttcttctttactaatgagatagcgtctgctgcttcatataatgtctggcggtcaatattcttggctgcctcaacgtatttctttcctcttttcattataaacctcctagtggtaatatcggaaggattctatctttcctcccacaataatcatgaatcaaatgtagattagtcttctacaacgatacccatactcttagctgttccttcgatcatagaagtagctgcttcgatagatgcagcgttaagatctggcatcttaagctcagcgatcttctgaacttctgctctcttaatagtggcaaccttagtcttgttaggtacgcctgatcctgacttaatgttgcaagccttcttaagaagtactgctgcaggtggagtctttgtaataaagctgaagcttctatcagcataaactgtaataactacaggtatgataagatctccctgatctgctgtcttagcattgaactgctttgtgaattctacgatgttaacaccgtgctgaccaagtgctggaccaactggtggagctggtgtagccttgccggcaggaatctgtaatttaatatatcctgttactttctttgccattttggcacctcctaaaaataaatgtggtaattggcgaccatcataatattaccctgctatccatccttcaagaattgaccatcgtgcgattcttgtgaatgaatttacacagtaaattcattctggtctcccacgtcccaggatcgggactgcttcttacaataacttcacatctgtgaaatcaatctcgaccggtgtttcacgaccgaacatctcaacattaattgtaaggcactgcttgccctcattaatattggtaatctcaccaactgtatcttcccatgcaccagagaggatcataaccttatcgccgaccttgccagcgaactggataacaggcttaacttcctgttcttcctcaaggcttatgccgagattcttaatttctgttggtgtaagtggtactggctttgatccaggaccaacaaaccctgtaacacctcttgtgtttctgacaacataccaactatcgtcgttcattaccatcttcacaagaacgtatccaggaaacattttcttctgagcagctttcttagagccatccttaatctccactactgtttcaagtggaacgataacttcaagaatctgatcgtgaagatttctgttttcaactgtcttctcaatgttagccttcaccttgttctcataacctgagtaagtgtgaactacataccattttgcgtcatccatacaatcacctattccttattttacaatgaactcaattccaaagcggacaattaaatccacaactgcaatgattacacctaataatacggacacagccaatacagctacagtttccttagtaagcgactgacggtctggccaaataatttttgaaaattcagcttttaaacctttgaaccagttctttttctgcttcttagcttttacagtatcacccatgaaatactcctcactgtactaattactttgtttccttgtgtaatgtgtgtgatttacagaacttacaatacttctttgtttccattctgtctggatgagctttcttttccttagtcatgttgtaattgcgctgtttacactcagtacatgccaatgttatctttactcgcacaacttccacctccaattattatttttgtaggtgttaaaacaccaattggtttctttgcccgcctaatcaatgttgggttgttgaaattcaggcacgcaaaaaagaccgcttccatagccgttctaatatagcacagtacattccaactcgtcaacaacttttttaaagaaaatatagtgacaaaaaatgaacttcatattataatatttgtacaaaaacatacgatatatataaggaaatggatttccttacattttctaccgattattacagacaaggaggtgactgttatgattagcagcgtgtacagctattatcttgcccagtatggacataagactaactcaaagtacgatacacacactaaagcacaattaaagaatacatatggcagagttctgaaatctaacagtcagactcctacatataaggcagatatgtcagaggctgcgcagaaatatgcaatcgaccttaaagagaatgccagagaattaagtaacattgccaatgagctttcaggaagcgacggtcacggcatggtatttaagaaatcagcagtgtcagacaatcctgatgcggtaacagccacatttataggcgacagctcatctgccgatgatacaagccttgatatagaagtccgccagcttgcaacaagccagattaataccggacattacctgcagcctaacagccgcacagttaagccaggagattattcatttgatttgaacatcaataatctgacctatgaattccagtttaatgtagatgaagaagagagcaattctgacatacagaacaagcttgccagacttattaaccgttccaatatcggacttaatgcttctgtaagtgaagacagcctcggcaatactgcgctgaacattgaatcagacatgacaggtgtaagtgtaatcaagcctacaatatttaacatcaggcctaataacgatattcagacagacaatcctgatttcgtggaaggttttgatgagcctactatggagaagaacactaacttcattgaaacatatggtcttgaccgtgtaacacagtatcctagcaatgcaatcttttctgtcaatggagaagaacgctcatctgcttcgaatgacataacaattaacaaaacatttgcaatatcatttcataatacaactgacaagccggcaaccatcagtcttaaagatgatgctgattcaatcacagaaagcattacagaacttgtttccggctacaacagacttgtttccatcgccgcagataaagagaacgataagtttgagggcaatgccaagttaaagaaagaattttcaagaataatgaaggcttaccagccacagcttgaacgcaatggacttacagtaagtgatgagggttcgcttgaagttaataaggtggttattcagaaagctgcttctgacggcacactttccgatgtatttaacgctttggattcattcaagaaatcaatccaaagaaaggctgatgatatctccatcaaccctatgaactatgtaaacaataagattgtcgcttataagaatccacataagcctgtgaatgacccttataatctttctgcctactcaggcatgatgtttaatggctatatctaactaccataatataaaataaggcatccgtctggttcatgtaatacataaaccggcggatgcctttatgtttcttattattcattaatcagtctgcttcctgcatcatgtaactgcttaacaaatgtactaagccttacaagtgctttagaaacatccacatcatcatcagcctttacagcctctgaaagctccttaacaccagaattagcttctgcctcgtcaactgccccagcctcaataatatccttagttccattatatacttcaaaaagccagttaagcccttcaataataacattcaccgcatcatgagtctctggaaaaggaactcctgaaagttcttctgagactttctctattgctccaataagcttctcgctgtaaggaacagcttccttaagtacatctatctgctgctgtctgtaatcatccatgattctaatcacctttctttatgaacttatagaatatatatcggctggattggtggaaagttaatattaatcacatgtgaaaatgctacactcttaaccttccactggcaacttcttcacaaaattcatcaacactgcctttaaaaccaactcttctaatctgcttaatcaattcctgctccatgtgaccgtaaaatggatacgtatgatccgctgtgccttttactggaatcatataatcgccaaactcagccttaagcacttcatcataattttttggtgctttaaccacaaaattctcaaacggcatttctattacatcatcaaagcactctttacgcatcttataactgtcattatcaatccataaagccatgctgcttacatagtcagcttcatctctgtaacataacgaagatactttatctatcagtttccatatataattcttagtatcttctcttaattcaatattaacattacataattgaccaaactcagaaacaaatttatctaaagaaccctctctatttaattcattccatttccctaaaatttccattccaagctttataatctgcttctgcatgtctgcaaattctttgtctttagaaatataatccaacggaaaaatatctatcccagccctctgatatggaaatccatgaaaatacttcatataatcattaaaatcccataattcttcatctgcaataactcttaactgtggaacaaatgctgcattttgcaaacgctcacaatcagcatacatgcctgcaactacaaagccgtatggcagttccccaggaagaatcctgataagttcattgtattcatctctcataagactgatgtcaatatcatcatcccatggaatcattcccttatgtctcacagccccaagcaatgtaccaaagtctgcaaaataccttattccatttctgttacatatatcagatacaacctgaaatacttccatctgcgcagcccatgctctcttcatcatagaagatatttcaaaaccctctcttacttctgtattaaaaaaatcattatcaaacttcaaaccagcaccgcctcgtttaatcaatcgtcaataaactcacatacagcttcctcatcaaccgtgccatcagactttcttggcaaaggttcttttcttaacacaatcttctgaatctcccagcggtaaccttttttctcgttatacttgtcaatacgtctcttgaatatatcctcagttgcactcttatcaataggcacaataaccgccgtaagcctgttattgtaaaatattataaaaccttctgcaactccattaatagctgtaatctgttcattagttcttacacggcttatcttctcacctgtaggcaacagaataatatccggattacgctgcaacagaacaagtctgccggcattgttaatccttccgtaatcacctgtatgatacacaccgtcttttaatacattttcagtagactccacgtcattataatagcctttcatgacacatggtccacttacaataatctctccatcatcagcaatagatactgcattattatcaaaaagagtatacgaaccatcgtaaagctcattaacccctacacaacccgaagtctctgtcattccatatatattataaaccttcaaatcactatcacagagattctcaaaaagtctgaacgggcagcttgcaccacctatgataatagtattgagttctttattaaacccacttatagctcgctgatagtcaatcatagaaggagtacctataagaatagttggattataataataagtatctgcatcaacatgtcttaagcctctgcctatacacaccatagcaccattatacagaggccatatgaggctgtatataaatccaaattcattatgaagcgaaatctgtgcaagcacaatatcatcacttgtacattcaaccctgctgtttatcgccataaccgcattaagaatattatcaacagacagaacaaccggcttgtcacattcgttagctgtagccgtaaacatgataatatcgccctcctgcgtattctcatcatatataagtccgtcaacattatccttctcagcacttgatatgataatagaattctcatcagagagaatatactggttagtagatgtcagtgtataattaacttccgtcttcttaagaaggtcaaccctcgaatcatgaggaaggaagaaatcaacaagcgcaagctcctttcccgcaacaatcgttccgaacatattaacgatccatctatatgaagccggcccgaatattgcaatcctctttccttcaaatttctgaaaatgtaatgccttcttagttacatcatcaaaaagcttcgcataagtaaccttcatcgtatcataaacgacagccacagcgtctggctggctctcggcattactctttaacatattataaaatgtattcttatctgtcatgattttctccgttcttctatcgtcaattgttatgctacacaataactgttataatgtattatattatcatttttaaatttaattgccaactaaattagtatataataagaactataaaacacatgtcaatgaaaggaaatatatgaataatatctctgttataatgattgcgcacaacaaaaaagaaatcattaaatctcagattgaacaattatcttcaattcacaacatcagtatggattcaataacaatagttgataaccactcttctgataatttatgcgattttcttgtttctcaatcacgcttaaactacataatatgtgatgataaaattgaaaattattctttaattctcaacacatgcatttcagaatttgttaatactcaaaatgatatactcatattagaccctgacagctttcttcttcctgaaacattaaaaaaactttcgtcagcattaaacccagataatggtatatatgctgtatgcccgcaaaatatattagatatcagcaatgatatacactctttttctgcggcattaaactacgtaaataacaccgatgtatctaaaataaatttattcaaaattattaaacctgaaatcaacactattttattgagccataaattattatctgaacatacattatttgattcacaaattatatcagatgagttatgtttgacagacttctgtataaataacattttaaatgatcaatttacttatatggcagataatgtatatcaatattatattggcaatcataattcctattattcccccactaaccgtaattgtgatttagcatatatcagacaaaaatggcacatgaattacattaacactataccaagcagtaatcttatcagcatgattaacgaaccaattgataaagaacttaatgttcttgaaattggttgcgattgtggcgcaactttactggctatacaagcactttatccaaactcaacactatatggtatagaaattaaccctatttctgcgaaaattgcttcgcacattgcttcagtaaaaacagctaatatagaagaatctgttgatctctggaatgacattaaatttgattatatattatttggagatgtattagaacatcttcgtaatccatcaaaagtcatacacaactgccgccacattctaaagaaaaaaggtaaaataatcagcagtatacctaaccttatgcattttacggtattacatgaacttatcaatggtaactttcattatacagacacaggtctattagacaaaacacatatccacttctttacatacaatgaaattgtaaaaatgtatgaagaaaatgattttaatgttatcaacacggttgcatctaacttaacgcctttgttatctaaaaaagactctgatttcatagacgcattaactaaactatcatcacataaaaatgatatgctattcaaagcctttcaatatattacacttgcagaaataaaagatacttaaaacaattaaacattttattattaaaccacctcaataatgttaatgaaaatatatttttacagatataacaatatatgtgaacctgctataatcggcacatttaaaagacttggtttacatggctgggaatacttatctatcacttatactctttcaggaaaatatcacgaaactcatcatatcttgataaattaagaaatccatcatcatggatacaccacggtttatccatatatggcactacaactttataaccatttcttctgaattcttctccctgcgacacatcataaaaatcccagcctgtgaataaatcttctctccatatgatatcatactgtgtagctataaatagtccatcaactgcttccacttccatatatggcctttcattcatgtcagatgcaataaactctttcgctgttaagacattacttgaatatactcttccaactctaggaccattccacatacagccattctcaggcatgttcggtgttcctaccaccccaagcattccaacatttttatcttcgaatattttaagaatatcttccagcaaattaatattaactataaaaacatcctgatgcatatatattttatactttgcatcagtctcattcattgcagcattatagccagaagtcattgagtcagcattctttaccgttaaaacatctaataaatatccatctggtacagtcaatctgtttatataatgtaaacattcgctaatatatttatcatcgttataacatataataaaacatatttttttatcattcataatattatctgttaatatcctttccatatttcaacatttgaaatgctttatcttctttattcagtcttatgtaacactcacacaattttaataaaacattctttttatcaaagcatgctgttcttataatatactccacggctatcactgacagtttctcttcttctatcctgtttaccgcctgcatcagtgcctttgattctgtctgaaactcaattctccacaaaagaaatttaatatcacatattaaatcacatatttctcccagactatccacattcatcaaaatattttcttcaatatgtgcagctttttcttcccggtatatacatattgctatatacatataccccatccttgtatcttctaacatatcattctttctgaattcttcatcggcaaataaatctgataactcttgctttgactgttctgtgttctcattcagaagactattaatataccgcacataatcttttttagccatgtatcctccctttaattaaacaccctattaaatatctcttcaaatctgacatcatatgtatgtttttcttcaattttgccaaatccattctgtgcaatctgccttctttccgcatcatgtgacagataatatttacatttattcattaaatcgtcaattgaatcatatataaccatatcttcacctggaacgaatacatcatataaatccgcctgataattagacagtagaaatccgcctgctccacatatatccatgcatcttaatggaattccacttttaatgcttctgagtgtaatattgagattaattctggaatttctgaatacatatggcatttcattataataatctacagttcctttgttatttacatttatgaatcttacggatgcatccggtgtatagagattaattttattttccctgcctaattccctgccaacccgagacaatatatctgttctttcatcagtcgccattcttcttgcaaggaaataattagcatacacatactgtacagtttctaccccatcctcattaggcttaaccggacacactcgcatcatttcatcaagtacatcacctttcagcatatcttctaaaaagaaatacccatatatgctcctctgtactttcattattgcgtccagatatcctttcgtataatcattaactccacataatctatcataaagattatgtttttcattgtacatagagcctataaatgatatatctccagcatataactcattttttacctcatattcatcattaaacatcctctttaatctgtctgtattaacagccagagggcaataatatactgtttctataccttcattactaagttccatatattgtgttttatcaaatataaacacatagttacacggattaataatagtatatgaatacaataatatttgcgggctatcataaacaattgatatgtatgggacattccttttattacagttattagatataactgggctataattaaaagtaaatacgcagtcaaatgcccgtccatctacaccttcatcaaattccttttcaaatatatcatcaagttctgtacattttctctggttcaattgttctgaccataccactttgaacctatattcctttttttcgaaacattctttaacatcttcaatgccaaaattatagttataaaaaatcaatacattcactttcaacacctcatccgttctattgatgctattatactaaaaaaagctggaacttagcaaatatacctgctaaattccagcctttaattaaagttctattgtatattactgtaagagtgaaagcacaccctgtgtctgctgattagcctgtgtaagcatagactgtccagcctgtgaaagaatgttattcttgctgtactgtaccatctcatcagccatatctgtatcacggatacgtgattcagcagcctgtgtattctcagcattagtatcaaggttattgattgtgtgctcaagtctgttctggatagcaccaagctttgatctctgcttagatactgattcaatagcatcctgaatagactgcattgcagcacctgccttagcattagtacttacctctacagcgctaacctttaagccctttgctgatactgcaagactaatcttaacatccattgtctgtccttcaagagcaccaacctgaagctttcctgagaatccacctgttaataagtcctgcttattgaactgtgttgttgatgaaattctgtcaagctcttcattcaactgtttaatctcatctttgatagactgtctgtcaactgatgtgttagtatcattagcagcctgtgttgccaattcattcattctctgtaatatagaatgtgtctcattaagagcaccttcagctacctgaataagtgagataccatcctgtgcattatcagatgccttattaagacctctgatctggcttctcatcttctctgagattgaaagacctgctgcatcatctgctgctctgttaatcttatatcctgatgataacttctctgtagacttctgaagagcatttgttacaactcccatctgtctgtttgtgttgattgctgataaattgtgctgtactaccataattaaattcctccttgaaataaaaacttcctataattaaactatatgtttattatcatttctgatttatgttttatatatcggaggaatttttcaatacttaacccctgaattaaaatttattcataattattttcattcatccattctacaagttctattacccttttattatcaggtgcatacatattcattttatctaatatattaagccacaatatatcgcctgaattcaacaaattatagaatactccatctgaacataatgcagcatctacatcaaactttctttctatatcttcgctccaccctcttctatctttattaaaaaagtctggttcatcataatatcgttttgcatctttttcaaatattattctttttatctggtcaaatgtttccctataaaattctttttcaaaatgtgctccattaagattatcccaacaatttctgtctcccataaaatatttagacaaatctataacccatggattatatttttctataaagtatttctctaaatcatatgcattctgattgtatttaggattgggctgtatcgccattctaaaaccgtctggaatgtatttaactttgccatccaaatcaagataatatgaattacatctgaatctattaagaattatatggtcactatcatatttagtcattattttctccatgaataaatcaacatatgtataccatatccatattggcaattcgtataaattccatttatacattttgtcctgatactttctaaataaatttgtacgacaaaactcattagcttgagttgccatacatgtatttttatacgacaaaaacattatgcccatgtcatagaaatccataacaagataatctgcatccgattctaataataaatttaaagtttctttgttaagtgtttgttttaaagattgcagcctcgatttatcatagagttcatctactgtaattgcttgcacctcttcctttgtaaaggcaggtggcatcatagctgcaacaatattttgtttgtctagaaaatagccgagttctaatctatcatctgctattccatgttctgattgaactccatcgagtaaagatactcttgatatacaacttcccaaaacatttatttttatcttttgcttcatttctgtgatataccccctatttgtcttttactggttttatcaacactttgagtggaaaaagaacaatattcttttcccacttttgtagttcatcaattatttatcctgttttcaatagctttctttagcttagtagagcttgtactctgcgtatacggaaagaataccatagtagaaccatttttctccaggaactctttctcagcaagccatgccggatcatgttcataatcacttcctgagaattgtacatcaaagtgatatatcttaaacatatccctcgttccacagaaatcaagtggcaatttaatagcctcatcaacatatttacatgaacggaccatctctattctttcatcaaaaggcacaaaaggctcagcctgcttattaagtcttaccccttcatcagataccacacctactatcagatacctgcactgctccttagcccgcttaaacatattaagatgtcctatgtggaacaaatcaaacacccctgctatatatcccacattgtacggtttatctatgtctgatttattcaatcctgtcacaaaattattttcctgtactgctgccagtctttgtgccacctgttcttttctcttatttggataatcatttcccggatcatatatatgataatcctttattcccatatcttttaactgattaacaacaccattatatcccttaatacatataataatatgtctctctctttccggaatatcctttaatatgtcaggtgaattaatcggcactccctgcattgttgttccccattttgcactgttattatcaataatagagtaaatgtcataatcatctgcaaattgaaacaaaaatttctctgtgaatctgcctgatccaaaaagaatcagctttttggaatcatcaaatctttcaaaaatattaacaaaaatttcctgatattgctttgcactgtaattaatcttttccctgttagtataaagaattctaccatctactctcttattctcataatatggtcttaaaggcttctgattccttaaaacatctgtaaatcttgatgacatacgctgccacatatcctcacattcagataatccatatcggtcaaataattcccttcttggaacaatcctctcaaattccttatctgtgccatcatatataattgttattgaacgatacattacagccttcgccggacaattctcccaataaaattcctggtcataatatatgaatctgctcttagcatccttagccgattcatcataaaaacaattgagtggaaccatatcaatatatcctctcgcaagtacaggtccaacatctcttccatccgcactgttcctatctttttcagataatacccctgtatgctctgatgaatcaagaattaattcatacatatcatccattgccttaaaaaatgcatttctatcttttttagcaatagcctttaattcattcatcgcaaccggagcatcaacataaggcattacaaatgtattattctcgacagatgaatcaactacatttattcctcttgcatgcaaatcattaagattatcctgcatctctttaagtttatgtattccttctttgtaaacagccctcttaattacatttctgactccatcatgttcacatatgctggttacaagtgcattatcatgtcctctgtcaagtgatatggttgcatgaagggtatcatctaactgtccgtccatgctgcattctataatgtaagcattagccatcttatgaaacatgccattctttattaaatcagtatacaggtactgctcttcaagaaacacactatccggatagttataaagagggaaataccgcatagccagttcttcaaccggttcatacccttctgcatatacaagctgtgtttcctgcaaagatggcattactgaataaaatttatcattcacaaatccagcctgtaaaaacatcgattttaactctgccatagaataacatcttcctgctatagaatcccggtctgcatccgacaatctcctgtaattctcaatcccatcaaaattgtgattagtatatgggtctctgtctccacatatatacttaatcgcatatcggttttctgttccaataacaagccttccttctgactttaacaatccatgacatatatttaataacttttgtggatatctactctcttcaataacatcaactccaactatataatcatatgcattacccgcaatctgattatttaaaagctgttctacactgcaatcatccactttttccttgcttttaagcagttcaagtaccgctttatctgcctgtctggaatatatatataatattctgctgtcttgtctgaaattgtaccagactaatgcaccttttgaaaaatccctaattattgattcacaatcctgtccatcaatatctaccatcatagccctccaaaactaattgttttttatatatgcctctctattctgtgcattttcataatctccacactgctcataatattcaagggctttgtccttatatcccaggcactcatatataactccaatattatagtatgcctgatatgaattcacgccttcaaccttacaatctttataaagtacagcctttttaaattctttaacagcattatcaaacaagccatttttcatatatataatacccataagaaatttaaaatccgcactatctccaaattcatcatatatatttacaaaagacatagcttctttttctgctccggaattcagcattgcatatccatatgtttcaaccatatcaataacatattccaacttagtatctaaatcatatgaaagtcccttagaaaaataatcacacgcctttgtatattctttctccatataataactcttacccagttggtataatatatatggaatttcttgttcataagacttttcacatgacattcgtatctcatcaagtctgttaacaagcagttttatatttcgttcagccttaacttttctttcatcatcattaagacaataccccatatgatttataactattcctgataaaaatgtttctactgcctctcctgaattagatataatctgctcatgtattttcccatatatagtacagaatttgcgattaaaagccctgcttatccactcccagcttttatcctgtttaatattattcatattaagaatattaatacatttaattcttcccactttataaggatatttgtttaagatatcacacaactcgataagcacagactcttcaccttgcagatattcatcacaatccagtattaatatattgtcattatccgcctttgatacagcaaattgctttgctgcaccaaaatcatcattccactgataatcatatacacaacttgtatattttaatgcaatattctttgtatcatcttgtgaaccagtatcaaccactattatctgtacatgcttattcacaagagaacgcagacaattctcaatatgtttttcttcattcttagctataatgcacactgataaattcatattttctcctatcacttttctaacagtgatttcataatatattcatgtactttctcaccacaacttccaggattagcaacaacatccttaagactctccttctgtctgtgtacaactgtttctaattctcctgcacttaactgtgacaagaactgttttataccaaaatatatgctctctcttctacagaaataatctgctctgcccatcttttcaaatccatctgaattctgtagtttagtttttaataattcgtccgacacttccatataacattgaaaagatgtcttatccattatattaataacagctaattttctgtcatatgtacgctgtattaatatattatcgtcaactgcagttgcgaacctaatagaatcaaaatattgtggattatatccattgcactgttttgccgattctgacaaaaagtctttattaataacctcctgtgcatatgtatatttatttaccctaataattgtatcagaaaatgctggaatcaaaacaatataatcactaaccattacaaatgttttaaactctcttttcatacccgtcatatttttccatgaattattaataattgcagtattaatctttattcttgcaatattattaacatcaatctcattttcctcaaaaggtattttaattaattcatttttgcaaaaatctgccagccatatattatcggaatcttcacctataacattgaaattataatcttcattcaatatgttaaatattttataatcatttgtatatggttcatatcttaataaagaattagagcagcctgtaattatccacatacaatctctagcatacactgcattataatccaacattccataagacaggttcttaattttctttgcagacacagctaatgtatatctatccattatccattcttcagactttatgttatattcccaaattgtaaaaccatcatacggaagaaacatgagcatgtcacgaaacttatacattttccctaacggtcgtgcatcatatttatctgtacatgtaattgtataactgtctttattctgtccagcctgcgaatcaatattgcatttgcaaaaagatatatattcaccatataaaggactaatatatgttccactttcatcattacagatgtatgcatatggctgctgccatatatggctttcacaccctcttatatctcccatatacacacatgatatattctcaccttgtgttttcacggcagtgcatatattttcagctttaaatattcctggaaaaatatctgacacaaaatatatatctttgccattaatatacgctccaattatatttaacctatgttgctgttgatatgaacattcatcaactaaaaagttattaaatataaaacatggtcttcctgctacaccaaacatattaataactgaacttccatctgaaccaacatatgcatcgcttattgctatagtatccgaaatatcattagtctcatcatatattccaatattattattcataaaaaatgttttgagttcgatatatccctcatagagttcttctctcatcgacttataggttgcctctgtaagaggatgtggccgccatattaaagcaatatctttcatatctttgacaagttcaaaaaaatgtctgagtttgactaatagaatctcccttgaattcagtatatctccaagcgttgtattaagcataactacttttttacctgcaagaatctttttccactgttctgaaacattattcttcatctcacatttatatataacattatctattttaggtgaacccaatggaagcattttatcatacacagtcgtacccctgcacgactccttaaaatattcagactgtgcaatataataatctatgttcttataaacaggaaaatgcttatgattatctgaaatagcacctgctgtaacataatatggtatgtatatcagtttattactataactttttattttgtccgaataataattaggatgtatagttgtaactttattagaatcatcataagggtaatgtatatacgctgcatccggtcttatatttttaagaacataattatcataattaacaacttgtacataatctggaaatctgttcccatcatatgctgatttccattgcttatcccgcttatcaaattcaaaatatggaataacaacaacatcacatctgcatctcttgtccttacttgccgctttccagacactctctaaggaatcccacatctcaactttatatggaaaaaatgctattgtatattgtgtttccatattagatatttgagtatatacatcttttaacagcgctactgatttcttttgtaactcataaaaattattatataacgacatattatacacacattcgcaatattcctctaacatatgaacaacttccagaccatcgttattctgttctaatattgttcctacatttatcgcatattcttgacattgcgccaatatctctataccatcatctgatgatatagggttaatctgttcatgcaaaccaatcaatatattcagtttatttataagttcatttttcattgtggtattcatgctgttatatacctttcatgcattattcacttctaagttttttccaatcacttttacataatttttgtaaccatatattacaatttaattaatatttattaaaagcctttagagaatattgcatctccaaaggcttttaatctacattaaaccatactctttcaataactgcgtctgatattctttatctgaagcagacttctttaaatcttcggttcttccatctgataaaagcaacgtaatcaacttatttaccaattgttcttatcctccatcaacatactaaacacatcactcttgtactctctgttaccattcataattccttctccttatctgattaccaataaagcaggaaatacaaacagaccatatattcactatgattatatcatacaatcctgctttataccctattaaaagcaagattttcataatgaaatacagacataaccgagataaacagaccctgtaccgcccattgctatataaaatgaatataacaaccgcacaggtaatatagaaaagctgcttttgttaacaatgttgtatcgtatataaagtatattaataagatttgcgataaatgtcaatatttttaaatataaaaaatgaacattaaattttcccatataaatatttatttctctatctctcagctctcattggattattgaggaaatcctcatatgataatcttattccttcttctaattctgtcttatatttccagccaagcttctctgccttagatacaccaagaagctttcttggtgtaccattaggctttgttgtatcccaaagaatcttaccatcgtatccaataaccttagcaacaagttctgtaagctccttgatagtaagttctttacctgtacctgcattaacagtttcatcaccactataattattcataaggaatacacacagattagcaagagcatcaacatataagaattctcttattctcaaaggctatagtaaatttataatttctaataaaattaatcttccccttttcccagttagaatcatatccagaaacaaagtccactggtttaatattattcataactaaacccggacagtcaatgtgcttagattggtaagcgcaacataacccaccgtagtgtaatccttcaaatttaggcgtaagattaggacagttggagtattatactctaaatcctgagcaggattgcaaaagttgtagcatttcacttcaaactattatcagacttttgtatcattttactccaaataaattttcggaggattacactacggtgggttatgttgcgcttaattatattgcattaacatttcacaaaattttttctcaacagcgcgccattacctgctgttccatttgagtatataaaattacaaaattttctgttttttaattgatcccttttaaaaatgctgcgatttaaaatatcttttgtcattttcatttcgcataatggcaaccttaaatatcgatcttcaaattctatataatcgaatcctattccataatcacattcttcaaaattaggggttaccggttcgcctgtgtaaaaaatttttacacaattattaaactttttatgctcattaccaaaaacagaatatattaaaaaatccggattatcagaatattccaattcataattttcttccagaatatctgtcaaaaaatttctcttatctcatccaaaatcaacaacatttattttaatctttttcactttaatacctgccttatatcatctgtaatcaccattgttctttgtagcaattcttgactcatattacataatatatccatttgagactttccgcttactgctaaaattatcatctcattctcttttattgtaacatgattaatattatagatttctaatccatataaacttttttcatttgcaatgcttgaagtaataaaaccttttactttacctacaaaatcattattttttaaatacttatatatttcacccccaacaacgcctgctccatatatatagaaagaattatataatcttattgtatttttaaatccatctatatcatatgtattattaataactggtaatctctttaatttttcattaataagtactttagatgttctttcaaaatacatatcatggtcaaatgtaatttcttgcaattcattccattcattatccgaccagtatttcttatctatcttttccataatatctttgaattcattattaatcttaataagaaaacaatattgataagccccagacaatctattataattccagatataatcttgaaatttaacatgctgatatacattccacataataatattattttcttgttcaacatcctctttaatactgttaaattcgtcacatatacaatatatttttttaggatttttaacagatgcatccggattatcaaatctataatttataactgcatcttttaggcatatcatactcttagctttcataagaaccctaaatgtaaatgccacatcctgatatgaagctcctggcgtagtattaaattttatattattatccttcaaaaatttttttctatatatagcgctccatacacttgctggaacttcaaaaatattaacattttccatcggaataaaattttcataatatttagcttgtcttaatatttcattatattgaaaatgtggcatactattttctctataaaagttataatttgcttttacaatatctattgtttcgccattagtagccacatataatttttcaaacatatccggttctacaaaatcatcactttcaacaattcccacatatgttccctttgctgcttctattccgcaattaactgtatctccatatccagtattctttttatcaataactttaaatctgtcatcaatttcaacaaattgattaataatatccaatgaattatctgtagagccatcatttacacaaataacttctatttgtcttagtgtctgtttccttatactttctaaacatttatacaaatatttttcaacattgtacactggtactacaattgtaattaaagtttttttatcttcaatattcatatctttatccttttattcgtttatataatatttacagttacctggtgtaatccataaaatcttttgactatccactttcatgtctatcagctccatttttatctgttcataaacttcctttcttgcaacagcaataactataatatcatattccaaatttttaataattgccggattataaatatctatattgggataatttattttatcggcttttttatcaatccatgcgactatattacagttagaatatcttcttagctgagaataataatcccgtccaacttttccagccccataaattataatatttttattcttcaataacgcaatatcattaaaacaatattgctgaaaagcaaaaggatccgaacttatattagacatatgcattacaatctgatttccaaaataaaaatccagttctttttcgtaataattatcaattttatattttattaaaacactttgaatattattatataattttatttccttgcttatgcctcctaatcccattccatgtgataaggattcacttcttaccctataatgataatatgccctatttaaaatatacattcgatctgaattgattattgctgatatcatacaaaccaagtcttccccataagaacattcatcattaacatcataatatgatttaactatgagagaacgcttaaataattttgaccatatactgtgctcaatattggtatgttgtactaatatatttcttaaaagcatgcttttatcttcaggacattctataaaacctgtctcaaacttagtattactataagtggtatttcctttttcataccaatatcctgtatgtaccatatcaacatctttctttaatatataccccaataaggactcaaacatgttgtcatcaatataatcatccccatctacaaatcctatatattccccttttgccttctgtaatcctatttttcttgctgttacaagcccaccatttttcttatgaacaacttcaattctatcatcaatgcttgcatattcatcacatattaatcctgatgtatctgtggacccatcatcaactaaaataatctgtaaatttttataagtctgattaattatactttctatacattgtcttacatatttttcaacattatatattgggacaattatgcttatggtaataatatcattcatattttctacgccttccatttaacaccgttatttcatgaaatttataaacagtatgctactcatttttctttagaagatcaatataattatacaaccagattactcgcctcatctaatgcttctaataatctgtttttaaaactatccattgaaaaaatcttcttaaatacttttttcccatttttacctattatttttacatcttgtttgttctcaattatatacttacatatatcaaaaagttcttttatattacctttctgaaaaataaatccatccacgccatttctaataacttcagccgttcctgttccatcagaacaaattataactttctcatacatcattgcttctgtcataacgactggcaaacaatcctcttttgatgcacaaataacaacatcaacttccttatatatatcaaaaatctgttttctatttaacgcccccataaatttaacgccattattatctttatatttttttactatatgcgatccgtataaattagaatagtttccaaccacatataactttattaaatccccataataacattgaagtttaataaatgcttctattacatcttcctgcgatttattttcacatagtcctcctataacagcgaactttacataatttgattttttatcataatgagattgcatatttatatcaggtattccatatggcataatttcctttaatatgtccatataacatttattaaagttattttttgcaatatttgaaactgccttaattataactttatcataatttttagttttactaattccaaattcttgaatatatgatttataaatatctgaagcctcgtgtatccaccaaagcactggttttttccctgatacactttcaacaactgatttcattgtaaaagtattcgctaaaaggaaatcaaaatcacaaatatcaattaattcatcatatttggtatatcttaaaattgaatactcaataacctcaataccttttaaaataaatctatcagccacttctttttctacatatggagctataactgatactttaaatcctgcatcaagtaatatctctcctgcatacatagcaaccataacacttccagaaaaattcatctccgttgatgctattaggactctttttcttttataatcacattttttggcttctttagttttatattttacaacccgtatatcttttgagtatgcaaaatattttctccaatgccatatatactttttttttattcctaattcaaccagctgattttcaatatcttgcttgtctctcgccataaccacaataatatcataagaatacctatatatatcattaggtgatataacctcttttccatctataattgttcctattttatattttgaattatctgcaagtgtaacaatagaatcctgtactttatctatctgttctttataaattgttcctgttccaaatattattatattcataattacaacttgcttcctcccctattaatatattaatttaaaaaatcatttatttgatggatatttagtacctcctacaacatcttcaagtgatacaaattcccaactcaatttattatctggaatatcgtctattttttgtcctaaaaattccgaatgacaaaataaatcacttaccatccgttcctgtaaatattgatctgcttcttttgaaaaatatccttctataggattactacaccccttttctatacatttaattccgaatttttgagaaaacaacacatttaatgcattttcactatattgaaaaaaatgccatggtctttcatgactactaaatgaatagtgtgtttcaacaaaaatatatccgcctggttttagtaattttatcatctctaatgaagcctgccatggcatggctaaatgttcaaaaactgcacttgaaaagatcaaatcaaattttttgtcgaaataatgacttaatctatgtgcatcgccaacaacatcaacattatctcctgcataataatcaaatccaatataatcagctttttcaaataaacttctaaaatttgttcctgtaacaactcgcgatccaacttctagaacatcttttccttcataatcacagagctgttttaaatataacggccatcttgaatgagaaatattttggctaatttcaacatttccacttctccacaactcatctggaatgaaaaaattagtaatattattgtctcttaattgtttttcgatattcttacaatataccgtagttatcattattggcaaaaaactataatcatctttataatcttttaaacttataatcggaatatcatcccaaatataaagtccaatctttgatggatcattatcaattacagcaacaatctcctccttatatttttcatgaattttagatgctattttcccagccccaaacaacacacacttttccatattaaatttctccatctattcaaattttttattttatatatgccatagccataaataatcattaacatattttatatgtttttttaaatcacatgaattttttttatttaatgctattattaacccttctttatcatttaaactatttttccactctcgaatttttatcccatgaatttcattgacattttgctcatttaaattagaaacatagaatcctgatatttttatgttataatatcggcacaaatgataaacattataagcataaacaccacatccataaatatatatttttttatattttaaacaaaaatcaattaattgtttttcatttatatttaacatatcataataaatacatattggtttttgatatactttatttgataaaattttttcatcatatttttttaaagcaaaatcaataataaactgcgtattatatgaatatttatgtttaattaaatttaaagcaagcgctaaatcatcatcagatttttctttgatatttacacatttctttttaatgaacacatctcctttctccaaacaataataacaactattataattatctatatttccactattttcataacaattgctaacatatcctttcaaggttaacatacgatagattccttgttcaaatgtagcatatacatcatttatagtttcagttttttcatctatgtattctctccaataattataaaagctattatctaatagtattttttttctaaatactaaaaaatatgattgtaaatgagaaaaacaattcctttctatttttttcattccccaaaagtcacataaattattttgcattttcttaaatatttggtcaaatcctataaagggtccaaaacaagtatcattacataaaaccaattcatcatacttacttatattatcaataccaatataatttataatgcattccttatatgcacctgcatcataaccaacattctttcttactataatctcatttgtaaacactcccaattttttttccccattttctagaatttggccattaatcactatcaccaatctggcaacatttttttttaactcattcaaataatattcaacataatcatatacaattccttcagaatcataaaatgaaaaaattgcaattctattcaatttatcttgtttcattttgcgacctctaaaaatcagcttaacatttttgatattgtcttcggaaataatgaaataatatttttgctatccatattcataatcttttttttcacaatgtctatcgcatttgccttgttaacacctaaaactatatctgtgtccttattaatattagctttgtctatctgcataacctcgaaaccatacaactgtttatgtccgaatttttcaatgtcagatattaaaaagcctttaaaattactattatctctacacagattccagtatatctttcttgcccagacaccgcatccatatatgtaaaatcctttacttttatctatgctctttttcacatcttcagttgtagtttcaagctcaataaatggattatcttttatattatccttatctattacatactcagatatctgttcttttgtaattctcacattgcaaaacctctgaatataatctatgatattttctacagggtaacagttcgtttcatgtatgtactgtatagcatctattatgtcatctcgactagtattaaaatttctcaacgctttcttcttaatcaatggaattccatatttctttattgaagtactaacacttgtataaatattacaattattctctggcacataaactgaatatatctttttctctaattgagtcagataataagacaatcctgtttcaaactgtgcatacacgtcttccagacaatgtgtatgttcatctatgttatcctgccaatatttaaagaacttatcctcctgaataattgacttattaaatacccaaaaataagattgtatattaggcaaaaatttccaatcaacaccattaattccccaccagtcacactctctttttgccattgtatcaaatatatctttgagtggaacaaaaggtcctatgaaagtatcattacacaatattaattcctcatattgtcttatttcttcaattttaagatatttaaatatcgcgaatttgtatgcccctgcgtcatatcctgcattctctctgacaaccacatctttgctataagcttcaagtatttttttgctgttatcttctatattaccattaacaactataaccagcctgtcagagtttaataacagctcgccaagcagatattcaacagatttatcaactatacctttgctgtcataaaagcaaaaaatacataatctcttcatatgttttcctctttcctataatttcaagccctaaatcattgatttttggacttttttaacaatcacttcataacaagtgctaaagtgcatgaagattcattgtatcaagtactgaatagttgaaaattggtacaccaaataaagcatcctttgtttttactttataaaggctataatttctctaatcaactatgctgatgaatcttccgtgtctaatggcatcgtgtgccaacttccttcgtcccatctgcttatacactgagtgcctgctaagctttcaaacagggtcatgccctacggagagaactactgccagctacagctcttgtttatttttgattgttactgaccttcctttgctgcaacacctcccatgctttatcagttggtcttggtgctgatgtagtgctcttcacactccatctggtttatgggtttcttttccaaaaccctgcccgaatccagataaactctgaattccggcaagggggctggaattgtaatgcattcttaagtagtacttatgctacctgacttggtcttacaatgtctcctaacattttttcggatcatatgttgtcccttttgtcagtattgtaaaaatcactctcagcatcttgcaggcaatcactataagcgactgcatctttttagtggattttccttccttgtcgtgtagtaaacatgaagttccttaaattccttcgaatgtgctactgccgacttcgccgcctagaataaccaatatctgagtcgtttgcgtcctctgtgactgattttggtctctccggtatgcttacccgaactgcaggctaccaatcctaatccgcttaacttctgtatttcctttacaccatcgaatcttgatatgtcacccatctctgcaagtatcccggacagaatattttccccgattcctgatattgctaaaattttcttcgcatgtggaatctccatacatctttgatttaactggctttctatatatgaaagctgctaatcaagctcgatgattcgtctgacgaaccacttaacagcctgtctgctggcatctgctccattcttgattcctacgctttttcttgcgtgttccagaatagatgttgcattaacatagcctcgtccacgaagcttcgcttcataccatatctgtttcatccctccattccaagaacagccaattcacctggaaatggtaccgccttaagcagctctaacctatgaataacatccaacgaattttaattaatattcccatttattacaactattaattgttcaacattctttttaattcctctaaaagatattcatcacctcgttggataatttcatctttatcaaaaaagcaaaatacccctaatctcttaaccataaacacctctttaattacaattatagattcaatttagaatcaatataatctgctattcttttagatgcttttccatcctccagaagctttatactactaaagagttcatctaacctcttaatatattctttattatcaaatctcaatatattattttccagttcgtcattgttctttgccatagaaaaagggatctctgcaatattccaggttaacttacctctatctgccacatagtcatcaaggtcatctacataaagaaaaactggtattttcatataggacgcatcaaatgctgcactcgaataatcagagacaaaagcatctgttgccgctaacaattcatacatatcatcaattgttgtaacatcaatcactccgtcctcagtattattgtaagaaataccttttaatgctaactgtgggtgtaatctaacaaacaccacccatattccaccaaatttttcttcaagtgcatgtcttaatctgctaaattctattgtaccaatatcagcaaacactttcctttccttgctctgacttcctcctctaaatgttggtgcacacatgacaattttagtatcagacgacaaattatatttttttctgatttccgctctttttttgtctctttcattaaacaaaacatcacacctaggagagcctgtcttttttacaggttcatcccaaaatgcattttcccatatattagtacaccagtctgagttagataacaatgcatctacatttttagcatcagctttactcactatctctgctattctagaaaacaaatcacctcttaatcttccaactggcttaaaccctataggtccatgccatgtaagaatataatattgtttttttctttttcgtattccataattttttcgtgcattatcaatccatatactcgctgttgataaatgatatgctctattccataaattattttttcttttctttatttgtggtggaaattctttagtcatatcattaaccagccaatacatatcatactttgtaaaatcatttgcatctttttctctattaattaattcttcagctatatatttaggattacaacagtatcccccaccctcaaatgcactaaaaacaattttgttcctttttataggcagtaatccacaaatataatatggaatcctacatattcctgcctttaatttgcgctttaatatatatgtatctactttcatatcttatctttcttttattaaatgataaaacttttatatgttctatttaatccttctgataatgttatttgtggtttccaacctaattttcttattttatcagtatttaatcctactcttacatatttacaataaccactcgaatcattatcttgcttatacactactttaatattaccttttgctatatttgctaattcttttgcaacatctcttattttcataggttcttcttcatttgcaatattgtagctagtgtatttatcaccatctaacataaccagcatcatagcttttacagcatcagttatataacaaaatgctctttgcgcatcgccagtacttttcattacaatatcatttccatcaacagcattattcataaaatccgccattacacgcccatcatttttcagattcataccgggaccatatgcatgtgccattcttacaatattataattaattccatacatatcactatatgatttaaatatctgttcacccattcgcttactttcaggataacaagatcttgagtcaagcggatctaatattcccatatcggactcttttatcatttcaataccctctggcatctttccgtatatctcacgagttgatacatataagatattctttatatctttatccttcgcatattctagaatattttttacaccaatagtattggcgtcaataatgcctacaggatttgtctttatacaatacgcactacatgaaccagccgcatgaattatataatcaactttatcctttaattcaagttcatcgcatatatcctgattgattacattaaaatagtctttttcaatatactcgccaaaattatatatggccttttccatatttctgaccaatatatatatgttaacattataattcatttcttcgttcatatatataagcaaatatgtgatatacttagccagcatccctgttgcacctgtaattaataccgcattattttttaatttatcccaagaaatatttttatcttctaacatttctttcaaatcgttttgtacaatcaaattattatataacatatattactccaatccatatatctgagaattttcctgagcatctaatattgctctcataatataaaaatcctgtggtgtcgttactttaatgttttctataggaccatctacaagatacatttttttaccataataattcatcattgtgcatgaatctataaaatcatgtcttccttctgataaagctttattgtgtactgctaatatttcatcaagccagaaactttgtggagcacgcgctaatctggaatatgttctatctggtatatactttattgaagaatcatcttttacttccattattgtttctgtaaccttaacactagtaatagccgaaccataatttattacagaatctatattcttattaatcacatcactattaattaatggtcttacaccatcatgaattaatacaactgttttttcgtcacctgcaatctcgtgtgcagcattcagtcctgcatatattgataactgtcctgtttcaccacccggaactatacttttcaccttatatatatgataatattccactaaatttttcaaatgctctatccattcttcaacacatgctattactatggcatctatattatcattgctttgaaatttttctaatgtatgaattataattggtttatcatgcatcttaagaaattgttttggtttttctttgctgttcattctttttccaacaccaccagcaaatattactgctatattcatatttttctttcctctattaattatattctaaaagccttgcataaaaatgcatagctttatacatcaattgctgtacttaatcaattatatataacaactttttcgatgcgtttactaaatgactccattcatgtataatcatatattactaactaacaatatattattcacttataaatcacatttatatattagcaatatcggataatacgtcaattctcttaaccttatcacttttcattctctaaaccactctacattctctctcaatatcctcgctggatttcctgcatatgtgctataagatggtattctcttatttactaatgcgcatgcacctatcaatttatcaatatcatactgtactatttcatctcttacattccataatataccaccattaactgcaagaaccatacaatcataatgcctgttttcttcttctattctataaacatttttcccatataactgacatggattatcatatttttttgatactacaaacccaagtacatgcgtacccccataatttctagactcttacatgttcttatagcaactgatttagctccatagatatatacattctgacctttcacattttcgtatagctgttctacacttcctactattatttcttccattgttgtaccctcacattaaactgctttaattgacattaatgttctaactaatatttcacccaacccttaccttctcaatcctgcacacatgcttcttaaaatcaccatcatcataattaatcccaaccagaacaacttcaccagaatatcccttcaggctttcaatatattgtctgttctttatctgctctattgcagcagaagctgttttattccattttagttccactatcattgctggcttattaacattactcctaggcacaaataccatatcagcatatcctttaccgcccgcaagctcacgaaaaatagaataatccttttttgctgaataataagcaagtgatataacacatgccagcgcattctcatcattatattttaaaatagatgtgttttcctgatgtgcctgttctatcattgaagcaactttttcttcatcgccatctaatgtagatgaaagcaattcatctgaacttcggattgcgtccataaccggttcccagccaccatcttctatacaattaatgaattctttctgcacttcctgattaggtatcgtaactttctgattgtagaagtcatatgtcagatatccaagatgcacaagcagcgtcaggacatcatcagcactctccagcgtagtcatatcattctggaacttatctggatttacaggtacactttcccccgctataagccttgttacaagtgctttaaggttatacatatcaagctgtatatatttctttaatgcttcataagtttctgtcttagtccagtaactgtcaaaatcatgtccaagaagtgacatgacaacagaccttggattgtatatctgaacacctttaagttcatatccgtcataccactgtttcattttttcatatggcatatcatactggacgcataactgttttacctcttcttctgtgaatcctgtaaactcagcaagttcacgctgattagtcatcgaatactcatcaaacatattcaacgctgaatgttcaccatattttttaattggcaatattcctgtcatgtatgcaagtgctacatatggctgattcttaagcatatctcttaaataatcaagatataatttatatgaactattcgtctcctgccctaccctgaatacacaatcccattcgtctataatgaatataaatttacttttcttctgagaatatatctcttccaatactgaaacaagatcttcttcataatattctacatccttgaattctctttttagttcccttgtaacttttttagatataaatgacagcatttcttttatattttctgtcctactgacaaactgctgcatatttatgtgaattaaattatacttattaagatgtttttcaaaggtttcatcttctgctatctttagaccactaaacaatcctcttgaatcacaatttttgcaataataagcaacaagcatatttgctgccatagactttccaaatctacgcggacggcttacacatatatttctatgttcacccgacaaaactgaattcgtaaatcttaacagttctgttttatcaacatatattttagattttttaactgcattataaaattcatcattccccgg

SEQ ID NO: 173 - DNA, 15507 bp, unidentified
  source 1..15507: mol_type = unassigned DNA
atgaaacaaaattggaacaaagaaagccttttggcagcctatcctcgttttgaagcacagccagatttttatctgggacggatggcagatgcggaaaaaggctttgcagatacattcggcaaagaagcggagcgttttttcagcgcacccggcagaacagaaattggcggcaaccatacagaccatcagcatggctgtgtattggcagcggcagtagatttggatattttcggtgcggcagcgaaaaatgacagccgtatcatccgtattttctccgaaggctacggcatggaagaaatttctctggatgatttggaagtgaaaaaagaagaaatcaatacaacagcttccctcattcgtggggtagcttccaaaatcacacagatgggctatacactgggcggtctggatatgtataccgtttccaatgtactgaaaggctccggcatttcttcttccgcggcttatgaagtgctggtgggtacagtcatcaacgcactgtattgcgaaaataaactgacacctgtggaagttgcacagattggtcagtatgcggaaaatgtatactttggcaaaatgagcggtctgatggaccagacagcgtcttccgtaggcggcgttgttgccattgatttccgggataacgcaaatcccgtcgtaagaaaactggatttcgatttcacaaaagcaggctatgctttgtgtatcatcgatagtggtgcagaccatgcagacctgtccgatgaatattccgctatccctatggaaatgcggcaggtagcggctcacttcggcaaagaagtgctgcgggaagtggctctggcagactttttgacagatatggctgcggttcgagaaaaagcaggcgaccgggcaacattgcgtgcatatcatttcctgaaagataatcagagagccattgacgaagcggcggcactggaagcaggagattttgacaagttcttatctctggtgaaagaatctggctattcttctttcatgtatctgcaaaacgtgtatgtttccggcagtgtggaacatcaggaagttgcttataccctggcagcttgtgaagcggcattggcaggcaaaggcgcttaccgtgtccacggcggtggttttgccggaaccattcaggcttttgtgcctcaggaaatgctgacaggttttgtggaacagatggaaaaagctgtgggcaagggcagatgtcatgtactgtctattcgtcccgcaggcggtacagaattgatgaaggtttgaaaaaaaataggagggatgctctatggcaattttggtattgggcggcgcaggctatatcggttctcatacggtatatgccctgtgtgaagcaggcagagaagtagtagttgtggataatctggaaacaggacatgcggaagcggtacatcctgacgcaaagttctataaaggcgatatttctgataagtctttcctgaacgatgtattccagaaagaaaatatcgaagcggttatccattttgccgcttattctctggtaggggaaagcgtggaaaatcccctgaaatattatgaaaacaacttgagcaaaacaagagatatgctggaagttatggttgccaacggcgtggataaattcgtgttctcctccacagcagcgacttacggcgaaccggaacgggtgcccattctggaaaacgaccgtacagaacccaccaacccctacggtgaaacaaaactggcaatggaaaaaatgttcaaatggacaggcaacgcaacaggcctgcgttatgtatccctgcgttacttcaacgcctgcggtgcccatgtcagcggcaacatcggggaagcacataatcccgaaagccatctgattcctttgattttgcaggtgcctaacggtcagcgggaattcatcagcattttcggcaatgactatcctacacccgacggcacatgcatccgtgactacatccatgtaacagacttggcggatgcgcacattctggctgtggattatctgctgaaaggtggtcagagtgacatcttcaatctgggcaacggcgttggtttctctgtaagagaagtcatcgaaaccgcaagaaaagtaacaggtcatcccattcctgccaaagaagtggctcgccgtgccggtgaccctgcacagctcatcgcttccagtgataaagcgaaaaaagtgctgggctggaaccctcagcatgacagtctggaagaaatcatttccacagcatggaattggcacaaaaatcaccccaatggtttttgagaaaggggaaagacatggtaaataaagcaattcgagatttggcgctctatggcgtcagaacagggctgattacagaagcggatgtgccttatgtcatcaaccgtttgatagatgaaatgaaactggatgcttatgaagaacccataggcgaagcggaaaccgatttggaaaccattctggctgttctgctggaagatgcctgcaaacgggaactgattcctgacagcatcgtatataaagatttgttcgatacaaaactcatgggtgttatgacacctttccccagagaagtcattggaaaattccgtgaacttcacgcagaagacccggaaaaagcaacagactggtattatgactttagctgtaatacagactacatccgcagataccgcatcaaaaaggatatgcgttggaaaaccatgacagaatacggtgaaatcgacatcaccattaacttgtctaagccggaaaaagaccccaaagccattgcggcagcgaaactggctcctcagagcggttatcccaaatgtatgctttgtcgggaaaacgaaggctatgcaggtcgggtgaaccatcccgccagagaaaaccaccgcatcattcctctgcgcattgcgggaaatgactggtttttccagtattccccctatgtgtattacaacgaacactgcattgtgtttaatggacagcatgtacctatgaagattgacagaaacgcttttgcgaaaatgttcgatttcattaacttcctgcctcattactttgtaggctccaacgcagacctgcctatcgtaggcggttctatcctgtcccatgaccatttccagggtggacggtatacttttgctatggaacgggcagaagtggaacggaaagcagtctgcaagggttttgaagatgtggaaatgggcgttgtgaaatggcctatgtccgttatccgtatttcccataaagaccatcatcgtttgattgattgcgctgatatgcttctgaaaaattggcgtggttatacagacgaagatgcctttatctttgcggaaacagatggagaacctcataacaccatcacacctatcgccagaaaacgtggcgacaaatatgaactggatctggtactgcgtaacaacatcaccacagaagaacatcctctgggtgtgtaccatcctcacagccacctgcaccacatcaagaaagaaaacatcggcttgattgaggttatgggtcttgcggtactgcctgccagactgaaagaagaaatgcagtgtctgaaagaagccatcctttccggcgctgatctgaaagcagacgaaaagaccagcagtcatgcccagtgggcacgggaattcctgaaaaaatatgatactgtgacagcagaaaatctggacagcatcattcaggaagaaatcggtctggtatttgcgcaggttctggaagatgccggcgtatataaaagaacagcggaaggtcaggcggcatttgaccgcttcctgcgtcactgcggcgcggaaatctgattccttccggcaaaataaaataacagacaaaatacagaagagcagggttggagaatccctgctcttcttagattgtagaaaaattgagttttttatttttttcaagaacgcggaagggtttggggaacaaagggttcctcaacttaaatccgcagtcggaatttacttctgacgaggaaaagccgaagtttcaaagcttttagctgatggagcttcggctttatacttctgtttactcgtcaaagtcttgaatgaaatgagactttgacgacatggtgtcgattctttcgacaccatgagaagagcagggttggagaatccctgctcttctgctgtcttggaatatgttatcaaatatttgaaattaagctattataattgcatcatgccagacatgatgcagccgcctttggcaccgcagtccatgacttcctgtaattgtttttcattgattttgatgccgccaatggcgtaaacaggaatggataccctgcggcagacttcttccagaaaaacaagtcctctgggtggaagtccttttttgcagtctgtggcataaatatgcccggcggtgatgtaagttgcacctagtttttccgcttcttccgcctctgctggtgcgtgaatggaggttcccacaagagagaaaccggaaagttcttctttgtgggcacggagcagaggaaggggcagatggatggcgtcacagcccagttcttttgctgcacggaaataggtgtgcaggatacagggaacgttatgacgctgacagattaccaatacatcttttgccagagcggtgtattctgcttctgacaagtctttttcccgcaggatcagacctttgggatggtgtttgcagatttcttctatctgttccagaaaagggcgtttgcttaaggtgtggtttgtcaccgcaaggatatgggaaaacaacgcatcatcatacatagatataatcgctcatgatcggctggagattgtttttcagcagtgtgtcataaacttcctgtacagatctgccgtcatcgatctcgaactggtcgtctcctttcttttcggtttcctcggaatgttcgccaataccggtgctgacacctgcggaaattttggtggcagcaatgttcaccagattgtcacgaacacgggcacattctctgctggaaatggtgatgtttgcgaaaggcatgaacagacgatacgcgcataccacctgcaaaagctgggtttcgtgaacatccattggattgatgcggtcattgttgatgatggggcgtagtctgggacaggagaatgcgatttccgcatgaggatatttccgctgaagcagataagcatgatagcctgttgcgaaagcgtccttgcggaagtcatccagacccagcaatgcggcaaaaccaacaccacgcataccgcctttcagggcacgttcctgagcgttcagacggtaagggaaaatccgcttgtgtcctgccagatgcaaggtttcgtatttatcagaattgtatgtttcctggaaaaccgttacataatcggcgccgcattcatggagatatgcgtattcgtcggagttgacaggatagatttccagaccgatgactttgaaatatttctttgcaattttgcaggcttccccgatgtattgtactgtggatttgctgcggctttcaccggtaagaatcaggatttcctgcaatcctgttttggcgatggctgccatttctttatcgatttcttcttcgttcagctgggcacggttgattttattgtggcagttgaaaccgcagtaaatgcagtagttttcgcagtagttggcaatgtagataggtgtgaacatgtatacactgttaccaaaatgctttctggtttccacacgggctgcctgggcgatgtcttccagcaagggcagagcggcaggggagagcagtgcggcgaaatcctcaggggtacggctgtcatggaccaaagcacggcgtacatccgcttctgtgtacttgtcgtaatcataagcttccatggccgcaacgacctgatccatcacatcggattccagcacttccataccgggcagataggtcatgtggtcaatgcggtttttcttttggtcttccagaatttcttcacttaaaatactttcgttcaaatgttcctgactcatgttctttcacctctcaatcctgcaaaaatcctgtcagcggagaagatgcactagcgcctttttcaagggttctgccaagacctgccagataagcgctgcgtcctgcttcaatggcttttttgaatgcttctgccatcaattccacgtttccggcggtggcaacagcagtgtttgccatgatggcagcagcacccatttccatggcttcgcaagcctgagaaggtctgccgatacctgcgtctacgatgatgggcaggttcatttcatcaatgagaatctggataaattctttggtgcacagacccttgttggaaccaatgggggcacccagaggcatgatgcaggcagcaccggcattttccagatctcttgcaacattcagatcgggatacatgtaaggcattacgataaagccgtcttttgccagcatttctgtggcacggatggtttcctgattgtcaggcagcagatatttggagtcacgcatgatttctactttgacaaagttcccgcagccaagttctctggaaagttttgcaatgcgcacagcttcttctgcgtttctggcaccggaagtgttgggcagcagggtaacggtatcgggaatatagtccagaatgttggcaagaccgccttcgttggcacggcgtacagccagtgtgatgatctgtgcttctgctttttccacacaagcttttaccagatccagagaaaatttcccggagccaagaatgaaacgggatgtgaattcgtgtccgcctaaaatgagtttgtcattgttctgcatgataaaattccttctttcttccaaaatcagatattatacggtttcttcgcccagaagcagacgggcgatcatattggattcatgggcagcgcagagggccgctctgggtgccatgaggcattgtccatgggcaatatcggtggtttcgtcgccacagagataaaaattacagccaatctttcgggtatggatggtgttgctgctgccgaagcctgccatgccggaagcacagaccagttttttctggggaaaacattccagtatgccgttgacaaacattgctttcgtttctgcgttgtcgaaggcttcgcagatgatgtccgcatcggcaaaaagggttttcagattttcgctggtcactttcacacagtctgtggcgatgtccagataaggattgatctggagcagctgttctttcagagcatctgttttatacatgcccacatggcgtagcagatattgctggcggttcaaattggtcaggtctacacggtcaaagtcaatgaggtgcagatgtccaaccccaaggcgtgccaaagcgaaggcaacattggaaccaagtccgcccaggcctgcaatggcaacatgtccggcatccagcttttcctgataggctgctgtgtggcgttccaccaatgcttcatagatttctgttttcgtaaatggatgcatcatcagccgcctcctacaaaactgacaatttcgatcttatcgccgtcattaagatatgtggtgtcgtattcgcttttgggcaggatttctccgtttttttctactgcgatgtatgtccggcggtagttgttttcgtccagatatacaccaagggttttcggtgcggacaaggtcaatgtttttccgttaatggtgatcattcagaagcctcctttccagcggcggcaagaaaaaagagctcacaaagaaatacacccgtggtggtgcaccccttcatgaactcttgttcactctcaacgctgccaatattttgtttccgtaaaaagttctggctttggtctgtctgtacgcaataaaaatagggagatgcaacgcatctcccgaaaattcattctatcgattcctacgttggcattatccaaatcaggtgtaagggtcgaagcaaaacttcctctcagcccaattcattgagctcccctgttttctttttacgagaacagtatatacacggattctgaaaatgtcaacaggcaaaatgacaaaaagcataaaattttcggaaatatgcacataactttacatgttaaaatgagtccataacaaagaggaggaattttttatgtggcacttggaagaagaattacagaaagaaggggtcagcgtcagcctgcttaaggaaatccaggagttccgcgaaagtcatggagtggatccttctgtggcaggccgtgtaccggtaccccgttttttatattatggcaaagaaatctgggaagaagcggcagcagcgctattgtgtggggaaaatctgctgctctccggcccgaaagcaacggggaaaaatgtattggcagaaaatctggcggcagcatttggcagaccgtcttgggacatttctttttatgtaaatgtagacgccgcttctctcattgggacagatacattccgggataatcaggtggtgttccgtgaagggcctatcagccgctgtgcccatatgggtggttttggcgtgctggatgaaatcaacatggcgaaaaatgagtctttggcagtgctccacgcaacattggacttccgtcgttccattgatgtgccggggtacgacagaatccctctgcacgaagccacacgttttatcgctaccatgaactatggctatgccggcaccagagaattgaatgaagctctggcatcccgttttgtggtcatcaatatgccggttatttctgaggaaaacctgcggaagctgctgaaacgggaattccccacactgaaagataaatgggcagaacagtttgccgctttgtttagagaactggaaacaaagtgcgataacgcggaaatttccacaaaagctctggatttgcgtggacttatggcatccattcatctgatggaaaaaggattgaaagctgtccgtgctctggaaatgggtatcatcaacaaagctttcgatccctttgaacggcagttggtggcagatgccattgccgcaagaattccacaggatctggactttggaaagctgtttggtgatcgctgatgaaaaacagagagagtgcggagcgtcgtgccatcaatcagatttggaacgccgcacaagactattccttgcagccggtgtatgttgcctttgatgaggacggcgacgcagatttttatttcaatacggtcatcggtgccgtatatcattattttcagtttgaaacgttggataagatgtttacctaccttcagcgcagacaggatggagaactgtatgtggaactgctttggctggggctggaaaactgcgtctttggcaaagccaaggatgaacgcccggctatggcggagttgcggcgggcttatgcggaaaaatttctggcaagacccaaagatcatgtggtggaatctttgctgtgggatttgaagcatgctcattgccagcgcatattaggtcaggcagatgatttggatgaagaaaaacgaaaaatactggacgcattggaatttcccgcagactgtaacacagaacaggtgacagatcgcatggatcgtctactgaaccagtattttttcaaaggacatttcaaagagtttgaagaactgggcggccatatcagtgattctccgtttttctggcccaagggctggggaaaacgggcaggcagtgcattgcggcgtatcgattgggaaggcaaaaccacagaggaaaaagattccctcatgggcaaagcaagaaagctgtatcagcggctgacgttttccagacctagtgctaaggtggtgcgtgcctatgtggaaagctgttttggaaaatccatgttttccacggcagaaatggcagaaatagaaaagaaactctgcacggaagcccatcgggaatgtctgctgcatttcacccgaggtgagtttacagaaacaggagaactgaccagggaagcggcagaacagcgggaatttgctgaaaaacagcgagaagccaatgaagcttattttcaggcaaatgaaagccagaccatgctggcagttaataaactgacagaacgcatacgcaatgccatattattgcagctggaacccactgtatatcgaacccgcgcggggaatctgctggcagggaaggtatggcggaatgtgtatctccatgatgagcggatatttgaaaaaacatcggatagccagctggataccctgacggtggatattttgctggatggttctgcttcccagcgagaacagcaggcgaaagtggcaacacagggatttatcattgcggaaagtttaactcgctgcaacattcctgtgcgggtaagcgctttcagcagtgtcagcggctgtacggtcatgcaggtattgcgggattaccatgacactttcagaaataaggatattctgcattttctggcggctggatggaatcgagatggtttggcattgcgggcagcggattacctcatggaacaggagagaagcgagcacaaaatgctcatcatcctttctgatgcccaccccaacgacgatcagcccatgccgtcgaaagaaggactccatctgcccaaagattacggcggagaagctggggtgcaggatgtggcggaagaagtgagtcgtctcaggagaaaaggtatctgggttatttccgtctttacaggaaatgaccgggatttaccggcagcccataagatttatggcggagaattggcaagaatccgttctgtcagctggtttgctgacacggtagggcggctcatacaggaacgaatcagagaaatgtaaaagtataaaaagaccagatgatattgtctggtcttttttgtatgtccgcatgttttattgggaatgataaaatcattgtattgcaggggtggttatggtagaatcaatgtgcagtatatgatttttcatgacatatcgaacccatgggttcctgacaccaaaaagaaatttgcggcggaaggtacagtatggaaacacagggcagttatgccctttttcccgtacctttcgtggtacggtttttcttttatcaaaccaataggaggtatggaaatatggaaacaaaaaatgaagaaagcagaattgcggtcattggcatcgttgtggaacaggaagcgtctgtggatgtgctcaacgaaacactgcacgaataccgggaatacatcatcggcagaatgggcattccctatcgtgagaaaaaagtgaacatcatcagcattgccattgatgccccccaggataagatttccgctttgtccggaaaaatcggcaacctgcccggcatccagtctaagactgtatattctggcgtgaaggcatgagtttagcggcaaatttagccgaaaaactggtcacggaacacgatctttcagaagaagagctgctctatcttctggaacatcgtcaggaagtggcgccttttgtgcaggaacaagcccaaaaactttgtcaggaggtttttggcaaagaaatctatatccgcggattgctggaaatttccaatatctgcaaaaatgattgctattactgcggtatccgcaaaagcaaccaaaaggcggagagataccgtctgacggaagaagaaattctggaggcgtgccatgcgggttatgccttgggatttcgcacatttgtgctccaaggtggcgaggatatgtggtatgacgatgaccgtctgtgtcatttggtatctgctatccgaaaaaattattccgactgcgccattaccctttccgtaggggaacgcagccgggaaagttatgaaaagctattttcggccggtgccaatcggtatctgctgcgccatgaaacagcaacagcgtcccattatgccatgctccatccatcggatatggactttgcaaaccgtatgcggtgtttgcaggatttgaaggaaattggctatcaggtgggctgtgggtttatggtggactcgccccatcagactttggaacatctggtgaaagaccttcggttcttgaaggagtttcagcctcacatggtaggcattgggccatttctttcccagaaagatacgccttttgcccattatgaaaacggctcgggagagctgacgttgtttttgcttgctgtcatacgtctgcttttgccgaaggtgcttctgccgtccacaacggcactgcggacacttttgccgccgggaaaggaatggggcattgcctgtggcgcaaatgttatcatgccaaacctttctcctatggaggcacggaaaaagtataccctttatgacaataaacgcatcatggggacagaagcagcggagcagattgaatggctgaaaaagcagttagaggacattggctataccgttgccgtcaccagaggtggcagccccatgttgaaagaaaaaaatcactgacaggaaagagaaatctgacctagaagaaaggaagaaaagaatatgtatgatcccaaatcaatgaaagcggaggaatttatctcccacgaagaaatcctggacactttggcttatgctcaggaaaacaagagcaatgaaaaactcatcgacgcaattttggaaaaggcaaaactgcgcaaaggcctttctcacagagaggcatctgtactgctggcttgcgaaatgcctgataagattcagcagatctatgctttggcagaacagctgaaaaaagatttttacggcaatcgtattgtcatgtttgcgcctttgtatctgtccaattactgtgtcaatggctgtgtgtattgtccttatcatgccaaaaacaaacacattgctcggaaaaaactgacacaggaagaaatcgtcaaagaagtcatggctttacaggacatggggcataaacgtctggcgctggaagctggggaagacccggtgaataaccccattgaatatattctggaatgtattaagaccatttattccattcagcataaaaatggtgccatccgccgagtgaatgtgaacattgcggcaaccacagtagaagaatatcggatgctgaaagaagctggcatcggtacatacatcctgttccaggaaacttatcataaagaaagctatgaacagctccatcccacaggcccgaaacacaactatgcctatcatactgaagccatggacagagccgtggaaggcggtattgacgatgtaggtctgggggtattgtttggtctggaacggtatgcttatgaatttgcgggacttttgatgcatgcggaacatctggaagctgttcacggtgtaggccctcataccatcagtgtacctcgtgtgaaacgtgctgacgacatcgatcccaatgcttttgataatggcattgatgatgaaatttttgcaaaaatcattgcctgcatccgcattgcggtgccttacacaggtatgatcatttccaccagagaaagcaaggaagtccgggaacgtgcactgcatctgggcgtttctcagatcagcggcggctcccgtaccagcgtaggcggttactgcgaagaagaaccggaagacgaaaattcggaacagtttgatgtgagcgataaacgatcattggatgaagtggtacattggctcatggatttggactatattccaagcttctgtacagcatgctatcgggaagggcgtactggtgaccgcttcatgagcctgtgtaagagtggacagattcagaactgttgtcatcccaacgccctcatgaccctgaaagaatatctggaagattatgcttcgccggatacaaagaaaatcggggaagcactgattcagaaagaactggggaatattcccaaagaaaaagtcagagaaattaccgtacatcatttgcaggaaatcgaaaaaggcaatcgggatttccgattctaaaggcaggaggtttttatgggtttacaggatacaccatccgcggaacgggtgcaaattggattttttggctgccgcaacgctggcaaatccagcttagtcaacgcagtgaccaatcaggaaatggcagtggtttccccggtgaaaggtaccaccacagacccggtgacaaaagccatggaattgttgccccttggccctgttctaatcattgatactcctggtattgatgatgaaggaggactgggagcgcagcgtgtgaagcggacaaagcagattctcaatcgtatcgactgcgctgttctggtggtagacagtgtggcagggaaaacgaaagcagatgaggaacttctgagcttatttcaggaaaaacagattccatttcttgttgcttataacaaaagcgacctgcaaatgcccgttttatcaaaagaaaacgaagtggcagtcagtgcgctggaaaaaacaggcattgaagaactgaaagaacgcattgctgcattgggcaaagaaaaccagaaggaacggatgctggtaagagacttggtaaaggcagaagatttggtggtgctggtgacacccatcgacagttctgcgccaaaaggacggctcatcctgccccagcagcagaccattcgggatttgctggaagcggatgccattcctgtggtgacgaaggaaaatacactgaaaaccacattggaaagtctgggaaaaaagcctgccatggtcattacggacagtcaggcatttgctcaagtcagcaaggatacgccgttggatattccattgacttctttttccattctcatggcgcggtataaaggatttttggaaggtgcagtgcagggcgtagcagccatagaaacattgcaggatggggataaagtcctgatttgcgagggctgcacccatcacagacagtgtgaggatatcggcactgtgaagattcctcgttggctgcggcagcatacaggtaaggaattagaattggtgcatacttccggcaaagattttccagaggatttatctccatatcgcctggtgatccattgcggaggctgtatgctcaatgaacgggaagtggcatatcgccagaaatgtgctgctgatgcagggattccttttaccaattacggcattgccattgcatatatgacaggaattttgaaacggagtatcgaaatttttccgaagctgtatacattgatttaatataaaaaaagactatgggaaccaccatagtcttttttaatatcaaagcggaaaatgtccgctgcggcgcagtgccaccagaatgccgggaatcaggatcaattgcagtatgatgccgggaatggcttccagtaaggcaccggaaaggaacatctgccaagtgaaggcgttttcaccaataccaagcagcagaacttccacaatgcccgataccacacggcctaaaatcatggcagaaatcagggcgatgtaaagagaagcagtggatttttgtttggaatgtccgtagatgagtcctgcaataagtccataggctgccagctcaaatgccatggcaatggcaacggggaacatgtgtggcatgccgaagatcatactgcggcaaatgggcagcagaaagcctaaaaacagcgcatactgccatccacagagaaaggcgcagagaaaaacaggaaagtgcatgggcagcagcatattgccaatctgtggaacttgtcctgtcaaaaagggaagtaccaggcccagcgcaaaaagcagggcactgacggtcagttgttttgtggatcgattcat

SEQ ID NO: 174 - DNA, 31930 bp, unidentified
  source 1..31930: mol_type = unassigned DNA
cgtaggcggtcagctcggtggccgggatgaggtggacgccgttctgcacgggatgggcataggcgtagcgcacgctccgaatcgaatcgtggtcggagatggccagatgggtcatccccgcgcaggccgccagaaacggcagcttgtccgccggggtcgaaccgtcggagaaggtcgtatgggtatgcagatcaccgggcatgggcgtcacctcacttgcgaatgtggatactatgggacatattattatactacaagtcgagggagaattgcaagtaggggcggacagtgcccgcccgcaaacctggcgcagccagcaaggctcccgggcggatatagaatccgcccctacagcgtaggggtcgatgctcgtcatctacccgggaaccatgcgaaggccggaacatttgcgggcgagcaatgcccacccctacaaattttacgctattttctctcttttttcagttcctccaagtattccgccagctcgtctatgtcggcgtcggtgagagtgtcggtttcggcaagggcggctacgaagttgcgggggctgccgccgaaaaggcggccccacaggttgcggctttcggcgggcaggtacgcggcccgggtcagggcggcggtgtagaggtagcccctccccagcttttcgcgggtgacgcagcccttttcctccagccgggccagcagggtcagcagcgttgtgcgggcgcggggcgggccgggcagcgccgtttccagctcggcggcggtcagcggcgcgtcggcatcccacagggcgttcatgatttccagctctgcgtcgggcaggcgtttgattttggacatgggatgtctcctttttaagacaagctctggccctgtacacagatggtgcgggcgtcaaatttcaggctggcgttgccgttatgaacgtagaacgtgtagcgctccacaccgggccattcggcagtaatatacaagccctcgcgcgtgaaggtccagacgcccgggtcgtcgctttcgagactttccggcggggtgtagcccgggagtgcagcggtcttgggtgccgagaaatccagcgcgttcacttcgtcgtaggtcaggtagagcagctgttggttccaatcatttgcaggagtgaaatcaacgttcagcatcatcagggcgtcggcctcgccgtaaaaatactggttgcggtaataaaggtaggtttccagctcgtcctgcggccaatcgtcggggttaaaaaagttctgcgcccccgcttgggccagcgcgttgcactggtgcagcagcatacggtactggttgttggtcaggtccagctcccgcgccatgggcagaatctcaaaatgtgccgattggttcgggtcgtcggcagactgccagccgctgatgacctcacaaggctgcgattcgtcgaacggcgcaatcagataaacatgaaagcatccctcgccgtattgtttgcctagataccaggcttcgggcgtcagctcggcttcaaaggtcgctttgaccagtgcgccccggccgccgttcaggtagtcgcgccaagttgtgccgtcgtcgcgccgggtttccagcagggcggaaatgtactccgtgtcgtagtccgtaggctccacaaggccgcacgcgccgctgtggtagtagtagccgtttccgtcggtcaggtagtcgctccaaaggaagtccgcgccgcggcgcacggctgcggcccccgcctccattgaaatgggcggcggctccggggtcacgatggggttggccgtctcggacggctccggtgcggcggtggcggcgggttcctgcttgtcttgcggggccgcgtcggcgggcttgcaggcaaccagcccgcccgcacagcaggcagtcagggccagcacagccagcaggacgcgtccgtggtgcttgggggcggtgtcccacagtgcggccagacgctgcttgaactggcgcttgttcagggcaaagccgctggtcagcgcagggccgcggttctggcgcacggcggtcagcagcgcgtcggcgtaggccgcgcggcagtcggcatcgcggccacacagggtctcggcgtcacaggcctcctcaatgtcgcggcccgcgcgggcggccagcagccagacagcagggttataccaatgcacggcacacgccagcgtaaaaagcagctttttggcgacgtcatgccgttttatgtgggtcagctcgtgggccagcatgtagtctgcgccattgggagccgcgcccgtgggggtcagaagtacgggatgcagcgtgcccgccaccatggggctgcgcaccagcggcgtggcgaccatgcgcgggcacgccccctgcggcagggcactgcgccagctggtgtcaaccggctgtgcagtacggcggacgcggatgcgccagacggcatagccgccaaattgatagagcgcaacagccagcacgccgaggttccacgcaaggtccagcaggttcagccgcgttgcgccgacggcgagacgttccagcaccgtgcggtgtcccgtctgcagctcggcgcggggcacgatgtaacccgtgggcgcagccatgtagggcacaccgtcggcggggcgctcggtgacttcctgcgaaagggcggtccggctgtacagcggtgtggtatccacggacaccgccgccggggcctggggcacaagcgcgtgcagcggcaccagaagcagcacggccagcgtgacccacaggcggcagagccactgcgggccgtagcgtttttgcagccggggcgccgcggccagcaatgccagcgcggccaggcccagcagaatgccctgcacgaacagcgaagcaaaaagtgtggcgaacatggggtcgacctcctttgttctacagttgtagaagatagctttattctacaagtgtagaagggtggtgtcaaggggtgtaggtgacaaagtttgacagggttgtttggtggaattgcacaagggcggcagcgggcaggtggagggccgggcatgcccgtcccctacagtgccacgcttgttgaacaggcgttgaaggcaaggtacacgggagggatgaatccctcccctgcaaatcgttaccgggtggttgtagggcggccaggcctctggccgccgcggacgtttgcggtactatataactttatgggctgccactgtagggggcggcatcctcgacgccccgcggaggggtcaaagcccctccctacaaatcgctcgaaaacggggctgcgcaccaaaaaaagcgcaccgcccccagtcgggagcggtgcgcaaaatatctttatgctatgccagacttacgccagcaggggcttgcaggcctcggccagcttttccttctgggcctcggcctcggcgaggtccttgcccttggtggtaaagtaggtcttgatcttcggctcggtgccggagggacgcacgacaaccgtcgcgccgctttccagcgtgtaaatcaggacgttggcggcgggcaggccggtttcctcgggcttcttgtagtccacgaccttgacgaccttatcaccggcaaagtccttcggcgggttgacgcgcaggttctgcatgatgtcggccatcttgtccatgccggacaggcccgggaactcaaagctgtccaccttgttcaggtagcggccatattcagcgtagatacgctccaattcctctttgatggaggagcccttggcgcggtagtaggcggccatctcgcagatcagcatcgagccgatgatagcgtccttgtcgcggacgtagggaccggccagatagccgtagctttcctcaaagccgaagataaagcggtccacctcaccgtcggcctccagcttggcgatctggtcgccgatccacttgaagccggtcagcacgttgcggcactcgacgccgtaatgctcagcgaccttgtcagccagcggcgtggagacgatggacttgcacatgacggggttcttgggcatcgtgccctgctcaatgcggcccgcgcagatgtagtcgagcagcagaacgccgacctcgttgccggagagcagctcatagctgccgtccttgcacttgacggcgatgccgacgcggtccgcgtcggggtcggtggccagcatcaggtcagcgccggacttctcggccagctccagacccaggcgcagcgcctcgaagatctcggggttgggatacgggcaggtcgggaagttgccgtccgggttcttctgctcgggcacaatggtgatgtcggtgatgccgatgtcgcccagaacatgggtgacgggcacaaggccagagccgttcagcgggctgtagacgagcttcagacccgcggtcttgcagatgcccgggcggatggagcgtgcctcgatggcggcatacagcgcgttgatgcagtcgtcaccgacgtactcgatcaggccctgggccatgccgtcctcaaaggagatcagcttggcgccggtcaggatatcggttttctgaatttcggcgtagacgatgtcggcggcctcgtcggtcatctggcagccgtccgggccgtaggccttgtagccgttgtacttggcggggttgtggctggccgtgaccatgataccggcgttgcagttgtaatagcgggtcgcaaagctcagcgcgggcacgggcataagggcgctgtagatgcggaccttgatgccgttggcggccagcacctcggcagcggtcctggcgaacaggttgctcttgatgcggctgtcatagctgatggcaacggtctggctgccgccctgggtcttgacccagttggcaaggccctgggtcgcctgacggacaacgtaaatattcatacggttggtgcctgcaccgatgacgccgcgcaggcccgcggtaccgaacttcagggccacagcaaaacggtcctgaatggcggcatcgtcacccttgacgctttccagctcgggcttgaggtcagcgtcgtccagctctgcagcgagccaacgctcatacatatcctgatacataagtaaaacaccttcactttccataggaaacacgaacttaggtatactctaaatataccaactttgccgcactctgtcaatcgaattttgtttatttttgcctgatttttacagtttctttcgcctttttcccttgccaaacggcgttttccagtgtatagtgaaggtatctgctctgcacatcgatgattatttccaaggaaagccgtggacctatatgaaacatacgcctgaactcatcgtcatgctgactcacaacgacgtcactgtgcccgatgccgccgcagtctttgcccggtgtcagcacacccgcgcccggtattggggctttaaagaggaagggcttcccttcgccgagatgcaggccctgtttgcccagatgaaagcctgcggcaagacgacctgtttggaggtcatcgactacaccgagcctgaatgcctgcacggggccgaaatggccgctgcctgcgggtgtgatatcctgatgggtacggtctactctgacgccgtccatgcttattgccgcgcccatgggctgcggtatatgcccttcgttgggcaaatttctggccgtccctctatcctgcacggcaccccggcggggatgatctgcgaggccgagggctatttagccaagggcgtggacggcattgatctgctgggctaccgctataccggcgacgcggcggcgctgaaccgtgcgttcatcgcggcggtccatgcgccgatctgcctggcgggcagtgtgaacagctttgcccggttggatgaaatcaaagctgccggggccgcgtatttcaccatcggaagtgccttttttgcgcacgcttttggcggggatatcgccgaccagatcaacaccgtctgcgactatatggaggccccgcatgcttgagcgttggtaccccacggcccatgttcccagcgtatttgccatcgactatgaaaagctgtccgcgctgggctacaaaggcattctgtttgacattgacaacacgcttgtccaccacggcgacgattccacgcccgaggtggacgcgctgttccgccatatccacagcctggggctgaaaacactgctgctttccgacaattctgtcgtgcgcattgagcgattcaaccgcaatatccgcacgctttttattgccgaggcgggcaagcccgaccccgctgcctaccgccgggcctgcgccatactgggcctgccgcccgagcaggtcgtctgcgtcggcgaccaggtgttccgggatatccgcggcgcgaacagcgccgggctggacagcatcctggtggatttcatccggctgcccggcgagacgcactatggcaaaaagcgtgtgctggaaaaagccatcctctggttttaccaccgtgacccgcgccgccggggccgtttggacggcataggaaagtgaggcagtttcatgttctgcgatatcagcccgacctgttacaaaattgcgctgcaaaaggaaatctgcaagcgccatatcaagaattttttcgcgcaggaaaactatgctgacacacaggataccgcgcctctgccctgcatagtggcgcagtacagttcgcacctcatcaagcgcggcaagggcatcgacccagtcttgcaggagaacaaggccgtcaacatccgccttgccaatgaaaggctcaacggcattctcatccgcccgggtgagacgttttccttctggcatcgggtgggcaagacgaccaagcgcaagggctaccgggatgggcggattttggtgcgtaatcatattctgccgggcatcggcggcgggctgtgcaacctggcaaacacgattcaccgcgttgtgctggtaagccctctgaccgtgaccgagtttcacaagcactccgacgcgctggcccccgacgaggggccgcgggtgccgttcagttctggcacgtcggtgttttataataacggcgactaccgttttaaaaatgagatggaccagacgttccagctgctgttgtggtgcgatgaggacaacctctacgccgagctgcgctgtgagcgccccctgccctgccgctaccgcattgtggaggaagggcaccacttccaaaaagagggcggcaaatattaccgtgtgtcgaagatttacaaggagacactggacgcacaaaccgggcagctgctgcatcgggagcttgtgctggacaaccattccgaagtcatgtatgaccccgcgctgattcccggcgtggaaaaactgtaaaggaagccgcctatgtatgcaaaagtgacgagccttggtgtgaccggtctggcggggtacatcgtgcaggtcgaagccgacctttcgggcgggctgccgcagttcaatctggtgggtctgccggactccgccgtgaaggagagcagtgagcgggtgcgcagcgccatcaagaacctgcactatgagtggcccgccagccgcatcaccatcaacctggcccccgccgacgtgcgcaagaccgggccggtgtacgatctgccggtgtttgtgggcatcatggccgcgcagggcaagctgcccgcccccggcagtgagcgggcgtttctgggagagctggggctggacggcacgctgcgccccgtgaccggcgtgttgccaatggcgctggccgcggtgcagaacggcgtgaaggagctgtttctgcctgccgaaaatgccgccgaggccgccgtggccgagggactgaccgtctacccggcccgcagtgcgcaggatgtggtgctgcacctctgcggcgcaacgcccctgaccccggcaacgcccgaggggtacgacgaggacggcgtctggctggggccggacatggccgatgtgcgcggccagagcgaagcccgccgcgccatggagatcgccgctgcaggcgggcataatttgatcatgatcggaagtcccggaaccggaaaatctatgcttgccaagcggctgccgggcattctgccgccgctgacctatgaggaggcgctcgagaccagcgccatctactccgtggccgggctgctgcgcggcggcacggggcttatcaagcagcggcccttccgcagcccgcaccacagcgtcagctcgacagccattgtgggcggcgggtctgtcccccgccccggcgaggtcagtctggcgcacaacggcgtgctgtttctggacgagctgcccgagtttgcccgagatacgctcgaggtgctgcgccagccgctggaggacggcagggtcaccgtcagccgtgtacacggcacggcgtcctatccgtgcaggttcatcctggtggccgccatgaatccctgcaagtgcggctatttaggccatcccacgcgggagtgtacctgcacgccgagcgcggtggatgcctaccggcggcgcatctccggcccgctgctggaccgcattgacttacacgtcgaggccctgcccgtggagtacgacgaccttgcgtccgagcagggcggtgagtccagcgccgatgtgcgtgcccgggtcatggcggcgcgtgctttgcagcgggagcggtacaaggccctgcccggcgtgcggtgcaacgcgcagctgccgtccggtgccctgcggcgctactgccgcatgacccctgccgccgagaaaatcctgcgcagcgcgtttgagcggctgggctacagcgcccgcgcctatgaccgcattctgcgcgtggcccggaccgtggccgatctcgacggcagcgaggtactggacacggcgcatctgtccgagacgctgcaatacaggacgttggacagaaagttcgggatgtagtaaagttcatacatcatcacactcttttatccccgttaagaatggggcatagctcatgtcgcgagctatgccccatttttaattttgctgcaattttataagaagtttcttctcccagttcttcaaatccgcaatggcttttgtcacctgctcacggacttctgtctgcaaatcattttcggtatcaatcccatatttttttgaataaacacgcttgtaccgataaccttcccgctttttgtcgtttggttttgcgatgtctataattttattttgaattttctttttgtcctctggcaaattccagccgccgagttcaaagacaagcgaaagggattcatccgttctgccaaaccaatagttatagatgttgctgttgccccatgacccattgtttgcagacagcggcggcagtactgcgtccatttcttttgtgtggaagcacagccaggaatccgttgaattttcgtcaaaaacgatactaccctcatcgctcatctgctgtagggtttctctgaccgccgctgcgatttgcccgcggttattcacgcggtgttcaaatatgaggtccagtgctttttgatgttttttgtatattttatcgcatatctctatcaactgttggtcgtccacaatatctctcctgataatcgctatatagttgtcaatcatcaaccgcacatccggaatcaagtcgatgccgcctgaaacactttccagtgtttcaacaatatccagataggtcatcacatcccagtactcttcatcactcggcaattccccgtctggtgtcagatacagatagattctgcaatagtccgggtacgctttttcaaggatttttcgataccggttcagttggtcactgtgctcatgcgacccaaccttattttcaaatgctatcagtgttttttcttcgctggaggtgagcaaaatatctatattgttccactccctctgtactgtaaagctgtaaaaatccatcaatgccagttggaacacatcgtaccgcccagcactatcattcgccaccagtttttgcaccagcgcttttacatacgcatcacccatgccatggttttcatttgcattcaaaagccacgccagcatattgctgtgacgtatttcagtgcgtgaaatgcgaagcacatcaaacaggttaaatttccccgtccacggaagcaattcattcaagcagtctatgtccagcaggaatttttttaatgcctcttcattcgtcatgataacatccttattttgccagaatttgcagcagcctttcagcgctcttgtcccagctgtatttttcgagaagggcggcggtgggagccgtggccggggtgacgtcatcgacgtcgccggggttcgcggtcaggtcaatgtaggcggcgcaggggccgtagacctcccgcatacaaggggtgtcgctgacgatgatctgcggcgcaccgcaggcggcggcctccagcggcgggatgccgaagccctcatagagcgtcgggaaaagaaaggctttgcagtgagccatcagcgccttggctgcaccgtcgctgacataccccagatacagcacattgggcaggtcggccaggccgaggcgctcggcctcggcggcaaggctgccgccgcccgcaatggcaaacacggcgtcgggcttggccccggccgcgcgcagcacccacgggaagttcttgtttttgagcaggttcgccatgctgaaatagtattgaccgggcttgagctgtgggtgccgggcaaaaatgctctcgtcgggcgcaatgcgctgcatctgctgccaggcgttgtagacaacgtccattttcgacgcaggaacgccgtaatatttggcaatttccgatttggagaattctgacaccgtgatgatgcgctcagcccttttggcaatgcggcagtattgcaggcagtgccatgcagcgctcagccgcccgcgggggtcggtgtaaaagtccgggcgcgcgcggtagcagacatcgtgcacaacggcaatgccgcggaaaccgaacagcgggatgacattgcaggtggcaagtcccccggccccgcgctgccggaggtagcgcgggtagtcgagctgttgccagacgccgcccctgtgcgtgccgaaggaaacgacctttatattggtatagtgcggcgtttcaacgccctgcggggtgacaatttcgacaaagcccggcgggacgatgcggtccagcgcggcgagcagctcgatggaatagcgctggatgcccgaaaggcgctgggcaaaaaacgagccgtcaacggcccagatggtgttggacatagagtacctcttttgttacggcgcggttggcggcggccagaggaccggccgccctacgatgcaaattgctgcttgtacagcaggattttattgacactccgatccaagcgttcctcggagatcgtgccgttttgcacagcctccaggacggcggcgtaggcctcgggcagggagttgggcatcaaaagtacatcacagcccgcctgaagggcctgcatggcggcctcgccgggggtgtaggcggcggtgatggcatccatcgccagcgagtcggtgacgatgagggtgttttccgcgtcggggatcagcgcgacaagctgcggcgaaagggtggccggggtgccgtcgccggtcacattcggtgcggcgatatgcccgaccatgacggcgtgcaggccggtgtccgccgcaaaaggcagcagctcgcaggcttgcagctcgtcgagcgttttgtaggtcacggccagcgcggtgtggctgtcctcagcggtatcaccgtggccggggaaatgcttgagcgtcggcaggatgccgccggtgcgcaggccgtccgcggcggcagcggccattttggcggcggtggcggcgtccggcgagaaggcccgcgtgccgatgatggggttatccgggttcgtgttcacatcggcgtcaggcgcaaagtccatgttgaagccgtactcctttaaatatgcgccgatggtctgccccatggcgcaggcgtccgccgggtcgccggacgcgcccaccgcggcggcgctctcatattgcggcaggtcaaaggccgggtggttggccaggcgcgccaccgcgccgccctcctcgtccaccgcgatgaaaagcggcgtgcggctggcggcctgcagatcggcgttgaactgcgccagctgctccgggtcggtgatgttcttcccgaactggcagatgccgcccacagggtatgcttgcagggtctcccgcatggcgtcggtcagcatggtcacaccgtcggcctttgcgtcgttgatggtctcctgcgggagcgtaagatccaaggcgtcgggacggatgatgaaaagctggccgattttttcttccagcgtcagcgcgtcggcgggggcgggcgctgcggttggggccggggtggacgcgggagttggggtcggcgcggcggcgggcagggtgcccgccggggctgccgtacaggcggtgagggtggtgaggagcagtgcggggagaagcaggcgtttcatagggggtcaccgcctttcgggtgagggtgagtggtgtggcgaacggcgcaggcggatatggaatccgcccctacgagggatgggtaacaggcattgccccggggacgagtgccaacggaaggttggcgggcgaacaatgttcgcccctgcaattactaatatagtagcatatttgcagagcaagagcaagacagcaaaaaggagcgaccctgccgtaacccgttagtgggttttcatggcagtgtcgcccctcatccggcctgcggccaccttcccccaagggggaaggcttttgctcggctatatttagtccggcagactgtcggcgtagtcgttctcgccgccgacggggtactgggccacaacgtcggtgtcggcggcagtctcggcggtggcggtatcgtcgtgcagcgactccttcgtcacagcaaaggcggacttgtggtcggcgttgacctcatagaccagcgtcggcgcgtcggagctggcaaggtagcacagactgtcgtcggacgcgctcgccgtgccgaaccgcaccgtcaggcttgtgccgtcggtgaaggacagcgtcgcggtcacgtcgggggcatccagcccgtaggccctgtcagcatcgggcgcggtgatggtccacgcggtctgcatttccagaatcgtaccggccatcttcctgacgctgctctgggtcagggcgtagtccgggtcgtcggccagcgtccagatgccgtcggtgcaggtaaatgtcaggtcgttcacctgcatggcggccacatcgtctgtcgtcttgtctgtcagcgtctgggccttgtacaggtcgcggggtgacttgctcagcgtcgccaggtcactgcgccggaccgtgtaggctgcgccggattcgtcgtagacgtagtagacgtctgccacgctgttcagctgatctacagtcaggtccacggtctgctcccctgccccgagggtgatcgtcatctgcggggtgtcacttttagcgggcagctcggccaggtcattgccctcgagcttgcgctgtgccttcaggttggcgtagtcctccacaaggctctgcaccttggtctggtccagcggcagcgatgggtcatcggccagcagccagccgtcgctgcccttgaggagcgagacttctacattgttgcccgcgtaggacagcgcgtcgatgtcatccaccgcaaggtcacacagcggcagcgtcgtgtcggtctccgcctccccgtgcagtgtcagcacgaccagcaggatgcccagcagcgcaacgacgcccacaaggatgacaagcggcagaaatttcttgtttttcatggttctcctttatctgcggcggcgcacaacgcagaccaccgcgcccgcaatgatgcagacgatgggcagcaccagcgtgaacagtacgcccagcgggatggccgccgaggtcggcacgctcagcgaggccgcgctcatgctcttggcgttgatgaccgctgtcgtctgctcgccgttcatccagttgacaacgctgcccaggaattgggcgttgccgccagagacggcctggttgatgttgctttccagcaggttcgggcagttgacccagacaacgcgcgcaccggtggcggagttatccgccgccacagccacggcaaagcagccctcggggtcggtatcggccttctgggcggtctcggcggtggcgtagttctccatcgagtaggcgttatcaccggtggtcagcaggtcggtaaaggcaaactcgctgtcgtcgttcgtcgtgatgccctgagcaatgggggtgtagatcatcatgctctgggacacgcccgcggtgatgtcgttgccggccagcttgggcagcaggtaggtttgggggtagccgtaggggtaatggtcggtgtcggtctcgatcagcaggccgggctggcgggccatgccgcagtcggccagcacactgtcaagattcggcgtcccggtggtgaagtcggtggtcacaaacagcttgccgccgttcgccacgtagtccttcaaaatcgtcgtctcggcatcggtcaggtctgcgcccggcgcgttgataagcacggcactcacgtccgccgggatgctgccggcggtggtcaggttcagcgaggtcacggtcacaccggcgttggacagcgtgtcggtaaagtcgtcggacagcgcggtctcgccgtggccggtcagctcgtacagctggtaggccgccgtgcgggtgaccttggcgatgccggaggtcagggcgttctcggcctggaagctgtagttggccgtgccggtggtgtagtagctctccaggtccatctcgtacatgtcgttgtaggagagcacgtcgctgttgtcgccgcagaccagcacaacgctgcccgccgacgcgccgtcatactgctgggcgaacgtcgggtagagcacggggtcgcgctgttgccagctgaaatggctgctctcgcccgcgtagcggtccaacaggcgggtaatgttcgcgtcctcctgcccgctctcggccagatagtaggccgtcacatcggcgttcagctcatggagcaggttctcggtggtgtcacttaatgtgaaaagcgacgtcgtggaaatatcgtactcggtgtatttggtgggcagtgcgcggatgacgaggttgaccagaatgatcaccgccagcaccaccaccgccagcgcactggcgtacataccgctgtgcagggcacgcttgctgccgccctgcgggagctttacattcaactttttcatggcgtatccctcctcaattccaacggcggcgttccaacgcctgcccggtcaggaagaggaacagcccgatgaccgacagatagtacacgatggccgggatgctgaacataccgcccacaatgtcctggaacgggtcaaacagcgccagcgcggacagcaccgcgttgaaggccgtcagcagccacgccgggcgcagccggaacaggatgaacagcacgacagcccccacgcagaacaccgtgacgcccgcggtcagccgcttgcagataacgccgacgagaatcgacgcgatgagcacgacgaccataaaagcaataaatgccagcagattgccggtggtgaacatggtctggatgctgtccataatgtaggcaacgagcagtgcgccgaaggtggcgaggtaggctaagatctggttctcggtcagggccgagatccaggtgccgacggccaggcaggcgctgcccagcagcaggtagccaagcacggcgctgtacgccgcaacgagcgagaccgtgccgaacgcctttaaaagcagcggcatgagcacggcggcggccagcggaagggcaaagaccgcgacctcggccagaaacttaccggccacgatggccgggatgctgaccggactggtcagcagcagctggtcggtgcggtttttgcgctcctccgcaaagctgcgcatactgatggccggcagcaggaaaagcaaaatcatcgtcatggtgtagagcaccgacgcaaagtccgacgaggcgtagagcaggttgcggttggtgtagtacagccccaggaagaaaaggcttacggcagcaacgacccagccgatcatgccggcaaagtagcttttgacctcgcgtttaaagattgctttcatcgctgttcgcctccttttcgtttgcttcttctgcggcggcttccgcagggggattttcggcgggggcagcggtgctttccggcttgccgctctcgggtgtctcggtcaattgcaggaatacatcctccaggctcatcgtctcggcgctcaggctcagcaccgggcagcccgcctgagccagcgccagcgagagcgcaccgcgcaggtcagtacctgccgtgctgacggcggtgaagctgacctcgccgcccttctcgtcggtgacacgcaggtcggtcaggccgggcaccttgccggcagcggccacaacggcctcgcggctgccctgtgccgtggcggtgatcgtgcccttggcggtcagctgagcggccaactcctccggtgtgccctgcgccacgagcctgccgtgggcaatgatgagcacccggtcacagacggtctggacctcgctcaaaatatggctggacaggatgaccgtgtgggtcttgcccaggtcgcggatgagggagcggatctcgatcatctgcgccgggtccaggccgacggtgggctcatccagtatgatgatcttcggcgtgccgagcagcgcagcggcaatacccacacgctgacggtagcccttggacaggttgcggatcaggcgctgctccatgccctgcaggcccgcgcgggccgtggcgtgcgccactgcggcggcacgatccgcctttttgcgggtgcccttcagctcggcaacgaacagcagatactcctgcacggtcatctcctgatacagcggcggcagctccggcaggtagccgatgcaggccttggccgcggcgggctcgtcggcaatgtcgtggccgtcgattttgaccgtgccgtccgtagccgaaatgtagccggtaataatgttcatggtggtcgatttgcccgcgccgttggggccgagcaggccgtagatgccgccatcctccacggtgaagctgatgtcgtccaccgcggtgtggctgccgtagcgctttgtcagatgctctacttcgatcaaagtgcgcactccccttttcatttcataatgtcttttattatagtgataaattgtgataattttgcgacaatggtttgaagaagtgtgaaatcgtgcgcggggctttgccaaaaaacgccgcggaaacaggagcagctcccgtttccgcggcgtttcgcgggtttattctgaatcagaagtccatgccgttggggtaggtatcatgccgcacaaagccgccgagctcgtcggtagtcgtcatgcccatggccagtgccttgctgcgcatggcggcgtaaaattccgcgtaggtcgcctgcatgtacggttccaaaaagaagccgccgatgccgaaggtgaacacgcagagcagcagccagccaaagaaggacagcttgaggatgaagaagttccacttctcgccctccatcatctccttactcagttccatagcgcgggtggcggacatataggggttttcggccagcaggtagggcaccagctcatagcaatactcccagtaaatgcccggcacaatgagcaacaggaagcccagcgcgattttcaggtcggtaagcaactgcaccacgatggggttgccgtaggggcggcggaaggcgctgacgacggtggagacgggcgtcagggactggcggctctccataaaatagcggcagcggccgacgttgagcgggtagacgacaaagagtgcccagcaaagcgcggcaatagagccgatgagcataccgacgaagatcgcccccagcatactgtcggggatactgttgatgatgtcataggccgtcgtgtcgtccgtaacagtgctgacagcctgatgcgccgcattgccgctgttagcccctgccccgcccagtcctacaaagctgagcaccagacagatccagaaggaacgccagtagcgtccctgcagggcctgcttggcgttggtttttaaaagttcgcgtgtccacatagtgggtcacctccataattcatgctttagggatgggcaaagctccgatttgttctcgagggcgtgcagcatacagttgtgttcagcttgtctttcatctatatactgcattttgatttcgcaaaacatgcgttttgctcacggttgcatgcttttactatatgcttttattataacagcttatggcgtaaatgcaagttttgacgcggcgcgttttgacgtttttgcgcagtttttactcatgttcacaaaaatataaaaaagtttggcattttttgcggaaaacgcttgacatttgtttgcggtttggctataataatacacgtcgtcagggccacggcccacgacgaaaagaatatgcggatgtggcggaactggcagacgcgctagattcaggttctagttcccttaaaagagtgtgggttcaaatcccttcatccgcaccaaaatcctcgaacgtttgttcggggattttttgttttagtgatttgtttgggatgacaagcatcgtcctctgcaccgtaggggcggattccatatccgcccgcggagccttgccattactgcaaacgtcccgggtcgatgacaagcattgacccctgcggtgctggcggttcgcgcttttctgctatagatacagcaacagccccggtcctgcactggaaccggggctgtacgattttacatcagttttacgccatgaaatccggcaggggcttgccctccttcagccattggtgatactcggcggtagcggcaaactcaacgtcgccagcggagttcagcgccgtctcgaccgaatcctggatgacaccaatgataaagccgacaccaacgacctgcatcgcaatgtcattggagatgccgaacaacgagcaggccataggaatcagcagcagcgaaccgcccgcaacgccggaggcaccgcacgcgcccagtgccgacatgatggacagcaggatggcggcgggcaaagagacctccatgcccagcgtgttggccgcagccagcgtcatgattgtgatggtgatggccgcgccgtccatgttgatagtcgcaccaagcggaatagagacggagtagatgtccttatccaggccgagcttctcacacagagacatattgaccgggatgttggccgcggaactgcggataaaaaaggcggtcaggccgctctcacgcagacagcgaagcaccagcgggtacgggttgcggtgcagatagatgaagatgatcagcggattgatgaccagcgccatcagcagcatagtgccgaccagcaaaagcagcaggcggccatactgagtgaagatagacaggccgttgtccgacacattggcaaaaaccagtcccatgatgccgaacggtgccaggttgatgatccagcgcacgatggtggagaccgcgtccgcagtgttgaccataaagttcttagtcgtgtcacttcccaggcgcttcatcgccaggccgaacaggcaggcccacatcaggatgccgatgtagttgccgttcatgattgacgccaccgggttggaaacaatgttggccagcagcgtgtgcatcacgtcacccagaccctgcggcacaacgtccgccgtggcggcctcggccagaaccagcgtctgcgggaacagcttgctggtcaccacgctcagcgccgcggccacaaaggtcgtcagcatatacagccagacaacggtgccgaagcggcggtccagcttggatgaaccctgggccagtgcgctggcaacaatgacgaaaaccagcaccggggcaatgcccttcaacgcgccgacaaacaggctgccgaattcttccagccatacggcgccggggcagatcagtgccagcgccgcgccgataagcagaccgatggcaatacgcaggatcaagctggtctcgttgtacttggcggccagcgacttgaccgccttggtgaattgattcatgtgaagctcctcttccttattataatagtcgggcacgttttgcagggtgtgtgccgtttgcagccgcccgcacaggcggctcgcgtgacaatccacattatagcgcatcccgtgcagattgcaagagaagtacagatgtagtgcttgcaaaaacagtcgcttttggtcggtgcaacgcgggaaaaaaatgcaaaaaatgtttttgtgcgcaggataggtgtatttgtaccgcgcacatttcgcagttgcatagggcatcacgcctacagcaccgcaggggtcaatgcttgtcatcgacccgggacgtttgcagtaatggcaaggctccgcgggcggatatggaatccgcccctacggtgcagaggacgatgcttgtcatcccaaacaaatcactaaaacaaaaaatccccgaacaaacgttcgaggattttggtgcggatgaagggatttgaacccacactcttttaagggaactagaacctgaatctagcgcgtctgccagttccgccacatccgcatattcttttcgccgtgggccgtggccctgacgacgtgtattattataacggctggcagaagaaatgtcaagcgattttttgagaaaaatgctgcttttttcaacgaaaaatgcggtcttccgcttttcgacgaaagaccgcattttatgaaaagattaccagaggttgacgacctcgttgtacaggccctcgtagctcttggcggagttggaccagctaaagtcacactccatggcgcgcttgaccagcacgggccagccgtccttctgccaatagccttccttggcgcgccagcaggcctcatacagctcatgggcgttgtagttggcaaaggtaaagccgttgccgtagccgtcgccggagtcgcggatagagtccttcaggccgccggtctcgcggatgacggggatcgtgccgtagcggcaggagaccatctgggccaggccgcagggctcggagcgggacggcatcaggaagatgtcggcaccggcgtagatctgctgtgccagcttggcgttgaagccgatgtagacaccgacgcggcccgggttgcgtgcgcacagctcgttgaagaagttctcatactgggcctcgccggagccgaggatgaccagctcgatgccctgctgcagcagaccctcggcgatggcctgaaccaggtcaacgcccttgtggccaaccagacgggtgaccatggccatgaccgggctgccgtccttatgcaggccgaactcgtcctgcagggcctctttgcagacagccttgccctcctggaaggtctcggcgtcgtagtttttggcaatgtcagggtcggtggcagggttaaagacatcgacgtcaataccgttcagaataccgcacagcttatactgcttctggcgcagcaagccgtccagaccgtggctgaaccacgggtcgaggatctcctgcgcgtaggtcgggctgacggtggtgaccttgtctgcacactcgatggcgcccttcatgaagttggcacagccgtcatactccacaacatgggcgtcacgtgcgccgatgccgcaggtatcctcgagaatatccagaccatacttgccctggtaggcaatgttgtggatcgtgaacaccgtcttgatgcggctgaacttatccagatggcggtagtacagattcaggtagacgggcgtcagtgcggtctgccagtcattgcagttgatgatgtccggctcaaagtcggtgtagaacagcatctccagaatggcgcgggagaagaacgcgaaacgctcgccgtcgtcatagaagccgtacaggccgctgcgcttgaagtaatactcgttgtcgatgaagtaaaagacaacgccgtcgcgttcggctttgaacaggccgcagtactggctgcgccagcccacgggcacgctgaagttggtgacataggtcagcgtatccttgaatttcaggtcgccgtacagcggcataacgacgcgggcgtcgatgccgtcgcggaccagcgccttgggcagagcgcccgcaacatcggccaggccgccggacttggcaaagggtgcagcctcgctggctgcgtacaggattttcataagcacctccgtgcgagtttcacaaaatgagggcgagggaaagtctggctctcccccgccctctcatcaaagtcgtctccggggagagggagttcgacctctatgagcgttatgtctcccctgtgtcagcgttttgctggcgggggtattttatacgctgtggcccttggcgacgaacaccgggaaggtgtcggtgccggtcagcttcttgtcctcggtgatgtggacgttcttgtcggtgacgacgtactccacattgcagttcggctcaacaacggtatcctgcatcaggacgcaattcttgacaacagcgcccttcttgatcttgcagccgcggaacagcacgctgttctcaacggagccctcgatgacgcagccgtcagccagcaggctgttcttgacagagctgccctccaggtagcgggtcgggttatcgtcacgaatcttcgtgtagatgggcgcgggtccgaacagggcgtccatgctgccttcctggagcagacgcatattctcgtcgaagtagctcttcatgtcggagacgcgggcgacatagccgtcgaaccggtaggcatggacgttcagcagcttgaggttgcgggccaggatgtcgcgctcgaagtagacgaggccgcggacggaggcatcgtggatcaggtggatcaggctctcgcgctcaatgacatagatgttcatggcgaggttctgctcaccgatgcggtagtcgttggacagaatctcaacaacgcggtcattgtcatccagacggatggtgtagttatcactgcgggcaccctcggggatggcggcgcggttgtaaaccatcgtgacgtcagcgccggacttgacatgagcatcgatcagcttattgaagtcgaagttcatggcaatgtaggagtcggacaggatgacgtagcgctccttctgcgcctcgagccagttcaggatgctgtccagtgcgtccacacggccggagtacagcttgacgctgcgctcggcaaagggcgggacgatgttcaggccgccgcgcttacgggtcaggtcccactcacggcctgcgcccaggtgatccatcagagagtggtagtttttacgcacgatgacggacacgttgtcgatgccggcgttggccatgctggacagcgtgaagtcgatcaggcggtaacgtccgccgaacgggatggaggccatggagcgctccgccaccagttcgggaacgaggttatcatacgtattggcgaaaatgacgccgagagcattcacattgctgtttaccattgttcctcaccatcctttacatcgctggagaccattgccttggggccaaccactgcgcccttgccgatgacaacgccggagccgacggtggcgacatcgccgggctcggcaatgttcaggccgccctcgggcatagcgccgacggttgcgccctcctcgatcgtgacgttctcggccacgatgcagtgcttgacggacgcaccggccttgatgaccgtgccgcccataacgacggctgcttccaccgtagcgcccttctcaacgactgcgccggggaacaggatggaattgttgaccgtaccgttgaccttgcagccctcggagatcatcgagttggagatggtggcgtcgctgccaatctgctggcagggacggcccgtgttgcgggagtagatcttccagttctcatcgaacaggttgatgccggaatgcttcgggtccaggacctccatgttggcctgccacaggctggagatcgtgccgacgtccttccagtagccgctgaagtggtacgcatacatacggcggccatccttcagcaggttgggaatgacgttcttgccaaagtcgttctcggagttggggtcagcctcgtcctcgctcaggtatttcttcaggatgtcccagttgaagatgtagatgcccatggaagccagattggacttgggctccttcggcttttcctggaaggcgttgatgcggtcatcctcgtcggtgaccatcaggccgaagcgggatgcctcgctccatggcacctccatgacggcgacggagaactctgcgttcttctccttatggaagcgcaggaagtcagagtaatcctgcttgcagatctggtcgccggacaggatgatgacatacttggggtcatagcggtcaatgaaagacaggttctgatagatggcgttggccgtgcccttgtaccagtcagagccggaagcctgctggtacggcggcagaacgtgaacaccgccgtgcaggcggtcaaggtcccacggctggccgttgccgatgtactcgttcaggacgaggggctgatactgggtcaggatgcccaccgtgtcaatatcagaattgacacagttggacagcgggaagtcgatgatacgatactttccgccaaacggaactgccggcttggcgagcttctgggtcagcgcgtacagacgcgagccctggccgcctgccaggatcattgcgatcatttctttagccataagatttctccccttaaaatttcggcagaatgccgtgtttaacatatatccaaagacggcttacaccgtcgttttggccttgggcggacgtccgcggcgcttgggagccgcctcggtcacggcgtctgcggcaggggccgcagtcttggcagtggtttttgccgtctttttggcggcgggcttggcgggcttttccgctgccttgtccgccgccttggcggcgcgcggcttgcgggcagcgggcacgctcaggtagagggtggacagcggcggcagcgtcagcgaaatatgctggtcgaagccgtgcatcgggcccttcttcgccttgaccgtgccgttggtcacgccggagccgccgtacttcttatcgtcggagttgaggatctccttgtagctgccggggttcggcacgcccatctggtactccttgcgcagcaccgggttgaagttgcatacgacaagcaccatcttgcccgcagcgtcgcggcgcaggaacgcgatgacgctctgcttgctgtcgtcgggcacgatccactggaagccctcccagctgtaatcgacctgccacagggcgggcgtgtcacggtagaagtggttcagatccctgacgtagctttgcagctcacggtgcttatcgtagccgagcagcatccagtcgagcggcttcttctcgtcccactcgataaactggccgaagtcctggcccataaagagcagctttttgccgggatgggccatcatgtagccaaagaaggtgcgcaggttcgagaatttttcctcataatcgccgggcatcttgttcagcaggctgcacttgccgtggacgacctcgtcgtggctgatgggcagcacgaagttctcactgaacgcatagaagaagctgaacgtgaccttgccgtggttgccggcgcggaagagcgggtcggttttcatgtagctgagcatgtcgttcatccagcccatgttccacttgaaattgaagcccaagcccccgtcggacgcgggctttgtgaccagcggccaggcggtggattcctcggcgatcatcattttatgcggatagcggcccagaatagccgtgttcagcttctgcaggaaggcgatggcctcgagattttccttgccgccgttgacgttctgctcccactcgccgtccttgcggttgtagtcgagatagagcatactggcgacagcatcgacgcgcagaccgtccacatgatagcggtccacccagaacatggcgctggagatcaggaagctctcgacctccttcatgccgtagttaaagaccatcgtgccccattccttgtgctcaccgcggcgggggttggggtcctcatagcagggggcgccgtcgaacatgtacaggccgtagccatccttcgggaagtgggccgggacccagtccagaatgacgccgatgcccgcctgatgcagcttgtcgacgaaggccatgaagtccttcggcgtgccgtagcggcttgtcggggcaaaatagcccgtgacctgatagccccagctgccgtcgaagggatactcggtgatgggcagcagctccacatgggtgtagcccatttcctttatgtacgggatcaactcgtcggccagctcggcatagttgtagggcacgccgttttcggggtccttcatcttccagctgccggcctgcagctcgtaaatggacatcgggctgttgatgacatcccgcttttcctcgtcactgacccaggcggcatccccccaggtgtagccctcaatatcatagaccttgctgccgttggacgggcgggtctcggtatggaaggcatacgggtcagccttatagaccagctcatccgccggggtggtgatgcagtatttgtagacatcaaattgtttgatgccgggaacgaagcgctcccagataccgtccgtcaccttttccatggggtgctcgccgggcgtccagctgttgaagtcacccacaatggaaacagccttggcgtgcggtgcccagacacggaacaccgcgccggcctcgccgttttcctcgcacagatgcgcaccgaagtagcgataggcctcctgattgttgccctgcttgaacagataaatgggcagatcggagcttttgggcgtttctttgcgctgtttcaacgtaatctccccttttgagcggtgctgtagtggatacagtacaccgactctatataatctctgtctctatattacctgtttcttacgggaaatgcaaggtcttttgtgtaatattctgctaaaattttcgtatgttgcctattcgttttgtacaagttcgacataaatcgggcgttttttcggacaaacgtacaaaaaaagtcccctgcaaggttctttttacactttgcaggggatttgtgcaatccggaaattattttcaggtcccgtagatgtagtacgggttctcgccgctgtagacgctgcggcggttccagaccgtgtgggtggccagatattcggcccaggcatggtagcccgcggcattgaagtggacgccgtccttcgtggcgtagtcgtcgatctggctgccgtcggcggggttggtcagggcctcgcggatgttgatatagtagcagcccttgcgcagcgccatgttggccagcaggtcgttgaccgtggcaatgcgggtgttgtccagaccgggcttggaggcgaccacatcctcctgtacgcctgggatggactggatataaatcgtcacgccggggttcagctgctcacgcagcatatcaatgaggcgctcgtagtaagcgataaagctgtcctcactgccctgcacgacgaggttgttcgtgccgacaaggatataaagataatccggctggctgacggcaatggtctccatcggggtctcgttcgcaccggtgacggcgttcttgacgctgacattgttgacaaaggtctgcacgcccgcgctgacgtaggtggcgtagtgggcattgtggtagcctgtatcgtagatgccaaggcccgacgcgatgctgtcgcccgcgaaggtgacggtgttgaaatagtcgttcgtcacggtgcccagcatcgggacggccaccatgcggtgatcggtgttgcggtactcggtgtcgatcgtggccgcgacggcctcggacttgtcccacgcggcggtatcgacgcccggcaggatgcgctgcggctcggcaatgtctgccggggctgccgagggggcctcggtgggcgcagcggcggatgcggcctgctccggcgtagcggattccgctggggaagtctgagccggggcactctgccgcgtgaaccagaagtagcccacgccgatgcagagcgccgccaaaacaacgatgaggatcaggaacagtctgcgcttgcggcgcctgcctgcgacctcattgcggtaggtataaaaatcagccataaaagctcctattctttacgcaatcaagcatgtatagctattatacgccggaaccgcaccgggtacaagtggccacagcaaattttacagaccgaaaaagggacgtttgcaaaaattagcttgacgcttttctcctgtacccctataataagagtaagaatagacgtgaccaatcatcacagaacggaggtcctgccccatggcatggatgatcgtatccgacagctcctgcgagatccgcgagctggaaaacccggcaccgggcgtgcagtttgcccttgtaccgtttaaaatccgcgttggtgaacgcgagtatgttgaccttgccacgctgaacacccagcagatgctgcaggccatgaccgactacaacggtgccagcaccaccgcctgccccagccccgaggaatgggccgaatattttttgcaggcggacaacgtgtttgccttcaccatcagcagcaacctgtccggcagctacaatgccgccatggccgcgcgcgagatggtgctggaggagcaccccgaaaagaaaatttttgtgctggacacgctgagctgctccggtgcgctggccggtgccgccgagctggccaacaagctgatcggcgaggatcagacatttgacgacatctgctttgcgctgaaaaagtttgccgatagcacccacatcctgtttgcactggcgagctttgacaatctggccaagaacggccgtgtcaacagggtagtcggttttatcgcaggccgcctgaacatgcgcgttctgggccgccgcacgccggacggcaagattgacttttacttcaagacccgcggcgagacccgcgtgctggcaaagattctggagcagatggacgaggacaaatacgatggtgtccatccggtgctcatcagcgagtgcgggaaccagactgccgcccagctgctgcaccacggcattgaggccaagtggcccggcgctccggtgaagatcgtgccctgctccggcctgtgcagcttctacgcgcaggatcagggcatcattatcacgtactgaggcaaaaatataccgccgtgcatggattttcacggcggtttttggtttgttggcttcccccttgggggaagctgtcagcggccctgaccgctgactgacgaggggcaggtgtacggccatcatccgttggcgggatataacatagacccgccccctcatccggcctcgggcggggcctcggccaccttcccccgcccgcgggggaaggcattcttattccggcagccgctccttcacgaaatccaggaaggcctgggcggcgggggcgaggttctcgccgcaggcgagaccgatctccatcatctggtggggattcatcgggcgctccacgacgccgggatagccgtcctggtggttgatggcattgtttacgctgatgcccaagcccgccgataccatggcataggtcgccgtgatgtccatcgtggaatagcgtgcgtcggggcgggccttcagcttgtcaaaaatcagggtgatgtcggtctccatgcccgggtagctgtcgatgaacggctcggtcttcaggctttccaccgggaaggactcacggtccgccagcgggtggtttttgggcagcaggaccatcagctcgtcctggcggatgggcagccagaccggcagcgagtcacggtggctgatgaggcagaaatccgtgcggtggtccagcagcatctcggccagctcgctgctggtgccgttgacgatcttgatgaccacgccggggtgccgtgtgcggaacgccgccatcatccgggtgacccactcatagtagcagttatacgccgtaccgatgacaatggtgccgcagtctgcgccgcgcaccttggctgcggtctgttccagccgctcctgcgcaaacagcaactcacgcaccgacggcagcagctggcggcattccgcggtgggctgcacgccgcttttggcgcggtgcagcagcgcaaagcccagctccttttccagcgttgccacgctgcggctgatgccggagaccgtaaaccccatctcctccgccgccgcacgtaggctgccgcggtcaattgcctttaataagatctgccagcgttctgtatccatcttgtacctcttgttgctatatttgcaattttgtaaaaatcgtgttacgttttcatcaatcataagacagaacgccggatttgtcaagagcgggaggacggaaaataaaaaaagcctcccccggttacgagggaggtgccccgcagagacggagcttggggttcatcactcttttatattccgctcctgcttgcgcttcatgcgctcaagcagagctgctttctgcttatcccatttggcatcgtactccggggtagccgggtcgatgcagcgggcaaagctccaatgcaggccgtcgcggcggctcagcttaaatcgcagataccagtgcccgcagtaggggcagactgctctggtaaagtagcccgtgttgccgcgcttgagccagacctcgtcgttttgcagcggcgcgccgcactcagggcagccggcctgatacagctcgggcacgctgcggtagtcgtcgtgttccatgcggttcatgaacagctgcacgtcgcggcccgtgttctcggcaccgagcagcgcctcggtcagcagctcctcctccgtcggataggtcgcgaggccctcggccagcggcagcttgcggcagaccctggccgtatagagcgcgtcgtccagtgcgttgtggaacggttcttccttggggatgcccaggcggtccacaacgctttccagggtcaggccctctccctccttgcgggggtaagcctgcaggaagatgcgctgcaggtcgtaccagcggttcggccagttttcatccagcccgacgaggaacaggttttgctttaaaaccggcacgtcgtccaggccccactcggccagctcggcatcgtcgcccgcccagtcaagaaatttctgcaggccctccttcatcggcaggcccgcgtccagatcgccctgggacagacccgtgaccttggcgatatgatgctgcaatttgcggaaaatgtgcggcttgaggttgacctcaaacgtatccagcacgtcgccgcggtcattgatgcgggccgcgccgatctgaatgatttcaccgcgcagcgtcagctccgtgccgtgatagaggaaggttttcggctggtagccgatgttccattccaaatcgaaaacgatcagattcacaggtcaggtctcctcattcaaaataaacttttccactgccaggcccacgccgtcgtggtcgttatcggcggtcaggtatttggctgcggccttgaccggcggctgggcgttgcccatggccacgcccataccggccaggcgtatcatcggcaggtcgttccagccgtcaccgcaggccatcaggttggcgggggtcaggcccttggcgcgcagcagaatttccagcgaggtatccttgccgacgccgaggggcattgtttcaataaagaaaggtgcgctgcggcagatggacagcttgcccgcaaactcctgctgcatcagctcctcaacgtgcggcatgtcggcggggtcgccggtcagcagcagcttgttgatggggtaggtcacctcggcgggcaggttttccaccttgcgcacggggatcttgttgatgcgggcttcctccagcacgtagggggcgtcgggaacctcggtcacgatgccgtttttgtcgtaggtcagcggcacgacgttccaatagcggctgaacgtgcagaccggctcgatcaagtctgccgggaaggcatgctgcaccagcgtctgtccggtccggcagtcgatgatcttgccgccgttgtaactcaaaatacagccgccgtacttttcgagctcgagctccctggccagcggctcaatgccgacggtgggccgcccgctggccagcacgatgcagacgccgcggcgggccgcctcctgcaatgccgcctttgtgcgcggcgtgatgactttttcggtgttggtcagggtgccgtcaaggtccagcgccaaaactttatattgcatggttattcccccggaatgcagatttgtgtatattgtactcta

SEQ ID NO: 175 - DNA, 23935 bp, unidentified
  source 1..23935: mol_type = unassigned DNA
ttaaattttaaaatcttcttccttcagaataatgcgatctgacgaatccgtagattttccaaatacacgtcttgcaagatgctttacatttgctttctgtgaatgtttaattgcttcatccatgatttcttttacttccgcaactgtaaccgcatgatcttcacgctgcattacatcaattcggctgtaaagtgccagaattcccatttcatcaagcttatatccattttccttcgcataagtctgaccaaatgttactaactcatcattgatgaataccggaagttcaagcttagaagtgaatttctttttgaaatccggattagctgtcataattctctccagaggttttctctgatcttcaagaacaaagagaagctctccggtctttcttgacatcaatgcattcagttccttgattgttctggaattcaacttaccagccttttcgatgatgatcgctccaccgcgaagcttctggataatattgccaagttctttcttattcagtgactcacctgtaacaatagcaactttaccctgtttcagatttctttgtttctggattgcctttacaatatctactgcaagtactgtttttccagatcctttacggccaataatcattaagttaccggttcttgaagttccctctctctgggcacgtctgtcattatcaagtactgcaacaatctgttcactcattcctctgaccggtacgaagtaagagaataatttcttctgctcctctgtcagtccggctttcagtccaatctcactggttgcacttaagtcatatcttcctgttacaacaaatccggtatcaaatggaactccgcttccttttgacttcttaattctgcgctgaatctcttcctcagatggttcttcaatttccaagtctccttcaaggtcttccggatccggaatctcaggaagctcatcttcaaagtcgtcttcctcgaaatcatcttcctcaaaatcatcctcttcctcgaagtcgtcctcttcctcgaagtcgtcctcttcctcgaaatcgtcttcctcgaagtcgtcctcttcctcaaagtcatcctcttcgtaatcgtcgtcttctacataatcatcttcatagaagtcatcgtcttcctcaaagtcgtcttcttcctcaaagtcatcctcttcctcgaagtcgtcctcttcctcgaagccatcctcttcctcgaaatcgtcctcttcctcaaagtcgtcctcttcctcgaaatcatcctcttcctcgaagtcgtcctcttcctcgaagccatcctcttcctcgaaatcgtcctcttcctcgaagtcgtcctcttcctcgaagtcgtcctcttcctcgaaatcatcctcttcctcgaaatcgtcttcgtcctcggattcatcttccgggaattcattccactctgcatcgaattcctctacttcttcctcatcttcctccgggaattcatctgcaaaaccatcttcgtcaaaatcgtcttcgtcgaatccatcttcctcttcaaaatcatcttcttcggattcctcgtcttcgaaatcatcctcgtcttcggaattgtcttccgaatcatcctggttttctgtttccggaatttcttcatcttcttgtacttcttcgatttcttctacagcgtcgacttcatcttctgcttcaaactcttcgtcctcaccctcaaagtcttcgtcttcaaactcttcctcttcgaaatcatcttcatcctcagaatcctcgtcctccgtctcctcttcttccgaaactgcttcaacaatctcttcttcaggttcttcttcagactcttcaggttcttccacaatatcgtccagttcttcttctgaaataaactgatctacaatttcttcttcaacagattccccttctgcttttgcaagctccagttcctcttctatatcaaaattttcctcttctttctcctgtgctgtcacacgatcttccagctcttccacaagctgtctgatatcatcagaaagcaatgcctttcttcttgcttcctctgcctcaagacgagccttctcttccgcttcacgacgagccttctcctccgcttcacgacgagccttctcctctgcttcaagacgagctttctcttccgcttcacggcgtgctttctcttctgcttcctgacgggctttttcttctgctttccgtcttgctatttcttctacctcgcgtctctctgcctcaagtctttctgcctcacggcgggcttccagtgcttctctctcttttctaagtcgttcttcatcggatgctttttgctttgcaatcgcctcagcatttaccttctgcttggcttcccattccatcaagatgtcttcaatcttcatctgaccttcaatgcggagttcttcttctcgttcctccatcttcttctggtcttccggattaattccactcgccatagccacgccattagccagtgcttcttgaagtgtcgcacccttcacaactgtcgtaatagacttttttggtccttctgccgcatgttgaagaattccttctaactctctgacattccgagcttcttccggagtttcctttccgattggttcaatgactggtgcttctgtttctacaacttctggttcttctgaaacagcttcttccggctcttctgaaactggctcttctgaaactggttcttctaaaaccgattcttctatcggaacctctttgtctgccttggcattttcttccattgccttcaatgcttctccaagctctgctgtcggaattcttctcgttgcatccagaccatccacagtttctgttgtattggctcctgattcctgctgttctgcctccgcagcttctgatgcttcctgcgctgctttaatctgttcttttggaattgatacagtatcctgtggaatactctttacatccttaagcgcaactcgctcaggttttttatccactgctttcttaggctcttttttcggtacgcctttatactcatcgtacttttcctgttggagtggtgtcagtggtttgtacttcatcttcaattccattgcctgatatacatattttccttcgctgaaccacaagatcaaatcgtcacattcttccaggcactttgaggtcatgcctgcttcatgatatagctttgcgagctcatacgcccatttttcaatatattctgcctttttaaattcttccagtgccgaaatctgttctgacagatcagacccttgtgccttcaaaatccgatatttcaaaatgaattgattcggatctctcggtgccagttttacaaattcctcataacagtccgaagcctcattcagatcattcagtttcagggcaagtactgccagacgatacacaacctttctgctggacggtgctctgtcaaatgcgatcataagcgtatcacggctcttctgaaactccccgttattctcgtagatttcgcttactgtatttaacattgccgggctcttcacccttctccagtctattgtatcggcaatttccattgcttttctaaattgtttcttttcgtaatgttcgagcatctgctcggtttttacccgatattcatatttatccaatattctcacctcaaattttttgacaattctacagatacaagtttatcatacactagtcttattgtcaaaaacatacgagattttgttacaaaaatgttacaaaatgatatcgtccacttttttgaaatctttcaggctatacgcttctataatatttccctggataacataaagcgtatcttctatataaatacctcttgtgatcctcatattatttccattaatttcctcatgcatcgtacatgtaaatccttgtttttcgtcataagaaaatgtatagtactcccggccgccttcgctgtctgcagcaaaaccaatcagatttttctctgcatctactaaagctgccttataatcataagaaacatctgtatagtacacattttcaatgacataggtctgctcctctttcacatttttcggatcagaaatatcgaacatcgtcaatttcacgccatctgttgacatagttttttcatcaacattcatcccaatacccagaagcttatttttcccatacggatgcagataatctgaaaatccaggtatcttcaacgctcctatgatttttggatttttcggattcgacagatcaacggaaaataacggatccgtctctttaaatgttacaaagtatcctgcctttcccataaatcttgcggaatacaccctctcatcttctgccaagcctttgatggagccggtttctttcagttcttgattcaaaacataaacactgttcgtgtcgccatcggtcactacaactctcagatatccatcatattcatcaatagaaaatgaatcattaatatagccgtctattttgcactgtgccccagccgtcaatttcccactttcataagaaacttttcggattgtcgtcacatcttttccggaatattgccacacattttcataaaaataaatattatcgttgctcacatataaattgccaccgtctgccaaaagtgccttactgtgcgctgtctcatttggattttccagagaaactgatgtgatgattgaatacatatctgcctttgaaatggacggaagacagatatctgtttctttgatcagattatcgtttacaagtggtatataggacttcggattcttcgccgttatcccaccaagtgttacataataatcactgaataagtataagtatccatctgcaattcttgaagaattgtaatatccactctgactgaccctgccaacttcttttggattttcccggtctgaaatgtcataagttactgcggtcgtattagccctctgaccatatccataatcatcatcattccatttgccgcccacataaccgtcacacactacgattaattgatttctttcaatatccagatacatttcctggatttcagaaacatcttccactgttatagtcgccgtttgcttcatccgattatcgcgggtatctataatggcaatctgatcgctcttatcttttaacacgtaaaggtatattccatctgttttagctgtatccccctcatccacaccttcctgacgtacatttgtctcagaataagaaccgcttgccattccggtgtccgctgctgcagtactgctttcttcaatattctgtgctacatctccacttgccttactgtcagctgattcatcgactcttatatcattcaataatcttgccccgtttgaagtgtatgcactgtctctttcctgatctttcttatatttttccaaatatgcatagacatccttatattccgccgcactttctactttcgtactgtcactgattgtcacatcactgcctgctatcttatcatctcgagtcgcgtcttccattttaaaataattctggtataccatcactcccacgatcagcaccaggcatgcggctgccagcccaccgattctcgccggagtccacacttttttcttctttcctgcaagctttgcttcaatctgtctcggttcaagcgctttcggcaccggaacctgttctgacttttccttaattttccgaatcatgtcctgctcattcttattcataaaatgtcctcccatccaacacacactgcatcttctccagcgcccggcttcgttttacccggacagttcccggcttcaggcttagaatcttcccgatttctgtgctgttataaccgccaaacactgacagcccgactatcatttgctcttcttctgaaagaataaaaaatgcatttctcacatccatcgcaagtcctacatcttcttcatgaattccttccacctgtccttccgggaaaaaatcttctgtctgctgtattccttctttcgccacctgtttcaatcttttcttacatatatttgacaaaattgtaaaaatccagctcttgaaagcttcttcttttcgaagtttatgtatatgttcataagcagataacactgccgcactcaccgcgtcttctgcctcatgcggatcacgcatcagacaaagcgcgtagcgatagaggtcttgatagacctgctcatatagctttgaaaatgcttttgcatcacatttcattctttttcctcctcaatttgtttttctcaagaagttctccacactcctccattgacttatccaactgccgttcccaatacccagtgtaaaaagtattattacttcttctacatataagagtcccaaaatatcccaagtgttacaaaaaggcgtcactttttttcataagtgccgccttttatttacattcgtttattcaattatattaccgccgaaaatactgcgcaagataaaattcagcgtaattcccagtgcaacggaacatagaacgtgaattttacctatcggattatttagcccttataataattaatcagacaacctttgagaataatctctctttctgcgtctgtcatatctccaagtgtaaatgtgacttctttcaatgtatctccgactacataagctttgatctctgcatctttgttttccactgcttttctgatttccggtacaaagatataatcgccatttttgaagcttaatttcttgtcgtcttcttttgtgataaatggaagcattccccagttgatcagattggagcgatatctttttgtcgcatattcatttgcaatattcgcccagccaccgagcaccttctgacaggaagctgcctgctctcttgctgaaccgtcacctggttttactgcaaagatcgtacttccgactccgatatttccttttcctgcttccggatatttctcctggatctttgccataaccggttttaattcttccaatacctctaacggacattcgcctgcttcgattgctttctgtgctttctgtacttcctttgcacgtcccacatatgcaggatcttttctggaaagtgcaaactctgccagtccaagtggattggatctgtaagaagatgtttctccagatgggatcagctcatctgttgttgtaaccggatcgtgaatctctgatacaactttcaataccagattctccggaagtgctgacattgccggccagtctttgatattcggtccgaacttgatctttgtatccggatcagccacaccatgactgtcaaatacacgatttgcataaatcttctggtcaaagtggtatttctgtcccttgtattctacgtccatatctgttgcaggtgtcaggaaacctttatttgctgctgttgctgcaattgaacgggcatccataagtgcaacggatgcaatctgtccactctgaagcttggaaccttcacggttcgggaagtttcttgtagagtggcgaatagaaaatgcgttatttgccggtgtatctccagctccaaagcatggtccgcagaatgctgtttttacaattgttcctgcttccataagatccgcaactgcaccgtttttcacaagttccatatagattggtgtacttgccggatatacactaaatgtaaattcatctgagccaatgtaatgaccttttatgatgtctgctgctgcgcagatattttcaaatccaccaccggcacatcctgcgatgattccctgatccacataaagttttccatcaatcactttatcctgaagtgaataatccacagcaccatccaggctcaccagtgctttctgctctacatcgtgaagcacgtctttcagattcttacgtacatcgtcgattgtatatacatttgacggatggaacggcattgcgatcatcggacgtatctcgcttaagttcacatagaccataccatcataatatgtaactgcaccaggattcagttctttgtaatcttcacttctgccgtggatctcatagaactccttaatcttatcatctgttttccagatagaagacagacatgttgtctccgttgtcataacatcgattccgatacggaaatcagcacttaacttctccacacctggtccgacaaattccataactttattgtttacataaccatttgcaaatgttgcaccgataattgccagtgccacgtcctgtggtccgacgcctttgaccggctctccgtccagataaattccaatcacacctggcatcttaatatcatatgtcttattcaggagctgctttacaagttccggtccgccttcacccatagccatcgttccaagtgctccatagcgggtatggctgtcggatccaaggatcatcttgccgccgcctgccaacatctcacgggcaaactggtgaataactgcctgatgcggcggtacatagacacctccatatttcttcgcacaagtcagtccaaacatgtggtcatcttcattaatcgttccgccgaccgcacagagtgagttgtgacagttcgtcaatacatatggaattggaaacttctccagtccggaagctctcgctgtctgaataattccgacaaatgtaatgtcatgagatgtcagcttatcaaatttgatctgcagtctctccatattgcctgatatattatgagcctctaaaattccgtaagccattgtctgcgttctggcttcctccttggatacctcacggcctgtctttgcctttacttctgcttcgtccgtaatgatctcggtgccatttaccagatacacaccgccgtcatataatttcaacatgtctagtcctcctgattacctgtaattatattcttatgaataattacctttatttccagattgtatacatgtatatattagcacatcacatgacatatgtccaaccatttattcaccctttttcattcccttttcttcaataccttctgataaattacacatatcattcaactcctccctgattttttcatcgactggaatatctaactcttcataacgaaagctttacctttaattaattactgtctcaaacttaaaatgtcaaaacgccttacattttagctactaaaaacacaaaatattattttataaatattaaccaaataccctaaagaggaagattccacaaatccttcttatgaaatcttccccttttgttacttaaatctttttaaaagtcagaccttttcttacttttctttttcaactgctttcttaacagtttccacaggtactcctagtatctcagaaaccttttccaaatcaccgatatttttatacgcattacaaatgagttgttctgtcacttcttctgttacctgatctcttacttcctggaattcttctgccatcaattcttttaatgcttcacacatactcgatttcacctccttcattgccttccagtttgcgaaactcttgtaaatgccggagcgttttcacaggataatgattacaaataaaagtaatcgttaattcttccggtttaatttcacacacatgctctgtatccgactgataaaagcagcaataaccatatactttatagaaatcattgattgtcagataatcgtccgggcttttatattcaataatattgtgctttcggaatatccgtcctatgttcttttgaatcttttcttcaccacgaattttaatcaccaattcatcaatccgcattggctgtttcgataataaatgttccggttcaaatgtcattttttcaatttcattttcaaattcaatctgaatagatgcttcaaatgccgggtgccattctatgatttttcttttgtccatctaattctcctctcattataatttttttggtacctgttttcaatagaacttcctacgtttacaagttacatttttcatatcgggtaattgtttcagaattcgaaacgccgaaatgaacaccttacggcttgaatattcggagactagacttcctcctgaattggacatatcatagcatactcttctctagaagtaaagcattacatagaaaaaggttgaaacctagattccaaccctttttaataatatatttcttctattttacaccatcacttttcgttttcccaatagtgccatctcttccacattttttgtagcatacagtattgtaactccggttctctcctgcaattccaccagctcctgagtcaactgattatgaaatttgggacttacattgcgaagcggctcatccatgaggattacatctggttccaaaatcatggcacgcgccagcgcggtccgatgtttccacagatctgacaagttttttacttttgcaaatcggacttctacaagatccagaagttccagaacttccagtgtccgttttcctatttctttttcatctatgccgcgaagtcttaagcccagttctacattttccagaactgtcattcgtggatacacagtataattctgaaaaatcatagcaattccacgctcctccggtggaagactgttgaccagcttgtctccaatccatatctctccgtttttcacttcatcaagacctgcgatcatgcgcataacagcactttttccactcccggatgggccagtcaatattacaaattctccgtcttcaatctggaaatttaaatcctttactgcctcatatccattcggaaatgcgcgatctacatgttttaatgtcagacttgccatctgatcagcccctttctttgtcttcccctgactactgcaattcaggctttttatccatcattacttttttacaacaacgcctggtaaatgtctctctttccgactccccggtctttcgcgaccattttcattgcttcttttttctgaatcccctgatccatataataatccatatgttcctgaatggacatttcttcccatttctggcgttcttcttctatctgttcctgacggctcttaccctcaatgacaagcacgcattccccttttggttcctgctctttataatattccactgccgcactgatcgttgttgcaaagacggtctcatgctttttcgtaagctcccggcaaatgcggattcttctgtcacccaaggtcgcaagcagaagctctaatgtccggaccagtctgtgcggtgcttcgtagataatcatagttcttgtctcttccatcagttcgttcagcactgcctgtcgttcttttttatctgtcggaagaaatgcttcaaacgcgaatcttcttgtggacaatccggaaatggtcagcgctgtgatgcaagctgctgcccccggaactgctgtcacagtgattcctgcttcctgacacattgccaccagctcctcacccggatcggagattcccggtgttcccgcatccgtgatcagtgcaatatcttcaccattttccaagtgctcaatcaacgtatgcgcttttgcaatcttgttatattcatgataactggtcatcggtgtgtgaatatcaaaatgattcaaaagcttaatgctattgcgggtatcctctgctgcgatcagatcaacttcttttaaaatacggacacagcgaaatgtcatgtcctccaggttgccgatcggagttgcacacagatataatgttcctgacatataattctccttttatttcatcccgtacaatttcagtacttcttccgtatactccccgtctttcgtgtaaactatgagcggcgggtctacggcgaggcgtggttttccgcctttgaggccttcgataagaaccatgtttggctctttgtctgcatatgggtggacgagacgcatgcgtttcggctcgattccgtaattgcacatttttgtaaagatttccggcaggcggaaaggacggtgcaccatgtagaaacgtcctttcattttcagtacttttgcactttctcgcagaagatcatctaatgtgcataacgcttcatgtcttgcgatatacaaagcctcgttatcatttttcaggccgtgttctccaatcatatacggtggattggatacaatgacttcatacgaatcatttccaaatatgtgacttgcctctttgatatcaccggtaacgatatctatcttgttctccagcccgttgtgtgccacgcttcttcttgccatatcagcactttcttcctgaacttccagacctgtataatgaagtcccggattctttgcttccagtaaaatcggaagaattccggttccggtcccaagatccagtgcacgttccccacgttttacttttgcataggaagacagaagcacggcgtccatgccaaagcagaaccgaccgggcttctgtataatctcatagcccttcacctggagatcatccaggcgttcatcgggcttcttattagtcatcatttaacttggaggcgccatttttctcctccagagcttttaactgtgcaaactcctctttcgaaagctttgcatcttttttcttctttcttgatttgaatctcagctcacctgccggatattcacggatttctttttcatcgttatccagcgtcacaataacctttacaatctgacgcagtacgtgaacggcctgaacttcaccatgaagtccttccggcgtcgtcacatgatctccaactcccggaagctgacggttcagctcttcataggtctcttcttcgttagtcagacagcacatcagtctgccacaaactccggatatctttgtcggattcagagacaggttctgctctttcgccatcttgatcgataccggtgcgaactcagacagatacgtgtgacagcaaagtggtcttccacagataccaatgcctccacgaatcttcgtctcatcacggacaccaatctgacgaagctcaatacgtgtacggaacacgcttgccagatcttttaccagctcacggaaatcaattcttccatctgcggtaaagtaaaataacactttattattatcaaatgtatactccgcatctataagcttcatttccagaccgtgtttacgaatcttctctaagcagatgttaaatgcttctttttctttttctctgtttttctcttcttttttgtaatcctcttcgtttgcaattcgaatcacagattttaaaggctgtgtgatcttgtcgtcttctacttctttcggacctgtcacaacctttccgaactcaacaccgcgagccgtctctacgatgacacggtcttgaggtttaatctctaatttccccggtgagaaaaagtagatctttcccgcctgacggaatcttactccgattacttttgtcataaatctagttctcctttatcgtcaggaacaaaagctccatgaccagatcaaagttaacatttgcttttaatctggcttttgctttgtcaaggctgtccagaatcgtctcaattccttcataagaactgcgtcttgcctgctcacgcatgcagtcgatctgatctttgaatacaaccttatctatttcccttgtcgctttatataacaagacatctctgtaccataccatgatcaggtcaagatagtcgttaatttcaactttataaagagtgcagcgtttcactgcctccacaagctcactgatatccatctcatttatatggcgcatcaggttcaggacttcgtccttgagctcattaaaatgctcggaacctgccagtttgatagcttttccaaggttcccctgtgcaaatgcagcgcagacttcagccttgtaatctggtacttccattctctccatgagatattttttaatcagtgcatctttgatgtagcgaagttttaacatgacacatctggaattaattgtcggaagcaatacatctgcattttccgtcagcagaataaatactgcatactgtggcggttcttcaatcgtctttaataacgcattctgtgcctgtaccgtcataatatcagcttccggaataatataaactttatacgggccctgatatggcttgattgcaactgtattattgatctgtgtgcgcacatcatcgactccgatggatcccggcttctcatgtgtcacccagataatatccggatggttattcgattctgcctgtacacaggaatgacatttattacatggttccggtccatgttcttcacataaaagtgccatggcaaataactttgccagcatcttctttccggttccgcgctcgccattcacaatgtacgcctgtgatacccgattctcggcaactgcattctgcaaatattgaattacatctctgtgtcctactacatctttaaaacttcccatatcgtatgtcctctataatttcatctaagcatcttttttggtcatcattgtaataacgcttctttattcccgcagctctcagatgctcctcggaaaaatcttccgtatctgcgagaaatcttctgcacatctccgcgtaacgtggcacttcctgctgccgctctctcgtaagtgcacggttcagccgctcgccgtcctctacttcgatgtacaccggaacaagatacgccgctccgtaatatttctttaactttccataggactccagcgttccgatcatcagatagtcggattctgccagattgacctgtccatcttctattgtagcatatttccatgctccgtgaacagtattataagtacgaagttcaacaacctttccctgtctctcgaaaatatgcatctgttcatctgtcacaaaatggtattcgacgccttctctttcaccttcccgcttcggtctggtcgtgtaaagcgtcactgtctgaagcatcggcagctcttgcttgatcttccggaataatgtatcttttccagatgaactcttgcccattatataatatatcttacccatgcgtccatacctctatgtatccttctttttctactccctgtatctcatatgttcttcccatataccattgaaaatgttcccggatctgcgctgtgatccgttcccccggcaccagcatcgggatccccggtggatagagatacgcatactccgcggaaatgtagccttcgctctgtgtcaatggcacaacctgaaacccatctgcccctgcgtctttcatgctgatgacctgcgccggtgaatagattacttccgcctgtggcagatgtcccggttctatatcgtaatttttttctttcttttgcgactttttgatttcttccggcactatgtctgaatctacagtgttataagccccctgtaaaggtttatatttcttatccaactcataaattgcttttataagccgtttcattccttcatcggtatccccgaccgaagtcatggcaatcacataagtccccgcggccatctccatttgcaggtggtactgatttaataaatcttcctgcaattgaatacctgttgcttctgcaccatatgtatccgcaagtcctttcgtaagtcctgctactgataatacaagctttgacttatcataatgtttggtctctgccagccggatatgttcacattttccaagttcttctctacatctcttcaaacgctccacatacgggtcaaaaacttcctcgcagtgatgatccagcatctccatgcactgatcgattcccgccatcagaatataagacggactgctactctgtaacatatgcagatatcgtctcaccttttcccggttcaccagatttccattcatgtggagaagtgctgtctgggtaaatgccggaagtgtcttgtgaacactgtggatcacaatgtctgcgcctttttgatttgcattttccggaaaatagggatgaaaaccaaaatgagccccgtgtgcttcatccacgatcagcggcagtcctttttcatgtgcggcctttgctatctcggccacatccgacacaattccatcgtaagtcggagatacaatcatgactgctcggatctgtggataccgattaagggccctcctcacatcctctgcggatatctcaatattcaactgtaactctgaatcaaaccggggatagagatacaccggattcaactcattcatgtagattgcatgatagaccgatttgtgacaattgcgcgccacaagaatctgatctcctttattcgtcacacccgcgatagcactcagaattccaactgtacttccatttaccagaaaatgtgtctcatctgcatgatagattctggctgcccgttcctgagcctctttcaggattccttctgcatggtgaagatcatcaaatccttcaatctctgtaatatctacagtataaggatccgcatcccaggacatatgcatcttacgcttatgtcccggcatgtgaaatccataatagtcagaatcgctatacgcttttaatttttcgtatatcgttgccattcttataatctcttaagaagttcttctctttctttttcgtatcccggttttccaagaagtgcgaacatgttcttcttgtagctctcaacacccggctgattaaatggatttactccaagaatatatccgctgacaccgcatgcgaactcgtacatatagaataactgtccaagtgacttctcgtcctgcgccggaattgtcactttcagattcggaacctgtccgtctgtatgtgcaagaatcgtaccattcatagcactcttatttacaaaatccattgtcttgcctgcaaggtagttcagtccgtccagatccaccggctcctcaccgattgtgatctgctctgtcggctcctccacttccataactgtctcgaacatgattctgcttccatcctgaatgaactgtcccatagagtgaagatctgttgtaaggtctacagatgcagggaagattcctttcttatccttgccttcactctctccgaagagctgtttccaccactcagatacataatgcaggcttggctcataatttgccatgatctcaactgcttttcccttacggagcagaatgttacgtgttgctgcatagagcattgcatcattttcctcaaatggattctcaagtgcgaattttcttccttctgctgcaccttccatcagcttgtcaatatcagctccgctgactgcgatcggaagaagtccaacagctgtcagtacagagaaacgtcctccaacatcgtccggtactacgaactcttcgtatccttcctcatcagcaagtcctttcagagctccacgagctttgtctgttgttgcatagattctcttagcagcctcagctttgccatacttcttctccagcatctccttgaaaatacggaatgcgattgcaggctctgttgttgttcctgatttggaaatgatattaactgagaaatctctgtctccaatcacttcaatcaggtgtttcagatatgtactgctgatgctgttaccggcaaaataaatctccggagctttgcggatctcttttgatactacattataaaagctgtgtccaagaaattcgattgctgctcttgcgccaagataagatcctccgataccgattactaccagcacctctgaatctgactggatctttgcagcggctttcttgattctctcgaactcctctttatcataatcaaccggaagatcgatccagccaaggaaatcatttcctgctccctcccttcccaggagttcagcttttgcagcctcggtaatcttcttcatagattccatctcatgtgcgctgataaacgcatctgcctttgaataatcaaatgttactttacttcccattggactcgtcctccttatgctaccctttacgttctagttcttgtctcgaagaaatctgtataattttcttcttataaatgtgacagctcacagacagtccttgtttcacaaaactaactttgagccgttatctatattttaacaaatcagtctcttattatcaagccataaactcctccaggatttctcggatacgctgatttctgtttgcctcgtcctgcgcctttgtctcttccgattctattgttttttctattttttctgttttacctggtttttgcgatatagctgtctttttgactttccggtcatcttccacctgcagcggttctgtcttatacatcgcccaaagcagactgtccatagatccaggaaattcctgctttgattcctgcttcttctgattcacagattcacctggcaagttatcaccctctgcccttcctgcattttctggcattctggtattcttcacaattcctgtattttctggcattctggtattctcacccattctcgcttcttctggcattctggtattctcacccattctctcttcttctggcattctggtattcttcgtcattcctgcattttcttgtgttctggcactctccgctattctcgcttctgctgatcttgcctcttctgccagaacttctttcttgtatgttttttcatagcgatgctgataaatattttccaagtaatctaccatataatttcgtactgcctccagccggtactcctcatccgtcagcatatgtaccaagaatacgattaacgccatcgccacgccggttccgccaatcatagctgtctgctctgtcgcccctttgatccgataacttatgattgcgccgactccgccaagaatcagacaaagtccggcacccgccatctgtaaccgccgccatgcatggagcctgactccaccaacccggtattcatagagatacttgtccacaaatacgcctacgttttccaccttttcactgatcatacaggtgtgctcgaatttcgcccgcacaagccgcatcaacggatgattactcttccccatactttccgctgctgccaccagcttcctaagtgttcttccaacgaccacctttgacacaactccggcaaatgcactcattcccatcagtacatagatcacatgtctgtctaacattaattctaacatgataaaagccctccttttggcaccaattataatggattttccaaaagaagggcgaaaaaccgttccccataaagcgacatctgcacaccgcaaattatggtattttttcttatattttatcgaatcatttattctctggttttaaatcatcgggagcaattcctttacaagcgccacgctgtgggcaattgcctgtttttcaaactctggataatccatcgttgcactgttgtcagctttatcagaaattgctcgaatgatgacatacgaaactttgttaagataagcggcgtgcgcaattccggctccctccatctctgtacagagagcctgaaaattctccacgatacgtgctttcacttctccggaagaaatgaactgatctccacttgcgacccttcctgtaaatgtatggatctgcggatttgctttttcatttgccttcactgcaagctctaccagatgcggatctgccgggaatgtgcgtgtatccattcttggcacctgcccgattgcatctccaaatatggttgcgtccatatcatgatgcaccgcatctgtagaaatcaccatatcaccaatgtcaattcttgcatccagggatcctgcaatacctgtattaatcagcgtatctacgccaaatttatccaccaggatctgcgcgcagattgccgcattaactttaccgattccacttcttacaacaaccgcgtccttcccacaaagagttcctttataaaatgtcatggaagcaaactctgtcattttagcatctgccatctcacttttcagagctgcaacttcctcttccattgctccaataatacctatcatccgattttcctcctgctatgcatttttactgtgcgattcccgcacatatcctttatccaactgcctttttcactatcattacaaacatttcctgttatcctgtacattatcccctaccccatgcacaaatgtcaagcattgatgctgctctattgtacctgtttattcctcgtgtattcctctatgtactctttttcatacatatgatgtaaccggattgctccattgctatacagttcccgcaatcctcgaacacctcaagcttacatcatattattggaaatcttaatttttctttacaagtagattcttctctgttagaatggcttctgatattcatatatctggtataacacataggagggtatttatcatggattataaaacacatggtgtctgttccagcatgattcacgtagagctggacggcgataaaattaaagatgtagattttgtaggtggatgcaacggtaatcttcagggaatctcaagccttgtaaaaggaatgaaagtggaagacgccatcgaaagactttccggaatcaaatgcggttccaaagcaacttcctgcccggatcagcttgccaaagcactccgcgaagcaatcgctcagtaaattgattcaattacaaagtaagtcacatggaaaaggacacgcagcttttaatagcttgcgtgtcctaaaactaaacttacctaaacttacttctcttgattgttataatattttttcttttaaattttctttgaactgtctccagttccttcgcccttccaaagccctgcgaaccaacgtaagggccatgaaatatgtagattgctgtggaagagcgtctaattgtttcaatattcagttgttataaaatttctaaagtattatgatccaacctactaactttacccgaaatttgtttttaatttgtttttcccatcattataatggccttgcccactaatctgattgtaattataaatttgttaaattcttctttcttttctacaatatcttacttacggttcctcaatgtaaactccatttgtgaaactgctgcttacatcatcattagcggaatgaacacatcgaacacgatagtaataatcgccctctacatccatgtattctttcgaagaaactcggtctgtattttcaaggaatttattccatgcatcatataaagaccattccgtatcctcttcttttgcccgttcaatcattactcctattcctatacgtacaacgtcatgagatgctattgttgttcctccggcatagatttgtcccgggcccattcggacaattttggaatatccagtcagaagatcctcgcctctggcaactttttggttatagccaatggattctgcatcttttgtaagctgggatccgtcgatcaccttcacgctagatgccgcctgtgtatccgtcgatacaccaaagcttaatcctaatgccatagcgcatacgcagcatatggatctacatcgcttcatttatctacctcccatctctctctatttagggttccctatataatagacacatgagtagcaaaaaactgacgcatttttttacataaaatataatttttccaaaattttttctaattcactttgattcatagttcccgataagtaataatgaagttttttaaattcaaactctgctacataccgattagtttcagtttctggagtcaaatactccgtaatttcaatttttattccttttatcttatcataactatattgctttacaatctcatcttcttcatcatagccccaagaagtttctccataagaagcactaatcataaatgtagttttttctccattatataaataatctagttctgcaagttgaatatctgtgtccattaacattttttcaaatttcatttcttccggatgccaaataattcttactggttcgattccaaactcttcccctattttctcataggccttctcttcatcttcttcctcgataatcttattcttatcgctggaatcgacttgagaaacttctctgccacctacagaactcttcataaactgcagcattctttctggtccgccaatgcttgtcattccaactgccattacgaggatcagcactgctgccagtgctacaattctacggatattgcgttttttccggcgcattgtatagattttcttctcctcgctctgattcttcaacatctcccgtccaaggcgaagtgcttcctggtcttcttctgagagtttcgcatacgcatctgttcgcttcatatcttcagaacgcatttcacgctcacggattttttgatccagtgcatttttcatgcggatcttcagctcatttggaatctcttcattatcgttaagtccgacttcttcttcaatctgtttcgcttctttattcaattgatctttcaggatttctttcaactgatctttcttttcactcataatctacctcttaacgaaatctatcctctctttctcttgaccaaatctcccgggaacgtataatataattatatgccaaagttgaaaagttttcactgtttcgtacagtatatacgaagcagaattatccgtacggcattcttattgtaacatatattatcgaaaggagctttttatgaaacgtattatcttaaccggcggcggtactgccggtcatgttacacctaacattgccctgttaccacgtcttaaagaattacaatacgacatccactatatcggctcatataacggaattgagaaggaacttatctctcaattcggtataccatatcatggcatctcaaccggtaaactcagacgttatttcagcgtccagaacttcacagatccattccgtgttatcaagggaatgggtgaagcacgtaaactgattaagattctggagcctgatgttatattttccaagggaggttttgtctctgtaccagtagtccttgccggtaagggacaacatgtaccagtcattatccacgaatctgatatgactccgggtcttgccaacaagatttccattccttctgcaacgaaggtctgctgcaacttcccagagacattatcttctctcccggcaggcaaggctgttctcaccggatctccgatccgtcaggaacttttaagcggagataagtaccgcgccagagaattccttcactttacttccgacaaaccggtcattctggttgtcggcggaagcctcggtgccgttgccgtgaacaatgccatccgtgcgattctcccggagcttctgaaagacttccaggtcattcacttatgtggccgtggcaagctcgatccttctttgaacggaacagaaggctacgcacagttcgaatatatcaaagaagagttgcgtgacctcttcgcactgaccgacattgtaatctccagagccggagccaatgctatctgtgagcttctcgccctgcacaaaccaaatcttctgattccgctgtctgccaatgcaagccgtggtgatcagattctcaacgcccgttctttcgagcgtcagggattcagtatggtgcttgaggaagaggaacttacgaacgaaacacttctcagtgcagttcatgatctctatgataaccgcgagaaatacatcgatgcaatgaagcattcttcccagcaggattctatcgataccatcattgatctgattgaatcggtaactgcttagatacttacaaaactatctgattctgacgcagatatctgatagaagaaaacaggtgtcatatccggcacctgttttttatttgccatccagttggtgaaactgttcttcgtagtacttcttaatccattgctttgccctgtataatgtactatacagcgtatccacagatatccccattttctctgcaacttctttttgtggtttatccaaagtatatgaaacggtaactgcctcataccatcttgaatttttctcatatagatctgcaaagatcgtatcgtgtagctcgcggcattctttctggcgaagcacttctatgagttgagcatccagtccttctgacgaatatggcacctcctgctccggaatctcttccatcggtgtctcccatttactgtctcttagatagttctttgccatattctttgcggtagtgatcagccatgcaggcacggactccatacatatatctcccaggttgtcgtataatttcaggaaaacttcctgcacaatctcttctgccacatagtgatcttcgacgtagtacaatgccgttcggtacactttacttacattttctttgtaaagcctgtcgatttcagctttctttacatcttcagattccaccat

SEQ ID NO: 176 - DNA, 18532 bp, unidentified
  source 1..18532: mol_type = unassigned DNA
cctaacgaggcgtctgccgccgccctgccgatgtttactaaaaacattttatttttactaattaattatatttagtaacaattttggttatacacctataattattaaatattatttatgtaattaaacatctaatataaacaaattaataattataaaaataataataaagtttttttagcaaacatcggcagggcggcgacagacgcctcgttaggtgcgcagtcatggatagtaaaattattaggtaaaattataaacgataagaaaaaatatataagagtgatttctagcgaacattagcagctctgttttaaatgaatagtaataaaaaaaataatataattaaaaaggaaaactataaaaaataagataattttcagcaaacatcggcagggcggcagcagacgcctcgttaggtgcgcagtcatggataacagaattattaggtaaaatcataaacgataagaaaaaatatataagagtgatttcgatttctagcgaaaattatcagctccgttttaaatggatagtagtaaaaaaaaaaatgatataattaaaactgagaactataaaaaataagataattttcagcaaacatcggtagggcggcggcagacgcctcgttaggtgcgcagtcatggataacagaattatttaggtaaaatcataatcaataaataataaatatatgagactgttttctagtgaaaattactagctccattttaaatggataggagtaaaaagaaaaaatgatataattaaaattgagaactataaaaaaataagataattttcagcaaacatcggcagggcggcggcagacgcctcgttaggtgcgcagtcatggataacagaattaatttagataaagttataaaaatatgttaatataaaggttatatacaataaaagaaattttatttaatgtaaggtagctgtttaattattaaacatattaataattatattttattattttcaaaaaacaattagaaaaaaataaatttataatttttaataatttagactaatatattaaaacattattataataaattttatattatatttttatataatactaagcccgtaagaataaattgattcttacgggcttaaaatagattttaaatcaaaaattaacctagcagcctattatacatatcctgatatttctttgccgattcgttccatgaaaaatcttgtctcatagcatttttaattaaatcggtccaggcttttttatcactgaaaattttaatggcatatcttaatgtatacatcatatcatgagcagtatacggatagaaactaaatccgtttccctctccggtgaattcattatacggcataattgaatccttcaatcccccggtttcacgaactacaggaattgttccatatgcaagtgaaatcatttgactgagaccgcaaggctcaaacattgacggcattaggaatatatcgcatgaagcatatactttgtgtgccagctcattgctgaacattatattagcagacattttttgtgaattgcaccacgcattatgtctaaacagattttcatactttgcttctccggttcccacaacaaccaactgaatatccatattcattagctcgcccattgcctctgctattatatcaaaacctttttggtcaacaagccttgatatgataccaatcattactttttcgccgtctacggtcaatccaagctgttgctgcagcttcatcttgttttctctttttttatttacaacgtttcttgcatcataattctcaaatatatatttgtccgttttaggattataaacattgtaatctataccgtttaaaataccatacaaagactgtgatcttgcagataataatccgtcaagcttttcgccgcccatcggggtttgtatttctgacgcatatgtcggacttacagtagtgatatagtcggaataaactataccgccttttagtaaattcgcacagccatgaaactccaatttatcagctgtaaaaaagtcacggttaagtgagaagaaatccgaaacgatgtcaatagagtaaattccctgatagcgcaggttatgaatagtaaatacagtttttattccctgataaaacgtgtctttattataatatgcgttaagcagaacaggcaccataccggtctgccagtcatggcagtgtatgatatcaggcttccagtcaagatgttttaatatttccagcgctgctttgtcaaaaaatgcaaatctttcgaggtcgttccacttgtatagataagggtcgccgaaataatattcgttgtcgataaagtaatatataacgccgtctttttcaagctcaaatactccgcagtattttcttctccatccgagcggtatatatataaaaaacttaaactccatttgttccagatattcatgaggaatacagccgtatttgggcattacaaccctgatatcatctcccagctttccgagtgctgacggcagggaaccaacaacatctcctaagccgcctgtctttgcaaacggggaaacttctgatgaaaccataaatattttactcatttgaaaacacatcctttcactaagcttttcttcagtaacattaaccgtttataaaaaaagtgagttaataattacactataatttctttaccgattaccattggatatgtatcttgacccacaagtttcttaccgcttctcaggattacacccttgtcaaatatgacgttttccaggagacagttttccattatctcagagttctgcataagaatgcagttttcaacagtggcgccttttgcgacgtgaacaccgcggaacaaaatactgttcttaaccgttccttctatcttacatccatccgctataaatgagttcgttatttctgcggatttagaatatttagttggaacggtgtcttttatttttgtaaagataggattgtttgtgtttagaccaaacaattcatctcgtatatcctttttaagaaggtccagattaaaacagtaataggattgtatactgtcaatcttctttttatagccgctgaactcatatgtagaaacttttaaacctttggaaacagccgtaagcaatatgtctttggaaattgtatgtcttccgtgtgtgactgcatattctaccatatccataagcaattcgcgtctggttataaacatatgcatatatgaacagtctgtcttttgtttgcttggataaacgtgcatgtcagtaacaattttttcatcattgatatcgagcaaaatatgtttttttacatctttagcgctcaaatgtttagcttttgtataaaccagtgtaaaatcagcttcattttttaaatgttcttcaagaaccatgtcgaagtctatattacagattgtattacaatcagaaacaagaatatattcctggttacttttagctaaaaatgaagaaataccatgtaatatatccacaccgccgtgtgtttcaatacctgactcaccggtgtctttcggcggcagtatgtagagaccgtcgtcctttctgtccatatcccacgcttttccggtgcctaaatggtcggtaagcgactgataattaacaggagttgtaatccccacttttattattcccgaatttaccatatttgataatatgaaatctataattctgtatctccctccaaccggaacagcggcaagagctctaagacttgtgagttcgcccatactggcttccgggttttcagaaaatataacgcccagcatatcgtttttcatctatatcacctctactaaatttctatttctacttttcttcatgcacggattatacattttctgtaaccattgagcatacgccgatttcaatcttgtctcctatctctatgcctggtcctatcaatgtaatgtcatcgctgcatattttagtattataaaatgatttgtttgcgttatcggcagtgcttcctattgtggcttcttcacctattacggcgtctgaaccaataattgatttattcacaacagcgcccggtttaacagccgcgcccggaaggataatagagtctttaataacagccccgtctccgatagttacgccttcaaacaaaatggaatgttcaacccggccgtaaatttcacagccctccgtagtatagctattcttaagagaaccgttttcgcccacatattgagggggctttacaggatttctgctgaatattttccatgtatcatcatccaaatcacaacccggctggtcatctaaaagttccatattagcttcccataggctctgtatggttccaacgtctttccagtatccgtcaaatctgtgagccataagctttagtccgtcattaagcatagcaggaataatattttttccaaaatcgttttctgattcggggtcgttttcatcctctgttaaatatttcttaagaacatcccaagagaaacaataaactcccatagaagccaaattgcttttaggctcttttggtttttcctcaaattcaactatctgcatatcgtcgcttgtgttcatgataccaaatctgggagcttcatcccatggaacttcaataactgctatggttgcgtcagcatttgcctttttgtgcaccgacagcattttattataatccattttatagatatggtcacccgacaaaataataacatatttaggattaaactgttccataaaccctaaattttgatatattgcgtttgctgttcctttataccattcgcccttttctgcggatgtgtatggaggaagaacaaaaacacctccgttagtacggtccaaatcccaaggctgtccatttgcaatatatgtgttcagctcaaggggctgatactgcgtcagaactcccactgtgtcaatacccgaatgagaacagttactgagcggaaaatcaataattctatatttaccgccaaatggtactgcgggttttgctacattttgagtgagtattccgagccggcttccctgtccgccggcaagaatcatagcaacacattcttttaacctcattttatctcctcctattttacaattaacgttcgctttacttccaagaataaatatagatttatttttcagatttttctgtttctgcaagcgctttggttttattttctattgtttttatttcgctcgtctgttttttaactaagcctacaactttttctttcttaacctttttagttggaggcagcttttgtatataaagtgctgtaagcgccggcaaggttatatctattgaataatcaaactcgtcgcatggtatttttttagcatgatatgttttactgccgcttccatccccaccaaactttttgtcattactgtttaatacaactttgtaatcaccgttttcaggtactcctatagtgtaaatagcgtggtctataggagtaaagtttatagcgaccaatatctcgtctttcttgtctttggaaagtctcagataagcgagaacgctgttttcgcaatcttgagctttaagccacttaaaaccttcccattcgccgcctgaaagctcgcgttcaatttcaaagaaggcaggatgttcctgataaaaatgtcctaaagctgtggaatattcccacatctttttatggttatcatattcttcaagcccccagtcaagctgttcggcaaaacgccactctataaactgaccaaattcaccgcccataaacaataattttttcccggggtgagaatacatataggcgtataatagtctcagttcgctgaatttttcttcatatgttccccacatcttgtcaatcagactgcgctttccatgaacaacctcatcgtgtgaaagtgcaagaatataattttcagcaaaagcgtacatcatcggaaatgtaagtttatagtggtttcctttcctaaagtatgggtcgcactgcatatagtcaagaacatcgtgcatccagcccatattccatttaaagttaaatcccagaccgcctttattcaccggagatgttactcctccccaagcggttgattcttctgcaatcatcataacgttcggcaggcgttcaaatactgccatattcagtttttgaaggaattctatagcttctagattctcttttccgccgtatttgtttggcagccactctccgtcattgcggttataatcaagatataacatgctggatacggcgtcaactctcaagccgtcgaaatggaattcctgcagccaaaataaggcgttggaaattagaaatgaccaaatttctgtctttgtccagtcaaatactaaggtgccccattctttatgttcgcctctcctgctgtcaggatgttcaaacaggcattcgccgtcaaatttggcaagggcaaagccgtctttcggaaaatgtgccggaacccagtccattattaccccaatatcattttgatggcatttgtcgataaagtatttgagttcttcaggtcttccaaaccggctgtttgcgctgtaataacctgtaacctggtatccccatgatgcgtcaaacggatattctgagagaggcataacctcaatatgcgtgtagcccatctttttcacatacggaataagttcgtccgccatttcggtataagttaaatagcttccgtcctcgtgcgttttccatgatgaaaagtgcatttcataaatgtttataggtttgtcataaggctctgtttttgtccgtttatctatccattttttgtcattccattcatagtcaagttcagttgtgatagatgcgttggccggtctgacttcgctatagaatgcgtatgggtctgatttaagaaatatatctccgcggaatgtttcaatactatatttatagcactgtcccggttcaattccttccaaaaaaacttcccatatcccaaaatccatatgtttgtacattctgcccttgtttctgtcccatccgtttccgtcacaaactacggatacgctttttgcatgaggcgcccaaacagcaaacaaataaccgtcttttccggaaaatgacttgcccctgtgggctcccagcatacggtaggattcgtagtttactccctggttaaacaaatacattggagcatcgtctatataggttccggcatccctcttttttccgtttttgtaaatgtcaaaatcattcataattgtgttctcctaaaaatttattctgctccatattaaaacaatacttatagaattattatatattttatacaagtttattttatcataattagaaatttttgtctattttaaatgctcagaaagttgcacaaaatatacttttcatttttgtacgtattgataaataatattatttaatatgagcaaaaaacgtcatatcttgtggttggagaaacttttttttaacttttgccaaaatcaacaaaaaatttgagattttaaacagaaatttatatttaatacagtaaaaattatttgacaattctgtatcaataatattatgacctaaattaaaatatgtacaaataaaaaaattaatttcaaatattttcaaaatagttataaaagtttttttaactcgtccaaagttattgaattaagtttatcaatctttgatttaagcagttctttcccatctaaagcgtccttctgattttgaagaagcaggaagtttcgtctgagttcatcaaattccatgagcttaggccggttcagtgttattcccaactcttcgtctttggaagtcagcgaatcgtcatgaaatcgataaagataaagaggttctgagaactcagtatgccttatggggaaaatttcatttattctcatccagtagtcataatcttctataccaaacctatcgtctgaatactcgccgattaaatccgcaacagatgctctgtacataaatgccgcgccaatagtattattggcagttatatttagattatccgttccggttggaagtattacattgccgctcatgggcggatactcataccagcctttccctcttaatacgtttccatttttgtcaatcaatttcatatttccgtaaaccatagcggcgtctttataataatcaagttcctgtaccattttttctatgaatttcggaagcaaaatattgtcatggcttatccatgttaaatactcgccttttgccattttaaaacctgaattaagtgcggccggaaggaggcggttagcattatgagaaataacaaatatattgttataattttttgcgtattcttcggcaatactgccgcttttatcatctgaaccatcatcgacaataattaattctatttttttatagctctgtgatattactgaatttattgcatgttttaggtatttttcaccattatacacaggtaacacaattgagaccagcccagtttctcctaagtttttaaggtctcttacagaaatattataaatattattaaatttgtttttatactcggagaaagttaaatgatgtatgtcattattcttattcgcaaatcgagtcagccaattcaataaagccatttttttcacattccttatagtataattccagctcgtcagcgttgcttttaattaatttttcaatttcacattctgctatttttattctttccaacgcatagcttttatcccaagccgccgggctgtatccatctttgtacagacggtaagtggtaaatattccggcttttatggtctcttttatgtgttctttggtataacgggttttatcaacgtcatgatagacaactgcttttggctctatgcctattttgcagccgcagtttaatactttaaagcatagaacggtttcctctcctcctgcatagttgttccccacacgcccatagctttcatcaaaaccgccgacagcattaaatatattgtgtctaactgaaaagttagccccgaacggaaattcatattgcttgtttatctcacggtatttggtgtaaggaacggtgtattcactccataaagtttcttttccctcaagtataatatttggtttgggttccggtgttttaagaattatttgtcctccgattattccggcattgctgtgtgcgtcaaaagcattttttattgtttcaagcagacgcggttctgcaatagcgtcgtcatcaatatagacaaggtattttccgttggatactgacgcacccaaatttcttgcataagtcaatccttttcgttcttctttaattatttttatattgcagtcattgtattcttcaaaggtattgttaagttcctcgccgttgtttacaataataatttcatatttctccgacggaagggtttgaccgcaaagtgactttacagcattggcaagttttttaggccgattgtatgtgcacacaataacggatatatccagtgggtatttgttatcggcaataagccgcggcggcgtcgttttgatgttacggcgcttatagcttttaagatcgcatataagttttttaatccataaacgaatattgataatttttccgccggcggcgtttaacaaagtcattgtgggcttctttctgcgtttcaaattatcacctcacataaattttgcatggagcggatattaatccaaaagtttgcggaggagcaattgatttaatttccgctgctccttcaatatactcgtaataagtgatggggagactgttcttgttttcaagacctgccgctattgtgtacttgcctgagttaaggcggttttcaaaacaaaaatttatttgattggttccgtaatgaagcggttcgtcagtttgaaaaactatcaaatcaagaccaaatttgtcttttagcgctatagacacgccaagactatcaaggcttatatcatcggaaatatatacatcgactgtaatcctaacgttttcatgcagataaaactccacgttttttggtatagaaatgttttttattgctccaatatggctgccgtaatggtttaaggcaccggtgagtctctgtttttgaccgtgagctttattgccgggatttacgcagctttcaatatattttgatgtaacagttgcaacgtcgccgtttgcaataattttaccgttatctaaccaaattgctctggtgcagaatctgcggactgaatcaatgtcgtgcgaaacataaagaattgtcttgccaattttcttaagctcctcaaattttttaaaacattttgtttgaaaacggtaatcaccgacagccagggcttcatcaactaaaataatatctgtatctagccatatcatggacgcaaaacccaaacgcaccagcattccggaagagtatgttctaacaggcaatctggcaaattcaggtgagatttccgcaaaattcaaaattttatcaatatctcgggtaataaaatttttactgagaccattaacagtaccgtttaagtatatgttttctatgcctgtatattccgggttgaatccaacgccgagctccagcagggaggaaactgaaccttttacttcgcatgatccattgtcatagccggaaattcctgataagattttcagcagtgtggatttgcccgagccgttttttccaatgactccgacgcattctccgggtttgacacaaaaatttatatcgttgagagcataaaaaagttctgcagagttaagtttttgagaaccaaataaagaaccaaaaatttttttaaatggacttttggattttataaatgacttgtttaaattttctatcttgataatattcataaattttgtcctaagtgtaaagaatataattgtattttaaaattatactatattaaaaattctcatgcaacacttgccaaaaatatattttttaaaaaattttaaaaaaagtgttgacaagcattaaattctgtggtaatatatcattcgttgacgcgttaaaatattttaacggcagctgtgctggtgtagctcagttggtagagcagctgatttgtaatcagcaggtcgcgggttcgagtcccatcaccagctccagaaatttaatattaaaccgctgctaaaaagcagtggttttttgtttaataatcttttttactcttcgccgaatagatttatacggagactttcaagctgttcataaagttcaaaaaaactgccgcttacaggcgtccagcggtatgccataataatttccattttttactgcttcaattattatatccatcccatcagctccgctgcggtgaacctttagcggcatattccaaaaatcagtttcaaagaattttttcgttactaactgagtttcttctttagtcaatgttttttcttggatttcatttgtattatcaatttttgacaaagttaaattataaacatattttacggttgaagtaccgtcagaattgaggttgattcttaaaacataattgccgctaaaggtgccgaaatatgatagtcggtaaacttctccattattttggcgaagattatcctcccccaaacttttgagtatggaagagatagcaggatctgaattttcacctatccctaagattatcatatcagaagaagaactatcaccaatccatctttcagttagtattggattatagttttggtcacgtaaattctgcattaattctccccaatatccacatggcactctatagccttctgtttgataaagagagtataaattaactaatgaacctttttcaatatttaatatattaaatatatcttctttgttagaagtttttctattatatatatcagttatgtttgtttggctgtcattatgttgagtaacagcatatcgtataccatctacagatgaattaggatcttcattccatatataaacatctgcaagaatataatttaactgaatagagtctttagcaacattcttagatgccgctttatcaaaatagataatttcattataatatactttgtatcccaaagcttcggctatagaacttaaaggaatataaatttctccgtcaatagttaatggctcataatcaatctttgtttttttgttattgacaaaaatcgtattgcggttaactccggcagttaaagttgtatcatattctaagcctttttgtataagcttaatagtttcatctgttatttcatatgaaaaaccggaattaaaaatcttattacaacaagaagcagggacatacgttatacccggttctataataaaaggctttatatcggtaaattcagtttcaagaccgtcttttataaaaatcggttcttctttttctactgtatctgcatttgcggtatagctccataaaaaagttaaaacgatagttaaagcaaaaataaaagccatttttttcataatgtgttcctcctaaaaggatattcatttcatacttattataccatacatcattcctaataacaatatagcagtataaatataaagcttttattatgtttgtataaattatacaaaatcgtaaatggcaaatgagcaaacacgagataaagagagaaaatagctaaaataaagagtttgtgtttagctaaattaattttttgcaaaaaagtcttgacaaaattatgaaaccgtattataatagctaagcaagttagagaggacgtctttaaggagacgtcatttattttgtaaacttattaacttaattataaatttaggaggtattcattactatgtcaacttatatggctaaagctaatgaaatcgaaaagaaatggtacattatcgatgctgccggcaaacctctgggtagagttgcagctcaggctgctacaatcctgagaggaaaacaccgtccggaatatactccgggtgttgactgcggcgaatatgttatcataatcaacgctaaagacgctgttcttaccggaaacaagcttcttcaaaagaaatggtacagacataccggttatattggtcaccttaaagaagtttcttataaggacttaatggagcaaagacctgaaaaagctatggaattagctgttacaggcatgattccgcataacagtcttggcagaaaagaattaaagaaacttagaatttacgcagacgacaaacacgaacatgctgctcagtcaccgattgagtggacacgtgagttttaagaaaggggacttatataattatggcagattcagtacagtattacggaacaggcagaagaaagagttctgttgccagggttagattggtgcccggcacaggtaagattacaataaacaagagagatattgacgattactttggtcttgaaactctgaaggttgtagttcgccagccgctggacgctacaaaaaccttaggcaagtttgatgttttgattaatgttaacggcggaggatttacaggacaggccggagctatccgtcatggtatagcaagagctcttcttgaagttgatgatgagttcagacctgttttaaagagtgcaggatacctcacacgtgacccacgtatgaaggaaagaaagaaatacggactcaaagcagcccgccgtgcaccacagttctcaaagagataacattcaaacttctcacgactattgaaagcctttatttacggggtttttggagttgtcagatgttgtgaaaagttgcaaaaagtgtgagataagtaacacacaagcaacacatatgcaacaaagttatctgaaatacaaagattttaaaagagatgtttttcgtaaaagaaagacatctctttctttgttttctcagattttattaattgcatctattaactccctaacatctaaatgagtataaactttttcggtgagcgtcatagcaccggaatgtcctacaatttttttgattgtggtttgggaaacttttgcttctgcaagcattgatatacaagtatgacggcaacaatgtgtggtcttgtcaaagcctaagtttaccattaaaggtataaaatagctgtcgtagtaattacgatatttgaattgttctccattttcagtatgtaaaaggtattcactatcggtatcatcataccaagctttaaagaatggtaataccttatctgcaatggggacttttcttgtgccattttctgttttactgtcaatgacatcaaagtattgttcatccaagtaaacatcacttttcagtaaatcaagcatttcagaaatacggacccccgaataaatcagcataagaacaatttgataatatttatcctcttgctgcatccaaatgcggtcaagctcatatttgtcaaatttattcctatctctcctgttaggattgcggtctttgtattttaatatatctacaaattcagcgtaattcttattgcacacatcattttttaatgcgtattcatacatttgaccgaataatacctttagctttcttaatgtagggaaattcttaccacaagtatctactacatactgcaaatctgcaagcttaatttctttaaatactttgttatataatgttccgcatagtttatatgaagccttatacccttttacattagaatctgatattgtgggaaatttgcttgcggaccacttttcaaaaatctcttggaaagtaatttttgaggaagatacatcaaatggatttttgttatactctgcaagcatttgaagtccgtctgcctttgtaggcgcataacctattataatatattcctgcacctgtttgtccttttccttatcgtatcgccagcctgccgtctttctgactacataaggatttcttcttttgccggatagttttacgacgctcccatatccgttggggaatctcaattctcctaaacctccttctaattaagattatttatgataaagagcttattgctcgtcatcatcattttgtagtgctttttttgcctcttcttcacgaagcttttgtaatttttgcctatccaattcattacggcgttctataaatgttcttctatccaatttttcatataccttatctgtaagggtgcatttactgtatgattcaattttcatatcttcccatgcttgatatgcttcatagtccatccaataagtttttaacgcctctctgttatttaaaaatgtttccataacaatgcagaaatcagcgttgtacatagcttcctcatcttgaccatcaaatgtaaaagagcattgccatttcccgtctttaccaactcttttaatttccatattataagaaatttcattttttctatccatttcaaagaaaaatgcaagaacatcagataaggtttcaacttttatatgagatgcatcataccctatcaaataattaagtgtagtattcaatacttccgcaatttctgctaatgtcgaaagaggaatgtcaatttctccgctttcgtacttttgaaccgtccttagtgatttaccaagcttatccgctaaatctgattgatttattcgattatacttacgaatttgggcaattcgttcgccaacaagtttatttaattcgttcacttttaatcacctctgaggacattataacacatctatttatgaatttcaagtacatttacgaattttaattgcatatttttattaaaaaggtattgacaagtcgtaaaagttcgtgtataatgataatgcgtattgagagtacgtaaattttataagaaggtaatacgtatgaacgatcaaagaacatttattgaaatccctaattttacgggaagaaatgttcctataacagaaatagcaaaagcaataggaaaagatgctcagtatatacgcatcggtttgcagcaaggtatcttaaaattcggttatgcaatgaagcttgaaaattcaagtgaattcaactactattgccccgataaaaaggtttgggaagaaacgggatattttagagatactgcaaagtaaatttattctgaaaaactttatatataggttaggaggtggttctatgtgagtggtaatttctttatgatgagtaatgatatttttaatggtgatataaccccctacgagtttactgtgtattcgtaccttatgatgaaagcggacagaaaaaccatgaactgttacccgactgtgggaacaatcgcttcggcttgtaatatgagcaaagctcaggtgcataaggttacagcctctttagaggaaaaagggttgattacaaaaatcaagcgatataagaatacgcaaaatggtaagaagcatcaaacaagtaacatctatgtcatagagccactgcctacacaatatagagggagtgcctctataatagatacccactccctatctgacaaagagggtaataatcaagaataaatatatcaatactcatttatcaaaaaccactacaacaagaaggtgaggttgtggattacagcacaaaaaacttttactattatcttgatgaatgttattttcatcccgaacgagataaggaattttcttctgaaaccgaaaagaatttagtaagaaaggctatggagctactttggaacaaggaaagcatagttattaacgcgattacataccaaaatcaagagattcgacaaaaactcatagacaaaatgatgcctgaaattttagatagagccgtagaggtttatcgtgaagctaaagacgtaaaatctgaaacagcatatcttgcaagtgttattttgggaactcttataaactacaatgcgtacatagagcggttattcagacaaacattcagagggtaagtaaaggagaattatactaatcattttcacagagccgtacacggctctgtggagatggttagagaaaataaataataattttaaggaggaatctatcaatgaaagaaagatttatagaaaacggaattgagtatgtaaaaaaaggagattattatatccccaatttgaaagttcctgagtgtaagtacgagattggaaagtacggaagattaagaaagcaatatttgaaatcaaacaaaccttgtcaatacagcatgcttcttataaccggaaaactgtttgaccatttgcatgaggttgatgagcaggcacagcaaattttagaccaatttattaagtcggcagagctgactgctcccgacaaggctacacatcaaatggaatggattggacattttaataacgcaaaggcatatgcagaggaaattatctttagcgagataatttatatttaatgttataacaagcactgaatttggcattacaaattcgatttttaagggatgcccctaacaccccaaacgtagaaaggcgggtgaaattatgaggaatagaacaaagactttttctgtaagattaagtgaaaaagaatttgaaaatcttgaaaaagcaatcaaaaaatgcggtataactaaatctgaatttgtaagaaaaacagccaaccgatatttaccaaaagagcgaccgccaaatgaatacaataaattcataacacttttaacggaaatcggaaatgagctgtatggaattttaggtatagcaaaatctacgggcaagcttgatgtagataagcttgaaaaacaagtaaaaaaatttgacgaagcaattttaataataaacaaattttataccgtgccggataaaatcaaattaaaagaaggtgctttgaaatagctacaacaaaaatatgggatataaaaggcagacttgactcccttatcaattatgcagcaaatcctgagaaaacagacaataataaattttcagaaaaacagatacaagctttgcatgatattatggaatatgcttcggatgattataaaacggaaaaaagattgtttgtatcgggtgtcaatgttacacccgatactgcaacacataaaatgcaacaaacgaaattaagatttggtaaaacgaatggtataattgcattccatgccatacagagctttaaacctggcgaggtaactcctgaaattgctcatagtgttggtgtaaagcttgcaaaggaaatttggggagatagatttgaggtggtagttgcaactcaccttaacaaagagcatatacataatcactttgtaattaattctgtttcgtttgttgatggcaagaagtattacgataatactgctaattataatcgtatgcgaaaggtgtcggacagactttgcgaggaacataatctgtcagtaatacgaaatccaaaaggtaaagccaaacattatgcagagtggtatgccgaaaataatggatatcccacaatacgaggtcaggtaagagatgaaattgatgaaataatcaagatgtcgtatacaatggatatattttggaaaacgctcaaaaagcgaggttatgaaattaaagattgcagaaagtatattgctgttaagcccacatttgcagaaagatatttacgaattgataaccttggcgagagatacacagcagaagcaataaaacagcgtatatccaatgctcgtaatggtataaaagaattttatgcacctacactggattataatttttggcttaagaaatatgaacctgtaaagcttaaaggatttaaggccttgtattatcattatctgtatctgtttggacgaatacgcaaaagagaaacaccgcagagagtatcgtt

SEQ ID NO: 177 - DNA, 19778 bp, unidentified
  source 1..19778: mol_type = unassigned DNA
atgaaagtagtaattctggccggcggccttggcacgcgcatcagcgaagaaagcgtctacaagcccaagccgatgatcgaaatcggcaacatgcccatcctgtggcatatcatgaaggaatattcctactacggctttcacgattttgtcatctgcgcgggctacaagcagcacatgatcaaggagtggttcgcggattacttcctgcataccagcgatattacgtttgatttcacccgcggccagaacgagatgatcgtccacaaccatcacaccgagccgtggaaggtcaccgttgtggacaccggcctcaacacgatgaccggcgggcgcatcaaacgcattcgtccctacatcggcaatgagaccttcatgatgacctacggcgacggcgtctgcgatgtggacattgccaagctggtggcattccaccgcgagaacggcaagatcgccacgctgaccgccgttcagcaggagcagcagaagggtgttctggatattgccgaggataattctgtccgttctttccgtgaaaagaaggccagcgacggcgcgcttatcaacgcgggctatatggtgctggaaccgcagattttcgactatctggacggcgacgcctgcgtctttgagcagaagccgctgcagaagctggccgaggagggtcagctgatgagctatatccacaagggcttctggcagtgcatggacaccgcccgcgagaagcaggtcctggagaaaatgcttgccaccggcaacgcgccctggaagaagtgggaggattgatgatggtacattacgatcctgaattttaccgcggcaagcgggtgttcgtcaccggtcacaccggcttcaagggcagctggctctgcaagatgctgctgatggccggggccgaggtcacgggctacagcctgcagccgccgacgcagccgaaccttttctccatcgccggcgtcgagggcaagatgcacagcatcatcggcgacatccgcgactttgacgcgctgaaggccgcttttgacgcggcgcagcccgacattgtactgcacctggccgcgcagcccatcgtgcgcgacagctacaaggacccgcgctacacctatgagacgaacgttatgggtacggtcaacctgctggaatgcgtgcggctggcccggcagcagggcagagcgccccgctcggtgctgaacgtcaccaccgacaaggtctaccacaacaacgagtgggcctggggctaccgcgagaacgagccgctggacggctttgacccctactccaacagcaagagctgctcggagttggcgacgcactcctacatcaacagcttttttgccgataagaccgtggccgtctcgacggcccgcgcgggcaatgtcatcggcggcggcgactttgccaatgaccgcatcatccccgactgcgtccgcgccatggccgcgggccgtaagatcggcgtgcgcaacccctactcgacccgcccgtaccagcatgtgctggagccgctggcggcctacctactgatcgcccagcgccagtacgaggacagccgctttgcgggctactataacgtaggccccgacgactgcgactgcgtcaccaccggcacgctggtggatctgttctgccgggcctggggcggcgacgccgcctgggagaatcaggccgaggccaatgccccgcacgaggctaacttcctgaagctggactgcagcaagctgaaaacgaccttcggctggacgccgcgctggcacatggccgagtgcatggaaaagaccgtcgccttcagcaagatctggcttgccaacggcgatgtcccggcggagatggaaaaggaaattaacagcttcttggaggggcagaaatgacaaaggaacagaggagtataacaagcgcttttgtcatttcggttttggtaggtggagcctatctggtttcctggctggcgcatgtatggggtggtcagccgtggcccatcggcagcaacatggtcaactatgccgtagttctagtactgttcggcgtttcgcttttgctgttcggcaacctttttgcccgcattctgccgcaagaacgtggctttgtgcgggcctgcgacgcgcgtctgcagggtcgcggcgcggcagcggcccttgtggtatctgcgctggtgacagccgcctaccttatttattacgcgaacattggggtgtccaaggaatttgcggggccttcctattcgccgtcctccctgatggcgccgcagatggtgccgctgtattacctgcttacggtgctgttttttgtggcggcaatctatctgctgctgacgggtaaggactgcccgcagtggatgacctggggcggctacggcctttcggcagtgatgtacttcttgggcgtatggatcgtcaatacgtttgagggagacccgtaccacggtgaggcgtatttggaaagcatctacaacgtggctgacagcatcccctatgaggagttgacgacaggcatctacggccactacggactgttctttctgctgccgatgaagatcttcggtgcaaaggctgtcgttattcaattcctgatcgcgctggtcggcgttgtgacggatctggccatgctgtactgcatccatcacctgataaaaaagaactgggtacgcctgttgatggcactggttgtgccggtcattccgtttgcatacagacggacgaattactggcagctgcagcctcaccgtttggtattcccgatgttgctggcggcctatatgctgttctgtttgcggaaaaagcagtcgaaaaaaacggctcggttctggggcggctggcttctgtgcatgctggcagtgctgtggagcaccgagagtggtctgttctgtatcatcggctggtgcgcgggctgcatcgtccgctggtggcagcaggagccatggtacgcccgcggccagtgggaacgctatggtgcgctgctgctgggcgctgtgttggcggtgctgggggccattggcctgacaaatttgtataacctggcctgcggcggagcaccgatcttcaaggtgtttttttacccgctgtacagcagcaattatatggatggttccatcggctacccgcttgagctaggcgtgcgcccatgggtgtttgtgctgctgcttatgctggccgtgctggcatggtcgctgttccagacaaccgctatcggaagaatagccaaaacggagaacattgccccatttgcggcctgcctgtcggtgctggggctggtatcgttcagctactatgcaaaccgttctgcctggatgaatctggagatctgcctgccggaggcactgctctgcctgtgcttcccgctgcaggcgctgacggacggggaggggctacgcaagaagctgggcggcctgtactgcacggcggcacagtctgtgggactggccgtgctgctggtgctctgcgtgcttacggcacagctgcccggcggcgtgataaatacagtgatcctgcaggagcgcggtgcgttcagcacacgcggcatctatgcggaggtggagaatttctctgccaatataccggacaacacctttgcggttggccgcgatgtggggatcatctaccatgcagcaggctgggacaactacggacattatgtggatgctgcggattacggcgtggcagataccgaaaaattactccctcatattctggcagagttgaaggcccagccgagctttgtcgtggatgacatactgggggtctatctggggcagaatggctacacgcccgacatgctcggataccagctgcagacgaccttcacatcggctggcggcacgaacccaattacctattactactacgaaaagcaataaaaaaggagagcaaaacctatggcatggaagaacgaggcagaagcccgcgagcagatcaaggcgatggtcgccgagtattatcacgacttcaaggagaaaaagaccccctatcaggagggtgatcgcatcacctacgcagcccgcgtctttgacgagaaggagatgtgcgctctgaccgatgccacgctggacttctggctgacgacgggccgctttgccgaccagttcgaaaaggaatttgccaagtggatcggcgttaagttcgcccatctggtcaacagcggttcctccgccaacctgatcgccttcatggcgctgaccgcccccgagctaggtgaccgccagatcaggaagggcgacgagatcatcaccgtggcctgcggcttccccaccaccgtgaccccggccatccagtacggcgcggtgcccgtgtttgtggatgtgaccgtgccccagtacaacatcgacgtcaccaagctcgaggccgccctctcccccaagacgaaggctgtcatgatcgcccacacactgggcaatccgtttgacctgtccgccgtcaaggcgttctgtgacgcccacaacctgtggctggtcgaggacaactgcgacgcgctgggcacccagtacaccatcaacggcgagacccgctttaccggtacctggggcgacatcggcacgtccagcttctacccgccgcaccacatgacaatgggcgagggcggctgcgtttacaccaacaacccgctgctgaaccgcctgatcctctccttccgcgactggggccgcgactgcatctgcccctccggccaggataacttctgcggccaccgctttgacggtcagttcggcgagctgcccaagggctacgaccacaagtacgtctacagccactttggctataacctcaaggtcaccgatatgcaggccgccatcggctgcgagcagctgaagaagttccccaccttcatcgagcgccgccgccacaactgggaccgtctgcgcgccgcgctggaacccgccgccgacaagctgatcctgccggagccggctgccaacagccgcccgtcctggttcggcttcctgatctctgtcaagccggagagcggtctggaccgcaacgccgtgacccgctatgtggagagccacaacgtgcagacccgtctgctgttcagcggcaacctcatcaagcacccctgctttgaccagatccgcggcaccgacgcctaccgcgtggcgggcgagctgaccaacaccgactttatcatgaacaacaccttctgggtcggcgtttaccccggcatgaccgacgagatgatcgactacatggccaagacgattatcgaggctgtgaatcagtaaaattttgacaacgaggtacagacccctatgatgcagcaaaaggtgaaaacgacccgcgcacccagactgcggttggacaaaaacaggcggctgacgcctatgcagatctactgctgggcaacggtggcctgtctggcggtgctgctgcttgccctgctggccagccgcggtacgctgctgcatcgattcttcttttatgatgtcaccgataccggtatggactttttccatagtattgagtatatgcgtggacgtatgccctacggacagttcgatacgctgtacccgccgcttgcaaatttgtttttctatgtgttgtatttgcttgtgccaaagacacaatcagctacgtggacggaatcgtttatctcgtctctcaacatgaagggaacagaacgggatttgcgtttgcagcaagcgacgatgatgctgtttatcgtctttgttatcgtggtggtcttaggaattgtatcgatgacagaacgcctgacgcgcagctgcggggggcggaaaaagctgctggcattctgtgcagtgttcagctatggggtactgtacggcttggaacgcggcaatattctgctgctgtgctggccgttaatggcattttttatcctgtaccgcaattcagaaaaaccacttttgcgggagttggcctgtctggcactggcgattgccgccggtttcaagctgtacccggcgtttctgggcgtgctgctgctgcgcgataaaaactatctggccgcggtgcgcacggtgctgtacggtgttgtctgcctgtgcttcccgctgttcttcttcaatgaaggattgtttggcctcacactgtggttccgtgtactgtttgattttagcggcagcagagatgaaccgtggatcggcaacggtttctccaacattttggcagaggccggacatgcggtggacaagctgctgggcacgcagctgggctatggcagctacgcactgctgggcattgtgctggcagcggtgctgctggtgtgcagcttttttatggataaggagtggaaacgcatcacagcaatcattctggcgatgctgatgttccagtcccagtatgattatgtatggtgcctgtttttgattccgctgttcctgtttatggagcaggagcgtgagctgcgcagtgacaacgtgctgccctatctggccttgatggtgccggtgctgccgctgccgctgtttcggcgggaccagatggagccgtcctttgtaccgcgcaacacgatttgtcatgtcatgctgctgctgctcattgtctggtgctttgtccaggcagtgcagggggtgcgtgtacgctgtgcggaaaaaccggtcaagccggcacacggacacccggcagccacggtgctgctggccgtttgtgtggcggtggccggtgtgggcggccagcagctgtggcagcgcacccacaactggggctttgactacggctataacggccgactggatgccgaggacatccggcagaaggacgtgcaggacagcgacggcaacccggtagaggcaacatggagcggccgcggtgcgtatattatgatttacaaccacgcgccatttacgcaaaggatgacggtcacgttccagacaggctacggcatggatttgaagcgcgcctatacgatgacgtttgaagcaccgaatctggaagatgctgatggtacaaccgggaagcagaagcagacgaatattaagattgaccatgaggggcagaccgtgcgctacacggtagatgtggcccccggccagacccaaattgatgtgagctatgacggcccgatggcggtctatgatgcttcttcgcgcaaaaacggtaccttcacggtgacaaacctggcggtcaccagtgagggcgctgtggaggaaaccgaataacggaaggaaacatatactatgcagaaattgctggccctgctgggcgcaaaaaataaagaggaatttgtggagctgttcaagcagttcatcaagttcggcctggtgggcgtaagcaacacggctgtgtccatggcggtctactatatcttcctgtggatcagcccggacctgtatatggtcggcagcattctgggcacgattctgagcattgccaacgcctttttctggaatgataaatttgtctttaccggcaacgccaatgactggcgcagcaagctcaagcggctgggtaagacctatgtcagttacggcggcacgtcgattttgtccaatgttctgctctggatcgaagttgcattcttcagtgtcagcaagtccattgcgcccatcgttaatctgttagtgacgatcccgctgaactttgttatcaacaagctgtggacatttaaggaaaagtgagaacaagcacgatgcaattagtaatggaaaaaccacatacgaataagcgccagaacgcgcgaggctgggtattggctgcactgctttgtgtggtgattctggcctattcctcaatttatttcgccaacacgatgcccattacggaaggctagaatgtaaactatgcagagctggtattgcacgggaaatttccataccgcgatttttactattacctgccgccactgaacatcctgattgatgtgctgctctggaagctgtcgtttggcagcctgttcatttaccgtgcgtggtggctggtacagcggattgctatttatgagttgatgtttcggctgctctgccggtatttcaatagatatgccgcctttgcagcgtgtgccttctctgcgattctgtgcacggcctctgtctacgatttatttggtgattataaccagacgattccgtttttgtctgtgttgctgctctattgtgttctgggatttgcagaggcggtagataagaaagccgccgggaaatacctgtttgctgccggcgctatgctggggctgctctttctgaacaagcagacgatttttgcagctgcgggggttatttatctgctggctttgagtgtctactgctggaagaaaaaagacaaaggctttctgcaatattgtgcggcggtcatacttggctttttgctggtgttcgtcgtggccatgggaatccttgccgtcaatggcgcgttgcttccgttctttcagcaggtctttatgcacacgggaggcaaaggcagtccgcttgtcattttgctgaaaatctttacgggctggacaatcaatgcgccggtatttttactgatggtggggtgtgtagctgccataacactggcgcagaaaaacgagagtcagacagcaggacggatgctcttgctgctggtcataggcggcggctatgttttggaaaggcaggctgcgaacgactttatcgaagtgctcgttggtacgaaaagcgtccaagccgttgtcatcggtggagggttgctactgttgctggcgtacagccaaaagcgcagaagcggcagcaagataatgcatgatgtattttacggtctgtgtgccgcctatgtggtgactattctggttacggcccgttatgcgtcattaggcgaagataacgggagcttattggaagcaatctatgaatcaggcacgctgtttaagagtgtgactggtacgctgtatacgatcatcagctttttggatctatatctgattgcccgctcccttatgaaaataaaagcggatggcaatgacggctatgcacgtgagcacttttggatggcctgtgcggcattttctacgatatatgcagccagtatggcatcggcatcagaaatttcctaccatgggatcatgttggctatgccgtttgttctgtgtgttgggctgaacagcgtatttacagataaagttacggaaaaatctgtcaaaatcggtacgattgcgctgtgcacagtactttcgatggcttgtattgcacagaaggtcgtatgttcctattcttggtggggctgtgaacaggcagagtatgacaaaaaaatctacgccaccggcatccccgcgctgcgaggcttccgtttttctgcggaggacgacaagatgttggaagacatcacacagctgattcttgaaaacacaacagaagatgcaacgatttttggctatccctatgtaaagctctttaatattctgacaaaccgctatacaatggatacgtttgttccggttctgttctatgacgtggtagacgaccagtacgttttgcaggaggacgagctgctacaggaaaatctgcctgacattgtaatctggaaggatgatgttccaaactgcaagaaggttcacgaagaaagttaccgcaatggtgagaaattgaagcagcgcgagctggaaaagaattttggacgactgctgggcacacgctacaccctgttgggcgtgtatggtgaggaaagaaccggtaagatcaaggtgtacaagctggcagacgagacagactggggtagcttcaccttggaaggaaagggaaccgaggaagagccgtatctgattcagtcggcggaggatttgcaggcgttcagcaattatgtcaaccgcggcatgagctttgcagatcagtatgttgaacagaccgctgacattgatatggacggtaaaaaatttacgcccattggtgcattcagcggggaaagctatttttacggcacctacaatggcaagggacatattatccgcaatctgagcattcagggcaaggctacagaggatgtcggtctgtttggacgtctcgaaggggctgtttacaatctggggcttgaagtgggcagcctgactggcgactgtgttggagcaattgccagctatgcagtcaacccggaggcagagattgtgaactgctttacggatgtgaatgtcacgggctcgcgcgctggtggcattaccgataacttcgctggtagtgttgtaaactgtgttagtgccggtgcgctgactggtggcgaaaacgcggatgcaatcgcctataatagctcaattatggtagagaatgtttatcagctgacgggtcaaaagacaagcctgcttgatagacccgctattcaagaaaagcgtgtcagctatgccgacgaagatgttttcaacagtgatttcctggtgaagcgtctgaatgccgcagtaagagaaaagaataaagcaaacagcgagagcggcgcagaagaagcgattacgcttgtcgaatggacaaagggaacggacggccacccggtattggttcctgaaaattgactgaatggaaaaggagcaacccaatgaaacagcgtttagcggattatgtggcggactttctggcggcgcgcggtgtgacggatgttttctccgtcgtgggcggcggcgctatgcacctgaacgatgcgctgggccataacccccggctgcatgtgacctacaaccaccatgagcaggcctgcgccattgcggcggaagcctacgcccggctggaaaataagatcgcggcggtctgcgtgaccaccggccccggcggcaccaacgcgctgaccggcgtcgtgggcggctggctggactccatccccatgttcatcgtctccggccaggtgcgctatgacaccacggcccggtacgccttgcagtacaccggcacgccgctgcgcgccatgggcgaccaggagtacgacatcaccaagtccgtccagtacatgacgaagttcgccgccatgctggaggaccccaaggacattcgctacctgctggaaaaggcgtggcatctggctacaacgggccgccccggcccggtctggctggacatcccggtcaacttccagggcggctacatcgagactgacgagctgcgcggctacgaccccgccgaggatgacgcccagctgcccccgtcggtggacgacaccacgatccggacgattctggaaaaaatcaagaacgccaaacggccagtgttccacgcgggctatggcatccgcctgtccggcgggtatgcggcgttccgctccgtggcggaaaagctcaacatccccatcgtcacctactggaacgccgtggacctcatcgaggatgacaatccgctgtactgcgggcgcgccggcaacatgggtgaccgcccgggcaactgggctatccaaaacgcagacttgattctggccgtaggcacgcgcatttctattcgccaggtcggctacaactggaagacctgggcccgcgcggcagaggtcatcatggtggacattgaccaggccgagctgaaaaagccgaccctgcacgtcgaaatgccggtctgggccgacgcgaaggactttttgaccaagctggataaggctgccgcggcccccgtgaacgcgggcggcgagtggctggccacctgccagcgctggaaacgcgactaccccgccgtgttgccccgccagtgggaggaaaacggcgagaccgccaacgtctacgcctttgtgcgctatttaagcagtcgcctgccggagaacagcctgaccgcggtctccaacggtgcgtgctgtgtcgtcggtaaccaggcgtatgtcatccagaagggcagccggatggcaaacaacagcgccattgccagcatgggctacggtctgcccgcagccattggcacctgcatcggcggcggacgccgcccgacgatctgcctcgagggcgacggctccatcatgatgaacctgcaggaactgcagaccattctgacgaacaagctgccgatcaaaatcttcctcatcaacaacaacggttaccactctatccgcctgacgcagaataaccttttcaaggagcactgcaaggtcggcatcggccccgagagcggcgacctgtccttcccggagtttgaaaagattgcaaaggcgtttggctacccctactacagcgcccacagcaacgccgagatgaagcaggccgtggacacggtgctggcactggacggcccggctttctgcgagattttcaccgacacgaaacaggtctgggagcccaagagcagcaccaagcgcctgcccgacggcacgctggtcagccccccgttggaggacctggcccccttcctgccgcgtgaggagctggaaaagcagatgttcatcccgctgatgccggaagtgtaagggagtgcgtgattcaaaaatggcaagcattcaaagacaaatccacaccgccatcatcaccggccctacgggggcaatcgggatggcgctgtgtgcaaagctgctggcggagggtgtgacggtttacgcggtcacccacccgggcagcgcgcgggcggcgctgctgccgcaggacgcgcggctgcatgtggtgccctgcgatgcggcggagttggccgcgctgccggagctgatcccggaaaaggccgatgcgttcttccactttgcgtggacgcacacgatcggcccgggccgcaacgacatgccggcgcagatcgagaacatccgctacaccattgcggcctgccgcgccgcggcgcagctgggttgccaggtctttatcggagccggcagccaggccgaatatggccgcgtggagggcgtgctgaccgcgcagaccccctgcttcccggaaaacggctacggcatggccaagctgtgcgccggccagatgagccgcgtcgagtgccagaggctgggcgtggcccacatctggacgcgcattttgagcgtctacggcccgcacgacggtccggccacgatgatcagcggaaccatccgtaagctgctgcacggcgagaagcccgctttgaccgcgggcatccagcagtgggactacctgtacgccgccgacgcggcagctgcgttctacgcgctggccgtcagcggacaggacggcagagtctacccgctgggcagcggcacggcctgcccgctgaaggactacatcgagacgctgcgcaacgccatcgacccggcgctgccgctgggcttgggggaggtcccctacggcccgctgcaggtcatgcacctgcaggcggacacgtcggccttacaggaggacaccggctggcggcccgcgaccccgtttgaagaaggaatccgcgaaaccattgagtgggtaaggaaagagacaaaatgagtgagaaaaagacgatttcggtaatgatcccctgctacaacgaggagcagaacgcccgccccatctatgaggctgtgcgcgatgagctggtcaagagctgcccgaactacgactatgagattttgttcatcgacaataagagcgaggacggaacccgtgccatcatccggcagatctgcgccgaggacaagcacgtcaaggccatcttcaacgtcaagaacttcggccagttcaatagcccgtactacggcatgatccacacctccggcgattgcacgatcacgatgtgcgccgacttccaggaccctgtggagatgatccccaggtttgtggccgagtgggaaaagggctacaaaatcgtcattggccgcaagacccagagcaaggaaaacccggtcatgtactggctgcgcggctgctactacaaactcatcaagaagatgagcagctgcgagcagatcgagcagttcaccggctttggcctgtacgacaagagctttatccagacgctgcgcaacctgaaggacccgacgcccttcatccgcggcattgtggccgagctgggccccgagcgcaaggaaatcgagtacacccaaccccagcgccgcgcgggcaagacccacaacaactggtacagcctgtacgacgccgctatgctgagctttaccagctacaccaaggccggtatgcgcattgcaacgttcgcgggcttcctggtggcggggctgagctttctggtcggcctgttctatctgattgccaagctgctgttctggcagagcttccgcgccaggtacgcgccgacgatgatcgccatcttctttatgggcggtattcagctggcgttcctgggctttttgggtgagtacgtcatggctatgaacactcgcatcatgaaccgcccgctcgttgtggaggaagaacgcctcaactttgggccggacgaccaatgaccggcatgaagcaggagcttgggtatttcctgaaaaacgcgaaattccgcgcggcgctggggatgaccctgctgctcagctacggctatgccatcgccacgacacgggtcagcattgactcgctggaaggggaccgctacatcggcacgggcggcgtcatgctgtccaccggacggttcggcatgaacctctgggccgcggtgctgggctacggcagggccgagccgagctatgcctttggcattgacctgctggcggcgctgctgctggcgctggcggcggtgagcttctgtgcgctgctgcgcaaggccgcgcaggaccgcatcagcatgttcggttatgggctgtttgcctgcctgtttgtctcctacccgctgatgaacgaaatttgggagtacagcggcgcgaatgtctgcgtctgcggcggctatttgctggacgccgctgcgctgaacctgctgtgggacgcgcgccagcccggcgtgccgtggcgtggcagggctctgcgcatgggcgcggcggcgctctgcctgatggtggtctgctcgtcctatgagtcactggcggcggtgtatgtgctggctgtctttgcgcttttaacgctggagcagctgctggccgtcgagcgctcgcggcttgtggaagtcctgaccgagggactgtggtacgcggcggcgctggtcggcgggctctgcctgcgcgtgctggtgacgtctggcatccatcttgtgctgccgcaggctgcggccaacggcgccaccgaaattttgtgggcgttctacccatttgtctatcttgcaaagctgcttgtcaagggcattctgattaactacgcactgcgcggctgtttctacctgcccattgctgaattggcggtggcggtgccggtgtttgtcgctctggtcatcgtgctggcggtgcgcaaaaagcggcccctgctgctgctcaccggcgcggggacgctgttctcactggtgctgctgtcgtttgtgcaggggcgttactcgccctaccgcacctgccaggtgtttgcgctgtttgtggcactggtggtgctggccgtgtatgagctgctgcgccgcgctgcggcccggcgggctgtgctgctgggcagcgtgcagctgctggcggtgctgctctgtctgcaccaggccatgtacctgaaccatctgctggccgtcgattaccagcgttccgaacaggaggccgctgtggtgcgcactctgggcaccgagcttgtgcgcgactacggcaccgacaagcccgtggtgctggtgggccgttacacgctgggggagaatatcacccggtacacgacggctgacccgatgcagcacccgctgtaccgcttcttccgcgagcacacgagctgggagagcggcgacaccgtcaagtacgtcgagaccaactgcaactcggtgctgaactggtcggtcacggccttctccgaggtggacgacgtctacggccaggcagcggagcacctgttccgctactatggctttgctttggacatgacccacagcgctgccctgcatgagcaggcgcagacctacgccgacgcccacgacctgccgggatacccccgggcgggggcgattgtcgattgcggggactatgtgctggtaaatctgcaataagaataccgcggaaaagtttgcgcttctccgcggtttttgctttctttctgtattttaccgatgttttcagccggtcacggtctcaaagggcttcgtcaggtgcccgttcctgtcggcctcgcaggcgcagcgggcctacttcaaatactccaccaaaaacgccactgtcgtctcccgcagcactttgtccagcgcggcggcggtggcggcgtcctcggatagatagttgtggttcccctcggcaaacggctccagcacgaccctgccgtcgggcaggctctcgacggcggctatcgtctcggcctgggtcgtgtcgctcaaaatgccctcttggccggtgtaggtcaaaagtgtcggcagggcgctctcccgcagggcggcgttcgggtcggaatcgcgcatctcggtgaacagcgttccgctgacatcgacgccccaggtgctgatgctgccgctcgcctcggcctcagcggccagcgcttccacggcggaaaagtcgtcgatgttcaaaaattccatgccgcgcaggcccgcgccgttggcggggctccacagcgccagcgccgtgatgccgcccctgcgctgcgggtagaggctggccagccgtccgcccatgctgtggcccaccagcgctgtgcggcccgtgccgtaggtctgctgcatgtaggtgatggcgctctcgacgtcgtcggtcatgttggacagcgtgtaggccgggaacggctcggtgctgttgccgcagccgggaaaatccagccgcaccgtcgcaatgccctgggcggccagatcgtcggccagcggcgcaaagtggccgtcgccgctgcggctgccggtaaagccgtggcagagcacgacgagcggcagctcctccccgcgggccagcttgccgggcagctgtaccgtggcgtaaatgtccccgcgcgtgccgggtatggtgacgtcctgcgctttcggtgcgggcgtcagcagaaaaagcgatgccgccacgcagagcgccagtgcggcaatgcagcctgcaagggtataaaaagcgcgtttatgcgtttgtttgtgcatagaattacctccgtaatgcctctattaaagcctatgcggggcaaaaagtcaagacgcacagaatacacacaaaaaaacaggtgacaaacccggggcggatgtggtatactaaagattacaaattggttaaaaagtcagacccggggcgcaggcgcagccttgccccggcttttgtcctgttttaccggaggtgcttgactacgaattctatagcgaaccgtatgccccgcctgctggctatgctgtttgtgctgctggggctgttctgcgcggcggcactgcctgcccatgcggaggactacgacacggtgctggaccgcctgtcccgcctgcaggcgctggcgcgggagtactcggccagtcaggccgacacgcccgacccgatcgagctgacgctggcctacacccgcacgggggagtacaactccacgatctggcagctgaccgccggtgtgcgcgacgccgggtttgagagctgcgtcaacagcagtgaccccgagttggcgtcgctgcagaatatgaacaccgtcgtcctgcccaacggagagagcatcgactttgggcacctgctggcgtcgatgaaccttgtctacaacggcatacccatcacgggcagctggggcggcgactgtgaggagctggccaggcagtattacggccaggccggcgatgccgcgggctacgccgaggcgatgcgcgcttcctttaataaagacgatgacggcacgctgagccgcttcagcaacggggacctgcgggcggacctcgactccgtcgtcgtcggctccaaggtgacaaaggacaccgacctggccgaggcgctgcgcagctactacgcgaatctgaccgagtatgaccgcgttaaagagttcatctcgctgagcttcggcacggtggatacatcgagcacggcctttgcggacgccgtgtacagcgctctgctggaggattccggtatgcagctgctgttctacatgaacggtatgtggaccgtcaagggctggcagatcaaggacgactacgcccccgccgtgcgcggcgcaacagacctgtttgccgagtacctggccaacgcggtcaatcacgagaagatcaagagcgagacgaatgaccgtctggttgccatgggcgggcaggcactggccgacgcgctggaggcgttgggcgacaccgacgccgcccaggccgcactgaccgccgccgaggagatggccaataacgcccaatcgacggtttcctccggttcggatgtggtctccgccgcgcgggagaatttgcagacaaattttaacgtgaaggtcttccagctgattttgctgattgcggcggggctggcagcgttcatgctggtgttcagcatggtgatgtttgtggtgcaccgaaaagaaaattgagtttggactgcgtgccgctctcttgtgggaaagagagcggcacgcttttttggttgggcgcggggcaggcgggcaggccgctttttctgttcacaccccgttcacattccgtatattcaccccgagttatccacggcgtataacggttatccaccgtggaaatgttgaaaactccgtggaaagcgtggaaaactctgccgcccggacccgttcaaaagcggaaaaccgggaaaatctacgtagaaaaaacgtttattttccacattttccacagcagcgctgttgaaaactgtgaaaagccggtgaaaacgcgaattgcactttttgcaacacaaaatacacattttgtaaataagggcttgcgctcgccgcgcgacagcgctataataaacctaaccatcacccgcactgctgtgcggcggtgcgcttgaatataaaagggagagtgcgaaattatgttggacattaaaatcaccaaaacgacccatccgaaggaaaagccgcaggacgagtcgaagctcggcttcggcaagcagttcagcgaccacatgttcctgatggactataccgcgggcgagggctggcatgacgcccgcatcgtcccctatggcccgtgggagatggacccggctaccaccgtgttccactacgcacaggaaatttttgagggcatgaaggcctaccgcaccgctgacggcaagatccagctgttccgccccgactgcaacgcgaaccgttttaatgattccgcggaccgtctcggcatgccccccatcccgccagaggacttcgtgcaggctgtcaaggcgctggtcgatgtggaccgcgactgggtgccccactccgacggtgcgtccctgtacatccgcccgttctgcatcgctaccgatgtgggcctgggcgttcatgccgccaagcattaccgctttgccatcatctgcgcgccctccggtgcctactacgccgagggcctcgaccccgtccgcatctatgttgaggatgagtacatccgcgccgccccgggcctgaccggctttacgaagtgcggcggcaactacgccgcgtccatcaaggccggcgagctggccgaggagcgcggcttctcccaggtgctgtggctggacggcgttgagaagaagtacgtcgaggaagtcggctccatgaacatcatgttcaagatcgacggcgagatctacaccgccccctgcgtgggcaccgttctgcccggcgtcacccgccgctccatcatcgagctgctgaaggactggggctacaaggtgcatgaggagcgtgttgccattgccgacatcatgaaggctgccgacgagggcaagctggaggaagtctttggcaccggcacggctgccgttgtctcccctgtcaaggagctggattgggagggcaaggttgcccacatcagcggcggccacatcggcgaactgacccagaagctgtatgacacgctgaccggcatccagtggggcaagctgcccgacaccaagggctggatcgttcctgtggaataa

SEQ ID NO: 178 - DNA, 10763 bp, unidentified
  source 1..10763: mol_type = unassigned DNA
  misc_difference 458: note = a, c, g, or t
  misc_difference 459: note = a, c, g, or t
  misc_difference 460: note = a, c, g, or t
  misc_difference 461: note = a, c, g, or t
  misc_difference 462: note = a, c, g, or t
  misc_difference 463: note = a, c, g, or t
  misc_difference 464: note = a, c, g, or t
  misc_difference 465: note = a, c, g, or t
  misc_difference 466: note = a, c, g, or t
  misc_difference 467: note = a, c, g, or t
  misc_difference 468: note = a, c, g, or t
  misc_difference 469: note = a, c, g, or t
  misc_difference 470: note = a, c, g, or t
  misc_difference 471: note = a, c, g, or t
  misc_difference 472: note = a, c, g, or t
  misc_difference 473: note = a, c, g, or t
  misc_difference 474: note = a, c, g, or t
  misc_difference 475: note = a, c, g, or t
  misc_difference 476: note = a, c, g, or t
  misc_difference 477: note = a, c, g, or t
  misc_difference 478: note = a, c, g, or t
  misc_difference 479: note = a, c, g, or t
  misc_difference 480: note = a, c, g, or t
  misc_difference 481: note = a, c, g, or t
  misc_difference 482: note = a, c, g, or t
  misc_difference 483: note = a, c, g, or t
  misc_difference 484: note = a, c, g, or t
  misc_difference 485: note = a, c, g, or t
  misc_difference 486: note = a, c, g, or t
  misc_difference 487: note = a, c, g, or t
  misc_difference 488: note = a, c, g, or t
  misc_difference 489: note = a, c, g, or t
  misc_difference 490: note = a, c, g, or t
  misc_difference 491: note = a, c, g, or t
  misc_difference 492: note = a, c, g, or t
  misc_difference 493: note = a, c, g, or t
  misc_difference 494: note = a, c, g, or t
  misc_difference 495: note = a, c, g, or t
  misc_difference 496: note = a, c, g, or t
  misc_difference 497: note = a, c, g, or t
  misc_difference 498: note = a, c, g, or t
  misc_difference 499: note = a, c, g, or t
  misc_difference 500: note = a, c, g, or t
  misc_difference 501: note = a, c, g, or t
  misc_difference 502: note = a, c, g, or t
  misc_difference 503: note = a, c, g, or t
  misc_difference 504: note = a, c, g, or t
  misc_difference 505: note = a, c, g, or t
  misc_difference 506: note = a, c, g, or t
  misc_difference 507: note = a, c, g, or t
  misc_difference 508: note = a, c, g, or t
  misc_difference 509: note = a, c, g, or t
  misc_difference 510: note = a, c, g, or t
  misc_difference 511: note = a, c, g, or t
  misc_difference 512: note = a, c, g, or t
  misc_difference 513: note = a, c, g, or t
  misc_difference 514: note = a, c, g, or t
  misc_difference 515: note = a, c, g, or t
  misc_difference 516: note = a, c, g, or t
  misc_difference 517: note = a, c, g, or t
  misc_difference 518: note = a, c, g, or t
  misc_difference 519: note = a, c, g, or t
  misc_difference 520: note = a, c, g, or t
  misc_difference 521: note = a, c, g, or t
  misc_difference 522: note = a, c, g, or t
  misc_difference 523: note = a, c, g, or t
  misc_difference 524: note = a, c, g, or t
  misc_difference 525: note = a, c, g, or t
  misc_difference 526: note = a, c, g, or t
  misc_difference 527: note = a, c, g, or t
  misc_difference 528: note = a, c, g, or t
  misc_difference 529: note = a, c, g, or t
  misc_difference 530: note = a, c, g, or t
  misc_difference 531: note = a, c, g, or t
  misc_difference 532: note = a, c, g, or t
  misc_difference 533: note = a, c, g, or t
  misc_difference 534: note = a, c, g, or t
  misc_difference 535: note = a, c, g, or t
  misc_difference 536: note = a, c, g, or t
  misc_difference 537: note = a, c, g, or t
  misc_difference 538: note = a, c, g, or t
  misc_difference 539: note = a, c, g, or t
  misc_difference 540: note = a, c, g, or t
  misc_difference 541: note = a, c, g, or t
  misc_difference 542: note = a, c, g, or t
  misc_difference 543: note = a, c, g, or t
  misc_difference 544: note = a, c, g, or t
  misc_difference 545: note = a, c, g, or t
  misc_difference 546: note = a, c, g, or t
  misc_difference 547: note = a, c, g, or t
  misc_difference 548: note = a, c, g, or t
  misc_difference 549: note = a, c, g, or t
  misc_difference 550: note = a, c, g, or t
  misc_difference 551: note = a, c, g, or t
  misc_difference 552: note = a, c, g, or t
  misc_difference 553: note = a, c, g, or t
  misc_difference 554: note = a, c, g, or t
  misc_difference 555: note = a, c, g, or t
  misc_difference 556: note = a, c, g, or t
  misc_difference 557: note = a, c, g, or t
ttactcgtccagaagtttctttaactcttctttatctgtaagaccaaccagacggtgtgcttctgctccgttcttgaaaatgatcagggtagggatgctcataacccggaactgctgtgcaagctccatgttctggtctacatcaagctttcctactgcatagccttcctctcccagttcctccacgattggcccctgacgcatgcatggtccgcaccaggttgcccagaaatcaagaagaaacggtttctcagattttaatacttcctcttcgaaattctgtgttgtgattacttttgccataattgatccatcctttctatcggtctattcttctctctgatttcacgccgcaattctactttttttgtctgtttctcacatactggtttgcactgagtcctgcctgagcgccatcgtaaactgcctttgccacctgcaaaagaccgccggtacannnnnnnnnnnnnnnnnnnnnnnnnnnnnnnnnnnnnnnnnnnnnnnnnnnnnnnnnnnnnnnnnnnnnnnnnnnnnnnnnnnnnnnnnnnnnnnnnnnntctccctctacagactgaattttcattgtattcaccgcaaaagaagatttcctggaaaactccggttctttcccatctgtgtaaatggtaacagaaccagccataggtgccagttcttctgcctcatgaagagcaaagtcgctgtttccaagcactgcaacatcctttcccctgtagaaaaatgcgtcgcacacagcacagtagctgacacctcttccctcaagttccttaatccccggaattgcaggagcctttcgtttgcttcctgtggcaagaatcacgctgatggtgtcaaaatcacctgctgttgtctttactgtaaaagtatcaaacccgccaatccccagcacctgtgcctccaggatccgcacgcctaatgctttcgcctgtgcaagtcctgtctcaaataattctttcccggaaacaggatgttccataccataataattctctattttttctgctttttccaaagcaccaatgccgttattgatcaccagtggatccatatttgcccgggcagcatacaaagctgcggaaattcctgccggtccggcaccgataatgattattttttccatatacttcagaatcacctgcctttcttatgattccaatcatttccacatattgttatttacaatgtaactgttcagtatcttcacagttatacccttcccgaaagggtacctgctaaatagttacctgacaatatactttctataaaagaaattcagacttttcatttttcgtcggttcttttatcgtctatagccttctctgcataagccagtccccagaatatcacagctggcatacacgccatcaacggaaacgcataacgcagaagaccgtttaccggagaagctatacagattgccacattcagcgccggggcagccaataccaggattcctttccatcgcttcctgtagatcagatatccaaggagcagaatcacgatccatgtgtaggttcccgcattgcagatctgcgcaagacctggaatctgactccacagatcggcataacgtttcagctgattccttgtctctgcggaaaagatctgatgataatctgactcttcaatcagcggctcatttactgtatagaagcggtaggagctctgcgcggtgcaattatgaaatgggtaataatatccatagctgttatgaagtgtggcttctatatacacccccggatgcctcagaaacatgctgaaccaggcattaaagtagcgtttcagcttcgccatggtaatatgtccgccgcgataagttgcctttaccggatcagacagttccggattatacaaatccgcaatctcatcatacttcatcaccccgtcaattgctttagcttcttcctttgtcacatcatccggatattccttcagatatctggctgtctgctgcattggaattgagaaaaatactctggatgggaaattaccaatgtatagtctcggtgccacttctttctgaagccccatgtagcccactgtcacaaggatcaccattccaactgcatacagtctgcgtttttttccaaggaaaaagaataacaggataaatgcaggaagcaccatgtaaagtccattatttctggtaatgcacatgccaaagccaaccagaaacagcactgtcagctgctgtcttaaagactgaccgcttttttcccgaagggtgggaatgcaacattccacatagattaccatgaaaagggaaaacagagcgctgaaacttccatccttaatgatcgtctgggaataagctccaaatacaggcacaagactgaaaaatgcaatacagcagatattgaaccatcttggtgctccccatgatttcagtttataacaaacagtggcataacataccgcataaatcagtgccagcacgccaaccaccatgaaaatgccccagttatcactgatcacatttccaattgtcatcaaggctcccattataaggcttaattcccatggatgcttgtttgtaaatctctgatttccggcaaacatattcagctgccggaagccatcatagggaacacttcctggccagaagatcaggatatagggaagccatcctgccaaaatcagcaaaaatgctaccagaaggtagtgtttttccataaattccggaaatttctttatattcctgctgtgcagaaaaggatgcttctctccatatgcatataaaagactgatcactatatcaaacagaaaaaagaatcctgcccatgtaagcaatgcaatcagaatctgatttctcccagctgtaaagaaggaccagtttccctgcacggaaaaggacattccgatcagcataaaaacagaaaacatggcggcgatcagatgcgtgatccatttacagcttctgcaaaaattcctccagcatttcatgtacaatgcaatgatcgcaatgagaaccaccagtttgtcgattccgattcctgtcatctctttcttgcataaagaaagaaatgtttctcccggattatctgccgaaccagcatacaagcccgtcatggaaagagcaaacactgttaaaatggcggcaataaccggcaaagtatatttttttaattttttttccaccaataaatcctcccgatttttatcacactgccattctaacattactatatatgaaaagcaaggcgtggtttttacaaggtaaatttttggaatttacagattttttgaaatttttgttgcgtcaaagcagtttctatgctattatatgcactgtaagttcagagaacttataaatgcccagatagctcagttggtagagcagaggactgaaaatcctcgtgtcgctggttcgattccggctctgggcattttttatttttcaaacacgctctggaaaaagccgcccccgaaggggcggcctcatttattttgtaagcatttcatctaatgtttcgttcagcatctctctggatgtcacctgtatcgcctgaattcctgccttcttcgctccttccacattatccatgcggtcatcgaaaaacagacactcttctgctttcaggctatatttctccagaaggatttcataaatttccctgtctggcttcagggcgtgaacctgataggaaacaactcccccatcaagcacatccaggaatttcgctcccttggtgtgcacatggaacagttcttctgagtagttggaaagcaggtaaatcttataaccattttcctttagcgctgcaaccttgtcccagacctccggacgctttacagccatctgctctccgtttcgaaggaaccagcccatcacatccacatcgtccgggtacttcagttcatactgatgaatggcttcctcaaggctcagccttcctccgtcaagtccctgtacccagatctcattgtcaaacatttcctcgccaattctcttcgcctcagcttcagaaaggccgtagtccctggtcagcatctcaaaccagcgatactccaccagtacatctccaacatcaaaaattaaattccgaatcattagtcttcataaccattcgggttattactctgccatctccaggaatcctcgcacatctcacggatgccattctcagctgtccagccaagctctttcgctgccttggaagcatcgcagtagcaggtagcaatatcgcctgcacgacgtggtttgatcgcatatgggatcttaacgcctgttgcagcttcgaaattcttcacaatatcaagaacactgtagccttttcctgtgccaaggttatagattgcaagtccaggattctcctcgatctttttaagcgcttttacatgacctttggcaagatctactacatggatataatctctcacgccggttccatccggagtgtcatagtcattaccgaatacgccaagctctttcagcttgccaacagcaacctgtgtgatgtatggcataaggttgttcgggataccatttgggttttcgccgatggttccgctcttgtgggcaccgatcggattaaaataacgaagcagcattacgttccactccggatctgctttctggatgtctgtaagaacctgctccagcatggatttggtccagccatatgggttggtacactgtcctttcgggcattcttctgtgatcgggatctgtgccggatctccatatacagttgcagaggaagagaaaataatattcttaacaccatgttttctcattacatctacaagagtcagggttcctgcaatattattctcataatattcccaaggctttacaacggactctccaacagccttcagtccggcaaaatgaatacaggagtcaatgtcttctttgtcaaaaatctggtcaagggcttccctgtccaggatatctgctttataaaatttaaccggcttgcctgtgatcttggaaactctgtcaagggccttctcgctggaattagacagattatccagaactactacgtcataaccggaattctgaagttctacaactgtatggcttccaatgtatcctgcaccgcctgttactaaaattgccatgatattttcctcctcgtttgctgcaaagttcccaccattcatcacaatcaataaacaaataaccttctgctgttttctcttttcacagcactccacggaatgttatccgcaaacagcaactgtgatggtttatgtccattctttgcaatccttattagtaacctggaaggcattttttatgcctgccaagtttagaataccactatttatatttttctacaatagctttcatctcagataatttctgttccatatcccacaccagcttgaactgggttcttgcacgatccagattctgattttctcgatggatgcggaagtaatgatctccctccagatggtctgccaggaaacgcattccacactcaaaggtcatcaggattgcacccatcggaagcatttccacctccaaatctgtgagggcaccgccgcagccttccagaaatccttttacatacacctcaaacagatgaaggtcacaggacactttggaaatatcctgctcatcctctgctgccgtgcttgcgccaaaacggatggaatcaccaaaatcattcagagaaagtcccggcattaccgtgtccagatcgatcacacagattcccttatgggtagcattgtcgatcatgatattattcagctttgtgtcattgtgcgttacacgaagaggcagcttacctgcatcctgtaaatccacaagtgtatgggccagctgctctctttccaggacaaactgtatctccttctgaacatcagccgcccgtccgcatgcatcctcttccacagcctttttaaaattggcaaatcgcttcactgtattatgaaaatccgggattgtctcatgaagagtatctgccggataatcagcaagaaggcgctggaaattaccaaatgcaagagcactctggtaaaaatcctcgtcattttccacctgatcaaagcaggttgcatcttctataaacagatacgctctccagtattctccctctttatctacaaaataaggagctccagcacggtcatttacgatattcagggtttcgcgctctgcatccccgccattttccaggattttcttcttcagccaggaggtgacaccactgatattctccataagaccaacaggatctttgaaaatctgcttgttcattttctggagaatatagcgcttctgtccggcttctgtggaaaatacagcacagtaagtctcattaatgtggccatttccaaatatgccaacctcttcaagtttaccgccaaaatcaaagctgttgattacttccatcagttcctgatggcttacatcttttgtttttcccacttatttttcctcccaaagcttctgaggataaagaccgtcatctttcagcttctgaattgcagcaactactaccggcttatcttctttataggtaactccgtaccatttgtccatagatttcagaactttgacagttgctttcttctcgccaagaagctcatctacaacaaatggaaggaaatattcgcatttcagaggattcttttccacattttctttcaggaataatgggaatctgtccttcagttctctcagaatgcttgcagaaaatccccacatattcatagacaccgtagcatccataggaagctctgtccatgtagcaccatcatcctcggtataagcagcaccgccatctctcttctcaatatgggtgcgctcattaatatccttcagaaatccctcttcgtctgtcacacaaacaccacgagccacatgtccattatctgtcaatgtgttctcaagcttgtagcctaccatcatgtactgataaatgccgtctttatcctgattctctgtaaggaaatcatatgccatcttaaatgcatgacgtccataataatcatccgcattaataacggcaaaaggtccatcaatcacattgatacagctcatgattgcatgtccggttccccatggcttcacacgtccttccggaactgtaaagccttccggaagattatgcagatcctggaatacaaattctacctggatatgcttactcatacgatctccgatagcagcacggaaatcagcctcattctccttctttataataaatacaattttttcaaaccctgcctgaatagcatcatagatagaaaaatcaatgataatgtccccgtccttatcaataggatcgatctgcttcaggccaccatatctgcttcccatacctgctgccattactaccaataccggctttttcatgttattgctgcctcccattttttatttgtcaaaacggatattcctgatccgctttgttgcttattcataacgataccagggacaaacaattgcccctggttcgatggtaacagacaaatctcttcttgtcaatttctatcaattatttcacaggaaatactccggttttaatattcccagaccgctccccagcacttttcctgacttcagatatttctttgcagctctctgaagagatgtgttctcggaatatacattcaggttccgctgtacctttccccaaatacgccattcagcctcacgctcatcccaatctgtttctacaatctgaaattgattctgaaacataatgatattgcttttctccggcaaaatgtctttaagccccggatagagcagccaggaatgacacagatacggcatctcttttccccagaaagccattccctgaataatggattccctcacactctccagtgtgagcttttcgccctgtggaatatgaatactgatgatcggatctcctttttttaccattctttctcctgctgtaaaattccagcgggaatccatgatttcaaattgcattcttccaagcctgaaaatggtaagcttcatatggcggaaaaaccagtcgtattcatcaattccatactctccatattccagaaaacagttttcacaccaaaaggtcagatcgtaaaaagtgtccctgaaaatttcccggctgattccccgcttttcataagcatcataggtttcggcgcccatgcggcataaataatacagaaacacaagccgataatccttttccaaaagaattttttcataaaacaaagctctgtctttctcatacaaaagcttattttcctgatattcttcctccccaatgcgtccggattcctgaagctcattaagcagatgcacagcctccggcagcatgttgatttcagctaaaaattcatttattttcattggcaaatcctctgagatttacaacctgtcccgttattcttgcttcctctgctgccagtgccatcagatgactctccacggaaacagcagcgtctgttttaccctttcttccttctcctaccatacggacaaaatcatgcatcatactcatatcacttccgttatgtccgtttgcaggtgtgtgaagctctattgtctccagattcccactgacaaaatctctgatctcaatagtacctgcatccatatcgcctttgatctcaccttttgttcccataagacggatccgtctagcacactggtctgtaaaggctgtcataaggaaggacgctgttacctgattttcaaactttatgtcaacggactggtgatctactactgtattatcacagtggaatacacatcttccgtaaggtccttttttcaaagcctccaatacatgctccggatctgtctgatcggtcactgcacgtaccagatagccatctaaattctccagataaaagcgtggtgcatagaaagcacattcatctctatgtgggcatccatccagacaataagcaggagctccttccggtgcattttcctctgtaaaataagacagttcgccaaaggaactaaggctttcgcatttactgtctgccagccacagcatgatatccatatcatgacagcatttctgcaggatcataggactggattcctctgcatttctccagtttcctcttacaaagctatgtgcctgatgccagtaacctacctcttccatatgctggatagtcataagtcttcctattttgccttcttccagaagttcttttaatttggaaaagaacggagaataccgaagtacgtggcacacggacagaatacggtcgtatttcttcgccatctctcccatttcaatgatttctttcttgtcgggagacatgggcttttcacaaagtacatgatatccctttttcagagccatgatcgtaggctcataatgcatcctgtccatggtgcagatcatggcacaatctgccagcttttcttttccaagaagctcttcatagctttcgaagcaaagctcttccggaatattgtgtctttttgcaaagctctctctgcgctctttatccggctctgcaactgccaccacctgaaattcatctggatggtccagtgcatactgagaataaacatgacctcctctaaggcctgctccaattacaatactcgttacctttttcatactcttttactcctgtcgcaaacgtatttttaaaaccgtatctttttcatctggcaatggataggtaaataccggatcatctccgaaggaaacaaaggccacatccggatacagcaccgtattccatgcttcccctctgttcacctcactgccgtctgcaagatatgtaacagattccagcttatccgggccgattccatacagcggaagtgctccaagcggtgtctcataaacatgagcataaatgatgtcacctttctgggtatatcttccccaatccggcttttccaatttggaaattccgcatccgtaaatgctctccccattttttttcatccattttccaacttctgtgagaatctgaacactctcctccggaatatttccacgggcatctggtcccacgttcaggatcatatttccacccttgctggcacattccaccagctttcttacaagcatctgaggggtcttatactgatggtcgaaattgcaatatccccaatgattattcatagtggcacaaagttcccatggaatgggttctcccttgtcatcacatactccttttggaggaatgatctgctccggacttgcaaaatcaccgctgtaaatcagtggtttctctgttgtaatgctgccatggttatcccccgcaccttccagacggttgtcaatgatcacatccggctgatactttcgaaccattttgatcagctctgtggctttccatttttctccggtcatatcgtcataggaaaaatcgaaccatagaagatccagcttgccataccctgttacaagttcctttatctggccatgcatatacgcaagatatctgtcaaaatcaattttttcatctttatatgccggattgtttcgcataggatgctgcctgtctccatatttaggaaaatccggatgatgccagtcgataatggaaaaataaagaccaacctttaatccttcctctcggcatgcatctacaaattctcttaccaggtctctgcctgcttttgtgtttgttgacttgtagtctgtcagtttagagtcaaacagacaaaatccgtcatggtgctttgctgtaagtaccacgtacttcatgcctgctttttttgccagacaaacccatttcttcggatcataatccacaggatcaaactgatcaaaatacttactgtattcctcaattgtcatttctttctgtgacatcat

SEQ ID NO: 179 - DNA, 25455 bp, unidentified
  source 1..25455: mol_type = unassigned DNA
atactgtgtaaaggtgacggagagatccttcacttccaaaatcgtatccttcatcttctccgcctcctattcatgaacactgcccggatccagaaacctgcacagcgcctgaccgatataatggaacagcaggaccgttcccacgaggaaaagtcccggaaacagcgccagccaccattttcccatcgcaaggtacttcatgctctccgacaggatcaccccgatcgccggactttccgaggaaagcccaaagcccaaaaatgtgatgctggcttcatgaaggatcgcatgcggaaacaggaggacaagtcccgtaataaactgcgggatcaggttcggcgccatatggcagaatgcgatataaaactttccttttccgagcttctccgcgatcttcacatactggctctgttttagctgcaggacctccccgcggatgagtctcgcgagcgatgcccagtgcgtgaacgcgatcccccagacaaccccccagaatccccgcccgcaggcgaaggagatcaggatcagaagcagcatatgtggaattcccatcacgatatcgatgagcatctgcacaatgctgtccgccgcttttccgcacacagccgcgcagagtcccataagaaatgccgcagctgcgctgaccgccgccgtcaggagtccgatccggatgcttaaagaaagtccggcgatcgtccgaacaaacatgtcccggcccatccagtctgttccgaatggatactggatacaaggcgcaagattttttcgcgtaaaatcagtctggatcgcagtttccttccagaagctcccgagaaccgcaacgagcaccagaagtccagctgccaggatcagcagtgcgaagctttttcttctgcgatttttcatcatctctgcttcgccccctcccggatcctcggatcgatcacaccgtacaaaatgtttgccgcaagatttcccgcggcgacgatgaccgccgtcacgactgtgatccctaaaagtaacggaacatcacttccgagtcccgccgtcactgccgcctgtcccagtcccgggtaggaaaatacctgttccacaaggacagagccgccgatgatctcactcaccgacgagaactgaagtgtcatggccgggagaagaatgttccggagtccatgacgtcttaagatcgcccagtccgactctccccttgctctcgcaaacaaaacgtaatcactttccatgacctcgatgagtttttccctcgtatgaagggcgatggatgagattcccgtgatgcttaaagccgcagccggaagaaccgcatgccggatcctgtccgcaatggagattgcccctgcatccattccgatcggaacgctgaatccgatcgggaaccagtgaagcttcaccgcaaataccatgagcagcaccatggccacccagaacgacggcgtactcgccacaaacagcgaatatcccgtcacgatccggtccatgactccgccgcgcttttttcctgcgagaacgccaaggaaaaagccgagaatgccagataacagccatgccgtaaataaaagccatacggagcttaagaccttctcaccgatgacttccgccaccggtctccggtacagaagcgaggttcccatgtttccatgaaggaagtctttcagccagttcagataccgctccaccggcggaagatccgttccccagtagcttctgagtcttgcgatctgctccggactcatggagccgagcgcggtctgaccgacgtttgtctggagcggatctatgggcgaagccgccaggagcccaaacgccataatactcacaaggagtaccatcagacacatccgcgctgcctgtctgccgatccacagacccgttctctttatttccatgtccactggtcaacgttgtttacgatcgaccagccatgtccgtgcggatgaagtttctgctccgcaacctgcagtccgtccttcacccagtataaatgatcaatattcacaagccagatccacggaagatccccatcctgggtgatccctgtcgtcccgtcccactgggcatctttccagagttcataggacttttcaaggtcgctctccgccagagcggcatccatgtacttgtccactttcacatttgcatacggggaatattccgcatatttcttttccggagccgtatggtaaatgttgtagagctccatcggcgtgtgcgcgccccatccccacatgagcggagtggactgtgcgcggtcgtaggcggtatcccagccgactccctcggtcgtcacgttgatcccgaatgcttttaactggtttgccgtgtcctccgcaagtgcctggcggacagaatcaccggtcggatacatcagggtgaactcggcgcggactccgtcttttgtgaggatcccgtcttctccggcttcccagccatcctctttcaggatcgccttcgccatatccggatcataatccgtctccgccgccgggttataccacggcatctggtcgcagacgctgtatgccactgtcccgtacccgtttaatacgtggtcgatcatctcttcccgattgatcgcaaggttgatcgcgcggcgcacacttacatcacttgtaaaatcgtttccaagcgccacgccgttctcatcggtctcccccgccgggatcaccggaaggttgaagccgcggttatcgaccgtcttgcagtcaaaaagggaaaatccatcgaccgtctggtcagagtatgccgccgatgtgtaagcaagatccacctgtccggaaagagccgccgcatacgctgcgtcctcatccataaataagaccgtcacggtcttcattttcggcgcatccccataataatccgggtttgcctcaaagatcacctgctgccctttgtcccactgtttcatgatatagcggccggaaccgatcgggttcgttccatagtccggaccataagcgtgttccgggacaatccccgtgatcgccatcgtgtacggccagatcgaatacggacggttcatatcaaactcgaccgtggtatcatccagcgctctcgcctcttttaacatcgtaaagtcattgaccgagctgttgtcccgcagtgtattgtaagtgaatgccacgtcctccgccgtgagtttctccccatcggtaaactttacgtcatcgcggatcgtcacggtccatgtcatcccgtcatcactgacattcatatctgtcgccaggtcataaccgatcgtcatatctgcctttgtgacggtcagcgtgctctggatcagcggctcatggacatgttctccagctccccagccgtaagccggatcaaatcctgcctccggctcggaggacggtcccatgacaacgatgacggagtctttcccgttttctgctgccgcgcctgtgttctccgcagcagcggaggagccggatgcggagctttccgctgtccccgcgtcctttccggaacagccggccatggaacataccatggcggctgccgtcagagctgccagtattgtttttattgttcgttttttcatgaatttatccccttttctgtcctgaaaccatgtgcaatgacacacttatactccagacacgagtgcaaaataataccagaaagaagcatacattctgtatgcgtcaaccttcctggtattgttttatcgactctttttacgatctgtatgtcatctcgctctgatgacgtacagatacgaatatttttatcgtgttctgtttgcaaaccgccttgggcgggctcttttccgagtatgggcttcagccgcataatagtaacattatagtaaactttttttcaaaaatcaatgtttttcctgtccatgactttgcaaaacactacccccgccgccgtactcgcgatcgtcgcgagcagcgccggtcccgcgatcgctgccggatcgacgctgccgtactggctgcggtaggcgatcatgttgatggggatcagctgcagggacgagatgttgatgatcagaaatgtacacatctcgttgctggcggtcccggccgggcgcttccatctgtacagtttttcttttgacttcggcttatccggagtctccccgtatgaccgtctccgctccccggatattccgcaatcttcttcccggtcctctctccagcaaatcccgcctcttctctcatcctccagctttcccagctcctccatcgccttcaatcccgccggggttgccgcccagccgagtcccagcatatttgcgatcatatttgtcgcgatatactgccctgccggatgtccgtcggggagatttgggaagaggaatctgatcaccgggcgcatttttttcgtgagcgcctcaatgagaccggctcgctccccgatctttaagatcccgcaccagaacgacatgatcccgagcatggtgactcccagagtcaccgcctcttttgccgaatccagcagcccattcgttacttcccccatatttccatgaaacgccgcccagaagatcccggcggccatcatcccagcccacagcgcatttaacataaaaagatcccgcatttctgtctgaagaggtgaaatccccgaaaatccggtaaaagaccggatccatcgggttatcacctgagtttcttcattctatgacagaaatgcaggatctatgaatctccgcaactttacaatactttatggattatgagctattctccgcacagcgccgccatgacttccggcaccgtctcgatcttctcgcagcggtacgcgttgctcccgcagaacagcagcgcgtcatcgatctttccttccgcggcattgataagcgccttcgtgatgcagtacggcgttgtcgccggatcacaatgctccaggcacctgaaacagtgctcgaccttgaccgggcctttcgcgacacgctctaagaacttgtttttgatcgcacgccccggcattccgaccggactcttcacgatcacgatgtcttcctctttcgcgttaatgtatgcctctttgtaagcgatatccgcgtcacattcctcggtggtcacaaatctcgtcgccgcctggactccttctgctccaagttcaaactgatgcagaacgtccttatggtcgaaaattccgcccgccgtgatgaccgggatatgctttttatacttctcggcaaagcttttcaccgtctcaatgatcccgcggacctccttgtcgtatgccggctcatcatatgtctccgccacatgatccgtatcggctccaagctccgtaagctgttccctggaaaatccaaggtgaccgcccgcgcagggaccttccaccacgacgaaatccggtgccgtatggtactttctgtcccacatccggcagatgacaagtgccgatttcacagaagaaacgatcggcgcgatcatcgtgcggcgctcttttttttctccgccgtccgcttcgctctccgcctccgcgacaaatttcggcatgtcgatcgggagaccggctcctgagatgatcacgtccgctccggcctttacggcctcttttacataggatgcgtactcttttgtcgcgaccatgatattaaagccgagaacgccctgcggcgctttctctctggcttttttaagctctgaatggatcgctctcaagttcgctgccatcggattttttccgaagtcatgatccttaaatccgatctgcgctgtggaaatgatcccgatgccgcccgcttttgcaacggctccggcgagcgaagaaagactgatgccgactcccattcctccctggatcaccgggcgcttcgccacaaggtttcctatttttaatggtttcaggatgtttgttttctccattctgcctcctagaacttccggaatctctcgtaacggcgttctgctaacgtcttcccaccgagcggtgtccatgtctcaaagaattcctccatggcatcttccatagtctttgcgatctccggaagtgtttccgggtctgccggttccggctccgggataacccgttcaatgattccaagttcttttaattcttttgcagtcatcttcatgacacgtgccgcctcatcggcgcgtttgctgtctttccagaggatcgaagcaaaaccttccggggaaaggacggaatagactgcattttccatcatccagacctcattggcaactgccatggcgagtgctccgccgcttccgccttccccgatcacgatcgagaggaccggaacggtgagatcggacatctcaaagaggtttctcgcgatcgcctcgccctgtccgcgctcctcggcttccagaccgcagaacgcccctggtgtatccacaaagcataccaccggacgtccgaaggtctccgcctgtttcatgagacggagcgctttccggtatccgtccggggacggcatgccgaaattgcgcttaatgttttcttttgtattctttcctttttcctggccgatcactgtcacaggcattccgtggaaggacgcgatcccgccgacaatggcgccgtcgtccttgcagtagcggtctccgtgaaactccataaagtcatcaaagatcgcatggatatagtcggtcgctaccgggcgatccgactttctggaaagcaggacggaatcccacgcgctgcggatcattccggcggctttttccgatgcatggcggactttctttccacgggaccggttctcctctgaagcaccttccccggaatgttctctctcccaggccgccagacatccgctctccggctttttatgaagctttaagatcatcgccagcgtttcctttaattcctcacgctttacgatcttatcgacaaaaccgtgctctacgaggaactcggctctctggaaaccttccgggagcttctgcccgatcgtctgctcgatgacacgcggtccggcaaatccgatgagtgcccccggctccgcaaggatgatatctccgagcatcgcgaaacttgccgtcacgccgcccgtcgtcggatcggtcagaacactcacatagagctgtccggcctcatgatgtctctttaacgcagcggacgtctttgccatctgcatcagggagaccatgccttcctgcattctcgcgccgccggagcaggcgaagaggatcaccggaagtttttccgctgtggcgcgctcgaccgcccgtgtgatcttttctcctacattgtggcccatgctgctcattaaaaatctcgcatcgcagacgccgacaaccgtctcttccccgtggatccggcattttccggtgacgatcgcctcgttgagtctcgatttttctcttgccgccgcaagtttcttctcgtatcccgggaaatttaacgggttggagacttccatctccttgtcccactcctcaaagcttccctcgtcagcgatcatctcgatcctgcggtacgcatggacacggaaatatccgccgcatttcggacagatataaaagttcgcgcggacatcatccgtatagatcgattttccgcacttattacattttttccacagaccggcaggaattaccggtgcgtcttcctgctctgctttcgcagattccttttcttccgcgcggtatctcatatcgatctttgtatatgttttcttaaacatatcccttaacatacaaaaaagctcctttccagtctatggaaacacaatttttattctttacaatactccggaaaatgggacgggataaagtttgtatccacctcgcccgcctggaaatccggatcactgatgatgtcatactggaaatccagatttgtgttgatcccctcgataacaagctctccgagtgcgctgcgcatcttcgcgatcgcagacgcgcggtccttgtcgcggacgatcagctttaagatcatggagtcatagttcggcgggatccggtaattattgtaaacagccgtatcaacacggactccgcgtccgcccggaagatgaatgtctgtgatcatgcccgggcacggcataaagttcttctccggattctccgcgttgatcctgcactcgatcgcatgcccggagatcctgatatcttcctggcgcacagagagcggctcaccggaggtgatcctgatctgctccttgatgagatccatatcggtgacagactccgttaccgggtgttccacttggatcctcgtgttcatttccatgaaatagaaatttttctgtttatccaaaaggaactcgatggttcccgcattctcatatccgactgctttcgccgcccggaccgccgtctcccccatctttttgcggagttcatcggagatcgccgcagacggggactcttcaaggactttctggtgtcttctctggatcgagcagtcgcgctcgccgagatggacgacatttccgtatcggtcacccaggatctggaattcgatatggcgcggattctccacaaaccgctcgatgtacatggtattgtcggaaaatcctttgaccgactccatctgggcgtttaagaaattggactcgaaatcttcctttgatcttgagacgcgcattccttttccgccgccgccgctggacgccttgatcatgaccgggaaaccgacttcctttgcggtcttaagaccttcttccacggtgtagaccggctctttgcttcccggaacgaccggaacaccggccgccatcatggtctttctcgcctcagatttatttcccatcttgttgatgatctcggcagatgggccgataaagcggatattgcacttttcacagagctccgcgaagcgggcattctcggacaaaaatccgaagcccggatggatagcatctgccttcatgacaacgcatgcggttaagatccgctccatatcgagatagctctccgtggacggcgccggtccgatacagatcgcctcgtccgcaagaagtgtgtgcagtgcgtcccggtctgcctcagagtagacggcaaccgtcttgatccccatctcccggcatgcccggatgatccgaacggcgatctcgccgcggtttgcgattaaaatcttctgaaacatctcttcaccagtcctaaccgatcataaatgtgagttccgcagataccgcgactttgccgtccacggtagcgaccgcctttccaacaccgaccggtcctttctgcttgatgatctcgcattccagacggagcttgtcgcccggaactactttcttcttaaactttacattattcattgcgccgaaatacgcagtctttcctttgttttcctcaacgcttaagatcgcgacagcgcctgtctgtgccagcgcctcaacgatcaggacgcccggcattaccggctcctgcggaaaatggcccgcgaaatacggctcattgtatgtcacagatttatatccgacggctctcacgcccggctccagctcctccacacaatccacgagaagaaacggatgtctgtggggaatgatttcctgaatttctttgattcctaacatgatttttatcctctatccaatctttcacagcccgcgcggcaatgcgcgggccgccaaacggttatctttataattaacgaatccggaataacggctgaccatactcaaccgtctcctcgttcttcacaaggatctcctctacgattccgtcatactcgctctcgatctcattcatcagcttcatggcttccacgattccgatgacctgaccttttttcacggtatctccgacttttacatagtcctctgcgtccggtgccggggaggaatagaacgtacccacaagcggacaggtgatcactttctcggagattccggaaattttcttttccgcattttcaccggagacctgctccatagcggtcacatccgcggtctggatcatggaaccctgtcccgggacctgcataacgaccggtgtctgcgccgccgcaacgattttcttttcccgcttcatgctcagtttccagtcgccttcctcaagctcgaaaccggtcatgccgttctctgacattgccttcattaattcaatgatctcttttacttccatcaccgttctccttactcctcaaactttctgacaagcaggcacgcattgtgtccgccgaatcccagagagttcgtcaaaactgtctttacttccatggaaacgccgtcgccctttgtgtagtcaagatcgcattccggatcgtctacttttaagcctgctgtggcatgaacgaagccgtcctggatggattttacacagtcgatgaactcaacgccgccggcagcgcctaagaggtggccgatcatggattttgtggagttgatctttactttatatgcatggtcaccaagcgcaagcttgatggcctttgtctcgaataaatcgttgtggtgggtcgctgttccgtgggcattgatgtaatcgatgtcctccggcttcattcccgcgtcagcaattgcgtattccattgcctttgcggcaccgcttccgtcctccgccggagaagtgatgtgataagcatcgcctgtcgctccgtatccggctaactccgcgtagatcttcgctccgcgggcttttgcatgttctaattcctctaagacaacgacacctgcgccctcgcccatgacaaaaccgtttctctcaagatcgaacggaatggaggcgcgctccggatcctcagaggtggaaagagcggtaagtccggagaatcccgcaacgcctaacggtgtgatgcagctctcagttccgcctgcgaccatgacctccgcctcgccgtgctggatcgcacgcatcgcctcaccgatggagttcgtaccggacgcgcacgctgtcacgacgttgatgttctttccctttaagccaaactggatggacacgtttcctgctgccatgttgctgatcatgagcggcaccagaagcgggtttacgcggtttggtcctttttccagaagcttcttatattccttctcgatgatctgtaagcttccgataccggagctcacgcagacaccgacacggaacggatcttcctttgtcatgtcgagggaagaatcctccagcgcctggcgggctgccgctaccgcaaactgtgcgaagcgctccattctccttgccgccttcggatccatatagtccttcggctcgaagtccttgacctctgccgcgagctttgctttataatcggtcgtgtcaaaatagctgatcggtccaaatccgagtttcttctcttttaatccgttccagaatgtctcaacatcgtttccgatcggggtgatcgcgcccattcctgttactacaactcttctcatgcttttcgttctcctgttctaattatgctatcatccacgccccgcgcagatgataaccgaaatatccgctgtccggctgtgtggccgaaacaggcgctttttccaactgtcttttacatcgccatgccgccgtccacatgaagaacctggccggtaatataagctgcctcatcggaagcgagaaatgcgactgcctccgcaatgtcttttgtctcgccgaaatgctttaacggaatctgctcgcccatggctttctttacatcctccggcagcacatccgtcatctctgtacggataaatcccggtgcgactgcgttcgatgtgattccgcggcttccaagctctctcgcaacggatttcgtgagtccgatgatgccggccttagatgcgcagtagtttgcctggcctgcatttcccatcactccagaaacggaagagatgttgatgatccgtccgcctctctgctttaacatctggcgggagacatgcttgatgcagttgaatgcgccctttaagtttgtggcaataactgcgtcaaaatcgtcctcggacatcttcatgatcaggttgtcttttgtgattccggcgttgttcacaagaatatcgagacggccatatttctttacgatcccatcgatcatttctttggatttttcgaaatcactgacgctgcactgcatgctctccgccattccgccgtttgctgtgatctcgtttacgacttcctctgcttttgctgcggagccgttatagttgacgatgacggtcgcgccgtatccagccagtgtcaaagcgatctgacggccgattccgcggcttgcgcctgtcacaagagtaaccttccctgttaaattcatgtttccctccgtgtttctatcagtcagccgccagatttttgtctctgacgacattatttactaatttctctttcgatcacttagttcagcttctccagatcctcaaatttctcaatattgatgactgtcgcttccctgttgatctttctgataaatccagctaacgtctttcccggtccgatctcaataaaacggtcaacaccgtccgccagcatagtctccacgctctgctgccatctgacagaagaagatacctggcgtgttaagagcggctttacatcctccgcctttgtcacataagcggctgtcacattcgccacatacgggatctttggctcagataccggaatattctccagaaaccttccaagcttctccccggcttcctctaaaagataggagtggaacggtccactgacattaagcgggatcacacgtcttgcacctgcctcttttaacttcaccgccgcggtctccaccgcctccttgagaccggagatcacgatctgacccgggcagttgtagtttgcgacctgcacgttcgggatctcgtccacaacggcattgatctcatctgccgtcatgccgagaacagcgctcattccgccgactccagccggaactgcctcctgcatgaggattcctctctcccggactgtgcggatcgcgtcatccgccgtcataacgccagctgccaccagtgcacagtactcgccaaggcttaaaccagccgccacatccgcatggatgccgcgctcctccataaccttcatcatagcaacgctcgtggtcaccattgccgcctgcgtatactccgtgatgtccagacgatcatttttctcaaaacataactccggaacggaaaaacctaaaagctccgtcgcacggtcaaatactgcctttgcagtctccgaattttcataaaaatcctggcccatgccgcatacctgcgcgccctgtcccggaaaaataaatgctgtctttcccatgattctccttacttctgacatccgccaagcagcttatctgcctgctccatcatctcatcgatcatttccttgcatgtctgctctttcgttacaagacctgcgatctgacctgccatgacggttccatttgtggtatcgccttcctgaacagcttttctgagggttccaagtgtcagatactcaagctcctcaaaggattttccttctgcctcaagtcggttatactctcttgtcatctggtttctcaggcagcggactggatgtccgtgggttcttcctgttaccgcagaatcgatgtcctttgctttaatgattctctgcttataattttcatgaacgatagattcctttgcgacaacaaatcttgttcccatctggactgcctcagcgcccagcatgaaagccgccgcgattcctcttccatcaccgatgccgcctgctgcaatgaccgggatggataccgcatcaacgacctgcggaacgagagtcatggtggtcgcctcaccgatatgtccgccggattcggttccctctgcaacgacagcatcagcgccgccgcgctccataagcttcgcaagagccacagaagcaacgaccggtatcacgatgatccctgcttccttccacatcttcatgtactttgcaggatttccggctcctgtcgtaacaaccttcacgccctcttcaacaaccaccttcgccacatcatccgcatacgggctcattaacatgacattaacgccaaacggcttctttgtcagtgctttcgccttacggatctcttcacggacaacctctcccggcgcgtttgcgccgccgatgaggccaagacctcctgcctcggaaacagcagcagcaagatgatgctcagcgacccaggccataccgccctgaatgatcggatattcgattcccagcatttctgtaattcttgtcttcatttttattgctctcacttcctgaaatctatctgtcgggtattgcccggaattatctttatatcagtaaaacgcgtcatagacgcgtttttactctggtttattcggtttgattattcctcaacacctttatcttttaagtacttcataacatcgccgaccgttgcaagattctgaaggtcctcagccgggatctctacggaatactcatcctcaagagccataacaagctcaaataagtcaagggaatctgcaccaaggtcatccttgaaggaggttgcctctgtgatgctgtctgcgtctgtgcttaactgctctgcgatgatttctttcattttttctaacatgatttgatctcctttaaatgttcttattatttgtattttatgagtttttacaattttttgtttttttaaattatttcttattatgtagataatttctcctgctttccggatgaatcagatatctaccactccatgagcactgcaccccaggtcattccggctccgaagcctgacatgataatcttgtcgccccgcttcagcatgtccttctggatcatatcgtctaacagtaacggaatcgatgccgttgatgtatttccaaactgaccgatcgtcatcgggaatttctccatcggctccttcagacgtctggccgctgcctcaatgatccgctcattcgcctgatgaagaacataatatttaatgtcttccttttttgtcccggtccgctgtaaaagctccataacgctctccggcaccttccgcaccgcgaacttgaagacctcctgtccgtccatggtcatgaacccgagctccggctttgtccctgtgaggaagtttccaacggttctggacgtgcaggcgaggacatcacccttcgttccgtccgcccccatcatcatgtcgatgattccgttctcttccgcttttaaaacggctgcccctgctccgtctccaaaaaggacgcaggttccgcggtcattccagtctgtcactttactgagggtttccgccccgatgatcagcgccgtcttgtagattccggctttaaaaaatccttccacgatattcatggcgaaaataaatcctgcgcatgccgccgagatatcgaaggcaactgcattcactgccccgatggccgcctgaacactgcaggcatcgctgggataattccggtccggggatgaagtcccaagaatgatgatatccagctcttccggggcaactcccgctgccgcaagcgcccgctcagccgccttcgccgccagatggcgcgttccctctccggaggagatccggcgttcccgaatcccggtccgtgtccggatccactcgtcattcgtgtccacgatcttcgccagatcgtcgttcgtaataatattctccggcacatacgcgccgattccagcaattctggctgtcatcatcttctaaatcctgccatttcattgatgcgaagaaattcttttccccgcagtagtttttaatttcaaatagtttgatattcaaaatgtttgattctaatggtaatagatgtctgctgttttgtcaagtgaatttttttaatccggcccggacgttcccttccatgatatatttctgctttctgcaaccgtttttcttctcttctggactggttccttccgcctttggctacacccacctcggcgactgcatgatcatcctgaccgtctgcttatttggcacaagacgcggcgtcctcgccggcgccatcggcgcaggtctctccgattttcttggcggctacgcggtatgggttctcccgaccatggtattaaaaggtctctgggcgttcatcgccggaacgattgcctacaaacttctgccgaactttaaatattcctggctcgtcggtgctatcgtcggcggcatcgcccatattatcggctacacgctcgtaaagatcccgctctacggcaccgttgttgccttcggtgaaatgttcaccctgtccatgcagaccatcgcaggaatcgtcctcggaggcgtggtctacacgatccttgtacagtccccggcgatccgaacattaaaggcaaaatttgcgtaaaagaaaaggtgcaaaaatgctccgttctcctaaaacaatcatgtaattgggagaacggagcattttatattacaactattatttcaatcgctgtcatttaaacccattgcgccacactgctattgccaaaataatagcgcaggcatatcttaatatttcagatacatgataaatcttatttccatttacctcagcgccctcctgcgaaaatttctgctcaataaaccctctgatacctatttctacaagaagtgccattactaatcccagcgaaaacattctcataccctttgtatagctatataacgataataaaaacactactgaaacacctaagttacataatgttaaccacatttttttcttcatataaatcgccccccgctatgctgattgtttcagtttcatctacttgaattatatcattccccccactattttcaatcaatatttatcttctcgccgcattattaagacatttgttatttttttgttatttgtctgtaattttttgcaaaaaagaagacgtaccacccgtcatctcactcaataaccagcgacacatcttcttctcgaattccctattcctgctcatccaaaagcatctgatacacatcccgctttccgatcccgcggtccttcgccacaagcttcatcgcttccttcttctcgattccctgtgacagatagacgtccatgtgttccgtgagcgacatggcttcccaggtctgttctttctcttttttgatctcctccgggctctttccctcgatcacgatgacacattcgccccgcggttcctccgtctcaaaatgatctaacgccccctgaaacgtggttcggaatgccgtctcgtacttctttgtgagttccctgcagatcgtgatcctccggttccccagcgcctcaagaagctcttccaaggtccgtaccagacggtgcggcgcctcatagaggatgatcgtccgtgtctcagactttaattcttccagaattctctgcttttccttcttatcggacggcagaaacgcctcaaacgcgaaccgtcttgtcgccattccggagatcgtgagtgccgtgatgcatgccgccggccccggaagagaagtcagctcgattccggcctcatagcactgctttacaagctcctcgcccggatccgagatccccggtgtcccggcatccgtgatcagtgcgatattggtgccttccttcatcttctcgacgagatatctcgccttttccaccttgttgaactcatgataactggtcatcggcgttttgatgtcaaaatggtttaagagcttgatgctgtgtctcgtatcttccgcagcgatcagatcgacctctttcaacgtatttaacacccgcagcgtgatatcgtccagattcccgatgggcgttgcacataaatataattttccctgcatgaccaattcctcctgctgcccgatgctgctttttcaccgacagctttttatctcaacatttccgtaacgcgagtttacagatggttccattccggcttggcaagatccgcgactattcctacattatccggatcttttcgtttagaaaattcctgtcatttttccgtctcatccgcctaaagaaccctcacaacaatttaatacccgtaaatcgaatagatctcatccgtatacacgcccggctccttataaacgatcaccggcgcctcgaccttcatccaggctccgccgccgcggaccgcctcaatgaggaccatgttcgcgtccttatccttgaacggatggaccattttcatccgcttcggctccagcttatactgcttcatcgtcccgaagatctcgatcagacggtgcggccggtggaccatatacatccttccgcccggtttcaggaccttcgcgccttcccgcacaacatcctccagcgtgcagaggacctcatgtctcgagatcgccttcacttccgtcgggttctttaacccatgagcgtcattcatatacggcggatttgtcgtaacgacatcaaaggaagccgctccgaaaatccggctggcttccttgatatctccatgtacgatctcgattttttcttccagatggttcagtttcacactccgctctgccatctcggcgatctcatcctggatctcaagtgccgaaaaatgttctccctgcgtttttgcggagagaagaagcgggatgatccccgttcctgttccgagatccagcgcccgctctcccggtttcaccgccgcaaatccggaaagcagcaccgcatccattccaaagcagaatccatctgtcttctggatgatctgcagaccatttctctgaagatcatccagccgttcattttcctttaactcaatcgccatcgagtttcgatttcccttcttttttctccagtgcctctaactgctttaactccgcatcgttggatgattgtttttcccgtctctttttcggccggaatttcagctgatccaccttatactcacggatctccttctcatcgttatttaccgtcacgataaccttcacaagctggcgcagaatgctcacactgtggacctcgccctttaaaccgtcgtctgttgtcacatagtcgccgatatttggaagtcttccgtttaactcctcataagtatcttcctcgtactttaagcagcacatcaatcttccgcagacaccggagatcttcgtcgggttcagggacagattctgttccttcgccatcttgatggataccggaataaactcagaaagataggacgcacagcaaagcggtcttccgcagataccgattccgcccacgatctttgtctcatcgcggacaccgatctgtcggagctcgatcctcgtcttaaacacggacgccagatcctttaccagctcacggaagtcgatccttccgtctgccgtaaagtagaacaatactttattgttgtcaaacgtatactccgtgtcaatgagcttcatactgagattgtgtttcttgatcttctcaacgcagaccttgaacgcctctttttccttttccttgttgcggcgctccgtctcctcatccgccggtgttgccatgcggatcacggatttcagcggctggatcacctttttatcgtccacctcgtgagttccgagcaccacatatccgtactccacgcctctggccgtctcgacgatcacatgatcgcctgttttgatctcattttcaccagggctgaaataatatacttttcccgctttccggaagcggatcccgattactttcgtcattctttgctccttatgacgggttcttcatggtcagcaggagtaattccatcgccaattccatatttacgtttgcgttcaaacgtgttctcgctgtgtcgatcgccgcaaggatcgcttccagaccggcatagtcgactttttctcccgtctcattgatcattttatattcatctttgaagatcagcaggttcatgtcctttgtgaccttgaacatgagcacgtcccggtaccagagctgcatcagatccagcacctcgtcgatatcaaagttctgctctttcatctcgcggatgcaatctaaaagcatggaaatgtccatcgtcctgacattctttacgaggaccatgaccttctggaaaagctccttaaactcatcagaagatgccagatggatcgctttcccgagatttccccttgcaaacgcggtgcagatatctgcgtccttctccggaacatggagattctgcgtcagatagctcttgatcgtaaaatccttcagcggctttaatttcatctgcacacacctggagaggatcgtcggaagaaacgcctcctggttcgtcgtgatcagaatgatgaccgcgtaggacggcggctcctcgatcgtctttaacagggcattctgcgcctggaccgtcattttttccgcctcatccacgatatagatcttataatagctgctgtacggacggatcatgatcgtatcattgatctgttcccgcacatcatccacgccgatacttcccggcttttcatgcgtcacatagatgagatccggatgatttccgctcatcacctgcttgcaggaatggcatatcatacacggctcacttccgcctttctcgcacaggagcgtcatcgcaaacgcattcgcgatcgattttcttcccatgccggcttctcccgtcaggatataagcatgtgagatcttatggttctggatcgcctttttaaagtgatctttcaccatctcattcccgaggatctcttcaaatcccatgatcttttcttctgacatagccgcatccctcctcatcctgttggttccggcagtgctttttacgccggagcttcccggttcgaacagaacatttaactgttcccgctaacggtgtttccattttatcttaccacaaaataacgcctataaaaagttatttatccaaatcccttaggatttcttccacgcacatttccatatccgtattctgatatctcttcgtaattcccaggcgttccagattttcctctgaaaaatctttttcgtctgcaaggtatctccggcagacttcccgataattcggctttttctggttttcctcgcgtttgacggccctgagaagccggatcccatccgggacctcgatatagaccggaaccatctttcccgctttaaaataggcacacatcttctcgtaagattccagtgtcccgatcataagacaggactcgtcgtcggcaacatcaaactgcccgtcatccactgtatagtaagtccacggaccggcgatcgtctgataagttctcgactcgatcacctttccggaagccagctgccgctccagctcctctcgaccggtaaagaaatattccactccgtccgtctcgccttcccggatcggtcttgttgtatacatcgtcaccgtccgcagctttggtctccgtttcagtatttccttatacagtgtatcttttcctgtcgcactctttccaagaagataatatatcctgcccatttgtttctctcagccttctgtattataatttttatcccagtcagataagacttttcgatcgaacttttacaaccacttttcaggttctatcttttcattgtatcaaaatcagaggtctcgtgcaaccgttgtttccatcctcgctcgataattcttatccttttaaagtaacaaaaatttgtctcctgggaaatattcttgcctgataagcctcttcatttcggatgcagccacctcttatgcacttgaattactaacgttttcctttttcctcagcatcctttatgaacaagccctggcgtctgacatgttaagatcacgtccgtatccggatcagccggcccctggacaagaagtcctgctgccttgtacgccacgatcttctccacaatcgcatccgtgaagacctctcccggcgcgatgatcgggattcccggcggatacagatacacaaactccgcagatacctttccgaccgtatcctgaagcgctgtgcgctccgtatcggcattcatcgcctcgcagatgagcattctcctgactgggtgcaaaactttggattccgtgacttctggagtctcacatctttctttttcctttgactcacctttttctttttgctgttcaggctccacgcagtgtctcaatgccccgtcaatctccagcagcgccgttccaagccgctcaaatccttcttccgtgtccatcagcgacgtcatcgcgatcacatactccggcgctgtcatctccatctcaagatggtattttctcctcagtgtctccgccagctcttccccgtgaaactcctctgcgcgcatcgtggaaaccacgatcttcgacggatcccatccgaccaccgtccgatatttcccacagatttcccggtccaggatctcaagtacctgaagtccttccatccgctccataaagtgctccagtctttcctcataccggaccatctcatttcttccgtccccgtccatataccagatgcaccgctccatcccagccataaaaaggtatgacgggctggacgtctgaaacatggacaaatacctcgaaactctgtcctgatccacaagttttcccttcacatgcaggattgccgtctgggtaaaggacggcagcgttttatgaaggctctggatcacaagatccgccccgtattccagcgccgatttcggaaatccgtgacactgatctgcatactccagatgcgccccatgcgcctcatcgacgatcaacgggatcccgtattcatgagccgcatccgcgatcgcccggatatccgacaccacgccttcataggttggagatgtgatgagcactgcctggattctcgtgatttttcctctcacatcccccgaatttcccgcacagcgcatcgcatccttttcaagcgcttttctcacgtcctccgcacggattcctccattgatcccgaattccgtgatctcctccggatacagatattcagcctccagccggttcaggcagatcgcatggtacaccgccttatgacagtttctcgctgtcaggatctttccgccgttttccgtagtcgcaaaaactgcacttaaaatcccgcatgtactcccattcacaagataccaggaccggtccgccccgtagatcgcagccgcctcatccatggcgtctttcaaaattccttccgcatgatgcaggttgtcaaacccatcgatctccgtgatatcgatcccatacgggtccggaaatccccccgggatcccatccggaatctcccgtcttttatgtcccggcatatgaaatggatacgcatccgatcccgcatattctgtcagccgttctaaaagtcccggctgtttttcttttctgtaattcaaaatttttattctcctgtttcccatctgactgcaaacgaactggaaattgcccgtcaaattcgaatccacattcgttataaagtatttttctctttttgctccgagagaagtttctcgatctgcgactgtctgataagaatcgcattcaccttatcatggaggtcttcaatcatgatctcggttttcaggtttaccttataatcgttttcagcacgccggcggtctttttcctcctgtcggttctgactcatcatgatcagcggtgcctgaatggctgcaacgcaggacaggacaaggttcagcaggataaacggatatgcgtcaaacgcttttgacgcaagaatcgtgttgatgaccatccacaggatcagcccacctgtaaaggaaaatataaacgcccaactgcctgcaaattttgcgatcgtgtcagctgcccgctgcccgagtgtgtacttttctttctctttttcaggactgactgaaatcttactgtctgctaaaaggttcaaaacttcctcatccgtcatatcgtgccggatgtccttcagcacttctttcaataattttctgttctctttcatgatgatactccttccagttcgatcaattggtaaaatttatttgcgcagccccccccccggaatagttccctgattttttgtttataaatctgacaagtagcgcatttgacaacagcataacaaccacatatatacccaacggcagaaacatgaacggtactacatccaataatgcactccagtcttctttgttcacccagtctaatatctgtctgtattccataagaagtgtcaatgctacaaatgccggcttactttacaagctccgcttttacctccggaaacatataccaaatttccgcgacttcatccccggctgcctgataaaagccgtagctgccgtaaaccattgaatcgcatccgtccgatgccagtctcaccgttatctgtgtcccatccgcctttgtaagcgtcaggatcccgttatacggacagtctttctcttgatcaaaagatgcccccgacaggatctcctccagcctttttaacaattccggatcctgcagcgtctcggatattcccacgacttccgagtcagcttccacgtcagcagaatctttgctctccaagcctttctccagctctttggaaatcgggatcacctcaagttccgcacttgtaatttctttcatgtcttccgttcctaccgtctgaaattcacatttttcctcagcaattcttaatgccggaaccgtgatctcatccggatccgggttttctgactcataaatttcctggcttgccgcatatgtgatcccatctattccatacattaccggatcaatgatctcatccgagccggtgatctctttctcctgatcctcagtcaaaggaatatattcctccagtacctctgcatcttcaaatcttcggacggtaagatatccgccgtcctccggtggtgacatccgcacgccgcgctcctttacagtctccagataccggaccccctcgtcaccgtcacagaggctgtatgtaaacgcttttctgagttcttccggttcttctattccgctcggaacaaaaaacagaacatcctttgcttccgtgtaatacatttcataaacattttcgaaagtatatactttttcaaaaatactttcatcctcgttccacttttcagcctcgatcacatcatcaatgctataaatgctgagatcttgcaacggatcctccttgccttttcgaaatcccaagacatacccgtaaccattttccgtctcccgtccgataaaatcatacgcatcccggatctctccgccgcaggatgctgccttttccggatccatatccgaaaatttatgatctccatcaaaggattccaattctgttacgatccaccgacgttcttcctccgaaagtggctgaaaggccagatcttccctctgatcatctttttccgtttcaggactatttcgttcctctgtctgtggctcactcggatcttctaccggaacaaaagccggcgaacaccctgtcagccagattcccagtcctaaagctgccgccatcatccaaatctttttcaccttgccaccttcttttcaaaaaactgaactcgcctgtcactgaacttgttaccgatattctatcatccataattttttcacacaagcgagcacccccatatttaaggaaactgtaaacatgttatcattttgttattttcataaacaggatttttcatcgtaaatttcattccagtatctcttctgtaactatcggcagagtatgatataatatatttgttcacccttgtgtatcttttggatacagcaatacaagcgtattttcatcgttcaatacgccagaaagagaggatcctatgaaatacagaattattggcacaactatccctgcagttgagatcaaatttgatgctccaggcgaaactatgtacacacagtc

SEQ ID NO: 180 - DNA, 24615 bp, unidentified
  source 1..24615: mol_type = unassigned DNA
aatttcttatgtgtcagatgataaaacggttgcaagcgtggatgcttctggaaaagtctgtggaataaaacaggggacagcacatattactgttcttgcatcagaaacggaattgtatcatgcatcagagacaatcgtcacagtaactgtgaagcccaaaaagacacagagtaatacagatccggggaaaaaaccatcggataacgtgtcgaaggatgattcacagacaacagaggataaaaaaccttctgatggcggcaacaatacatccgggacaacagatggtcagcagacaaagaagaaacagaccataaaagcaaaaaatatcacaaagacatacagtacaaaaacattttccatcggagcaaagacaaatggtggaggtaaattaacatacaaggtggcagataaaaaaattgcgaccataagtaagaccggaaagatcaaactgaaaaattatggacagacaaaaattacgatcaaagcagccgcaaaaggaaaatataaggcagcaacaaagacgatcacattaaccgtaaaaccggtaaaggtaaaagtaacctctgtaaagcagctaaaggcaaagacgttacaggtaaagtggaaaaaggataagaaggcatccggttatatcattcagtactccacagataagaaattcaaaaagaatgtgaaaaaagctgttgtcacaaaaaaccagaccgttacgaaaaagatcacgaaattaaaaccgggaaagaaatattatgtccgtgtgtgtgcatataaaaattctcacggaaaaaaagtacagggaagttatggtacggtaaaaagtgtaaaattgaagtgatatgcatcggcataaaagtggtaaaggatggagaaacgttatgaaaatgaaaagaatactgactggaatgctgggagcagctattttagctgcaggcgtaaatctattgtccgtacaggcggcagaaaatgcaggagtgatggaatatatagctgcgacagaatacatagaggaaacagaagcagcagagccggaaaatgcagaaaaacaggtgtttgaaactgaagaagatacaaaaacagcagatacgggtgaatttacgatcaacaacggtctgttgacaaaatataccggaacggcagagacggttacaatcccttcaaatgtcagtagaattggcaagtcagcatttcagaataataaatacatcaaaagcgtaatcattccgggaaatgtacggaaaattgaaatactggcattttatggatgcagcaatctggaaagtgtcacaatggcagaaggtgtagaagagattggtatgcagacattttccgaaactcatttgaaaagtgttgttcttcctaaatccataatcaaaatggatagacttgtgtttacaagctgcaatcggctgacaagtattgattttacagagggcacttataatattaatggtgatatcataggttcctgtgctgcgctgacagagataaaggtttcaggcaataatacgagatatcaggttaaagataacgtgttatatgaaaagaatggaaaaacagtttgttattgtccgtcaggccgcaagactgatatgaatgtgccggatggagtagagcatatcggagattttgcattctgggattgtcttacaacgaaagttacacttcctgatagtgtaaaaagtattggagaacgggcatttttttcgaccggaatggagacgatgatacttccggcgaatctggagtcgatcggaaaagaagcatttttttattgccaaaatttaaaacagatcacaattccggctaagacaacaaaaataggaaacaatgtgttcggcagctgtgatcacttagagacgatcaatgtggcggcagggaatacgatatacagatcagaggatggcatattgtatggcacagaggaaggcagactcgtgttgattaattgtcctgctgggaaaaaagggaacgtgaagatcttagaggggacggtgggaatccttgatggttccttcagtaactgtgaaaagattacatcggtagatatgccggacagcgtaaagagcattggcgaagatgcatttaaatcctgtctctcgcttataaaagtccggttctcaaatcagcttacggatataggaaactatgccttttataggtgtgattccatgcagcaggtacatctgccggacagtgttaaagatttgggggcatgggctttccggtattgtgatgcgttaacagaggtaacaatttccaaaaatatttcggatattccggagaaagcgtttggtgactgcacaaatctgaccggtattaccataccggacggggtaaaaacaatagcagacgatgcgttttcatatttcagcaatttaacgatatactgtagttcaggttctgctgcagaaaaatatgcgaaaaataaaaatattgaaagcaaggtaactgacgaacggaaaacccagacgattacgacagataatgataacattgaaaaaacggttggagatccggattttaagataactgcaaaaacaaccggggatggaactctaagtttttattcgggaaacgaagatatcattcaggtatctgaaaatggagctgtaaagatcatcggagcaggtacgaccaatattatgatcacggcatctgcgacgcaaaattgtaaaatggcgcagacagaaatttatattacaataaaaaataaagaaacggatcaaaagcgtgtgcaaaagatcacgtattcttatcaggcagataaaaaggatctgaatattttctatcttgacgcaaagtcagatggggatggtaagatatcttaccggtcagaaaacgaaaaaatcgtaaaaatagatgcagatggaaaaggatatatcttaggttccgggacagtaaaaattattatctcggcatcagagacagatacctgtgcggcagcgcagaaaatagttacgttaaatgtagaaaaaataacagatcagacagatgaaccggggcagacacaaaagccggatcagacagaaaagccggatcagacagaaaagccggatcagacagaaaagccggggcagacagatactccgaatcagccggataagccgtcagaccagaacggtaatgccacacagcagaaaaagaaacagaccataaaagctaaaaatattacaaagacctacagcacaaaaacttttgccataggtgccaaatcaagttgtggggcaaaactgacctacaaggtggcagataaaaagatcgcagccataagtaagaccggaaaaatcaaattaaagagttacggacagacaaaaatcacgatcaaagcggctgcaaaaggaaaatataaggcagcaacaaagacgattactttaacggtaaaaccggtgaagaaccggattacttccctgaaatcaacaaaagcaaaaacgtttgaagtaaagtggaaaaaaaacaaaaaagcgtctggttatatcatcgagtattccacggataaaaaattcaaaaaaaatgtaaaaaaagttgttgtcacaaaaaacaaaaccactaccaaaaaaatcacaaaattaaagccgggaaagaaatactatgtccgcgtatgcacttataaaaattcacatgggaaaaaagtgcagggagattacagtaaggtgagaacggtaaagatccgaaaataattgcaaagagaaaatgataaaaaatcctgccggattggagtgtggactccaggtacggcaggattttttgggtgacagcatttttgcttttataagaataatttgttcttaatatgtgacaagccggtgttctaaagatttaatctcatcgtgcagtataaatctcgatcgcttctgctacaaaagcagcagttacggcaccggcggctttgtcaatattttctgtaaattcggcaccggaagcatacattttaccaagcccgtttaagatctcattggaacattgataaaagtgctctgaaatataatcctgtaggttttttaccagaagctgtacttctttgctgccaggttctttgttctttatttttccaaactctacaaaaatgagcataagatttttccatgctgttttttgtgtctcggaagactgattttttgtcttttcttcatattccttgtattctgcagtctgtccccattgtttttttgcctctctggcatactcgtccattttggctgtgttaaatacgttaaaatccattttatttactcctgtcgttttaattttacgagcaaaagcaatcaagccttcaagatgctcctttttcattgttaacaattcaatctgctgggacagtgctttgtcccgatcaaaatcaggtgcatcaatgattctgttgatttcttttaacggaaattccagttctttaaacaataaaatctgttgcagccgctctaatgctgtatcgtcatacagtcggtagccggacgcagtataaccgtcgggttttaaaagtccgatggtatcgtagtattgcagagtgcgtatactcactcccgtcaatttgcttacttcatttactgtcatcatggtcatttcctccgctcgatgaggacactctaaactattacgccgcgtaggagtcaataggttttttgaaattattttcaggtcatatccgaagtcccattaaaatatatgtatcttcacggattggagtgaatttgttttttgtccagaacgaatagctctgtgggtttcccttgtcaacgccaagccggatttctttatatccagatgatttcagacaaaggatcacgtcgctgatgatcccggaaccgacacctctgttctgatagcgtgtgtctgtcataaataatccaatgaaggaaatttctttttcgggataatcaaggattaaatccatgagtccaaccagtgaatcattttcgaaaaaaccgacatagaatttatcatcatagccctttcccggtggtaaggctcccatatcatctaaaatactttcccttgtgacaaagggcggatgatattgataaaagatatcgtttttgcagctcatatcatagatgatatctacatcattttcgtcgagttttcgtacagagtatttttgtgataaagaatttatattcatgttcatagatcctccattataatattggggttcaatagtttttcacaacatgatgactggcaaagtgcatctgacatcataagatattgaaatatcgcagattgggcatatggcaaagaaactgcagcagtatacccacaaaaccccttgattttcctgcgttttgggtatatataataaaaacggatctgctatgcccattatcagtgaaaaatcactcaaaattcccgtatttttgggtataaacagcagattttttctgtatatacccaatcgacaaaaattcatgatcaattttcactcaaataacgaccgctgaacgtatttttccggaaaatgatgcagataagcaaaacattcatccggcgaacaaaggatgccagccttttggcattgttccacgatcattggaatgagcattttttcattcgggcttggcaggttgtaggcattaccgtaagtgcggatatatttttccttcatccccggaaaatctttatcgagggcatggtagaaatattcccggtcgccatctcggagagtcacgccaatgccaaagaatataattccctttacgccggcgtccacgcaggcatccagcagattttttatgttatcagcagtgtcattgataaacggcaggatcggtgtgagccacactacggtgggaataccggcttctttacatttcatcaggacgttgatgcgctctttggtggtggaaacatctggctctatctttttacataaatcttcatcgtaagtggtgagtgtgatctgcacgatggcttttgccttttcattgatggacgttaacaggtcaaaatctcttaaaatccgggctgactttgtctgtaccgcaacaccaaattcataccggtcgatcagctctaaacaccgcctggtcagcaaaaggcgctcctccaaatgaagataaggatcgcacatggcaccggttccgatcatacatttctgacgcttcgatcgcaaagccttttctaacaattccggggcattttcctttacctcaatatcttcaaatgcatgtgtaaaaccatagcacctgctccggctgtcgcagtaaatgcatccgtgggaacatccacggtaaatattcattccgttatcctttgataaaagcctcttcgcctgaacaaaatgcatgagaaatctcctgtagttaaaattaaaaatccgattaatcccattaaaacataagtaaagaaaaatcacaatcaagatcagaacaaaaaaataatgaggaaacagtcgtaacctacagagcatagatttcccttttttcggtatcgagggcatgtagaatgcagttttccgggtgccgccggcagatttgagactttggaagaaaattagaaaatcttagtatgcctgttcactcacagtgttgtgctgccatggacggcagcacaagtcctgatgtgccagggaaggcacattcaggacgtacacgtcactccgaaaccaactcaaacaggcatacttagcttttcttattttcgcacaacggaaccaaacctgccagcggcacccggaaaactgcgccttacactgtcccttaatacctaagtaccattttgcaaaactttaccaaattaccttgacaaatatttccatcagtcatatactttgaaaagctaattatttgactatcaaactatttgaaaggcaaatgattacatgaatcagaaaataagaaaagaaaatcagcccacaataaaaataagggcagggcgctggaaaaatgataaggcatgcgcagaaaaggagaaaaaatatgttagagaaaatgatcccgattattgcagagcagttaaatgtaaatgagtctgaaatcaaggcagagtctaatttcaaagatgatttaggagcagattccttagatttatttgaacttgtcatggctcttgaggaagagtttggcgtggagatcccatctgaggatttaccttctatcgtaactgtcaatgatgttgttgagtacttaaaaggaaaaggtgtggcttaagtatggaaacaagggtaagtaaactgctgggaacgaaatatccggtcattcagggtggtatggcatgggttgcggaatatcatcttgcagcggcagtttcaaatgccggaggtttaggtatcattggagcggcaagtgcaccgcctgaggtggtcagagagcagatcagggaggcaaagaagctgactgacaaaccgtttggcgtgaacgtcatgctgttaaatccaaatgcagccgaggttgcacagatcgtcattgaagagggcgttaaggttgtgaccacaggtgccggaaatcccggaaaattcatggatgcatggaaacaggcaggcgttgttgtgattccggtcgttgcgagtgttgcaatggcaagaatgatggagcgtggcggagcggacgcagtgattgcagagggaatggagtcaggtggacatatcggtgcacagacgacgatgacactcgttccgcaggtggcagatgcggtacagataccggttattgccgcaggaggaatcgcagacggcagaggcatggcagcggcatttatgcttggtgccgaaggagtacagatgggaaccagatttgtggtggcaaaagaatccatcgtacatccgaattacaaggagcgtgtcatcaaggcaaaagacattgactcagaagtgaccggcatgagcaccggacatccgatccgggttcttcgcaaccagatgagccgcgaatatttaaaaatggaaaaagagggcgcttcatttgaagagttagagcaccttacacttgggtccctgcgcaaggcagtcattgacggtgacgtggtcaacggaagcctgatggcaggacagagcgccggcatggtaaaaaaagaagaaagctgtaaagagatcatcgaggacgttgtgacacaggcggagtcactgcttggaagatagtgcaaaaataagcgcaaaaaacggaggttagtgtgaaaaataagatttttcacacgcaagatttgtgcttacgcacaaacttgagatgcgcaaaagacagcgcaagaatggagattaacatgggaaagacggtttttatgtttccgggacagggagcacagtacataggaatggcaaaggatttttacgatgccatcccggaatgcagagaagtatttgaggaggcatccgaggcgtcaggacttgatatcgctgcgttatgctttgaggaaaacgacaagatcaatatcacggagtatacacagatctgtatgctgaccgccgaggctgcgatcctgcgtgcattggaggtaaaaggctataaagcagatgtgactgcaggcttaagcctgggagaatatggagcattgattgcctgcggagcactgagcagaaaagatgcatttgcactggtgcgcaaaagagggatctacatgcaggaggcagtgccggagggcggagccatggcagcagtcctggcactggataccgcgcagattgaggaagcctgtaaaaaaacagagggcattgtatcgatcgcaaactataactgcccgggacagatcgtcattaccggagaagaaaaagccgtagcggcagccggagagctctgcaaagaagccggagcaaaacgtgttgttccgttaaaggtcagcggaccgttccactcagcaatgttaaagggtgccggagaaaaacttggcgaggaattaaaacatgtaacagtccatacaccggcaatcccgtatgtcgcaaacgtgacagcagactatgtgacaaaagaagaggagatcaaaccattactggaaaaacaggtgtcctcatctgtccgctggcagcagacgattgagcgtctgatcgcagacggagcagacaaatttgtagagatcggaccggggaaaaccttgacaggattcatgcgcaagatcaaccgtgatgtagctgcagtcaatattgataaatatgaagactttgagaaatttgttgctgagagcaaaaataaataagatatgccacatattttgatgtgaaaaaagtttggcagctatcagaaaaaaggagaagttatgttaactaataaaacagcactggtcaccggtgcaagccgcggcatcggagctgcaatcgcaaaaagccttgcaaaagaaggtgcatttgtcatcatcaattacaacggttctaaagagcgtgcaaatgctgttgcggcagaaatcacagcggatggcggcaaagcggcagtttacggctgcaatgtatctgattatagtgcctgtgaaaaaatggcaaaagacatcatggagacatacggtcatctggatattctggtcaacaatgccggtatcacacgggatgatcttttgatgaaaatgagcgaggaagcatttgacgcggtcattgcgacaaacctcaagggaacttttaacacgatccgtcatttttcacgctatctgttaaagcagcgttccggaacgatcatcaatctatcatccgtatccggtattcttggaaatgcaggacaggcaaattacagcgcgagcaaggcgggcgtgatcggactgaccaaaagtgtggcaagggaactttcttcccgtgggattacctgcaatgcggttgcgccgggattcattgatacggaaatgacagcgcagatgacagacaaggcaaaggaagcagtgaaaacgcagatcccgctcggcagagtcggaaaagtggatgatattgcggaggtagtgacatttttagcctcggagaaagcatcctacatcacaggacaggtaatttccgtggacggcggtatgagcatataagcagtaaaaacattttgaccgcatggtattgtgtcggatcaaaaaggaaaagcctgaatttggggcttgaaaatggaaaggaaaagttatgagcagacgagtagtggtaacaggaatgggcgcgatcactccgatcggacttagcgtggaggagttctggcagtccgtaaaagaagggaaaatcggtttcggggagattaccaaatttgatacggaaggatacaaatgccatcttgcagcggaagtaaaagattttgatgcaaaacagtatatggatgcgaaggcagcaagacgtatggaactgttctgccagtatgcagtggcagcagcaaaagaggcgattacagatgccgctcttgacatggaaaaagaagatccttaccgtgtcggtgtatctgtcggaaacggtattggaagtcttgggggaattgagcgtgaacataaaagattgttagaaaaaggtccatccaaagtaaatcctctgtttgtaccgcttgtcatttccaacatggcagccggaaatgtttcaatcacatttggtttaaaaggaaagagcatcaatgtggtaacggcatgtgcaaccggaacaaacagtatcggtgaggcattccgcagtatccagtacggtgaggcagatgtgatgattaccggtggaaccgagggcgcgatctgcccgcttggaattgcaggattcacatctctgacggcactttcctctgaaagtgatcctacaaaatgttccattccgtttgataaaaaccgcagcggttttgtgatgggagaaggagcggcaatcgttgtgttagaagaattagaacatgcaaaagcgcgtggagcaaaaatctacgcagaggtagccggatacggaacatcatccgatgcatatcacattacttctcctgctgaggatggtgccggtgcagcccgtgccatgacaaatgcggtggaagatgcgggcatccgtccggaagaagttacctatatcaatgcacatggaacttctacacatcacaacgatctgtttgagacacgcgcgatcaaacttgcttttggtgatcatgcgtatgatatgaaggtcaattctacgaaatctatggtcggacatctgctcggtgcagcaggcgccatcgaatttgtaacttgtgtcaaggaaatgcaggataattttgtacatgcgaccgttggttacacaacaccggatgaagaacttgatcttgattactgtaaagaggcggtacagatggatgtgccgtatgcactcagcaattcactcggttttggcggacacaatgcaagtattctgctgaaaaaatacagtgaataacagggaggaaattatgtccgttttaacaacgaaacagattatggagatcattccgcaccgccagccatttttgctgattgatacagtggaagaattagagtccggcgtgcgtgcagttgcaaaaaaatgtgtcagttataatgagccattctttggcggacattttccgaatgaaccggtcatgccgggtgtgctgatcattgaggcactggcacagaccggagcggttgcaattctttcggtggaagaaaaccgtggaaaaacggcatattttgcgggaatcaattcagcaaagtttaaacggaaagtagtgccgggtgatgttttgacattagaaacggagatcataaaacaaaaaggcccgattggtgtcggccgcgccacggcgaaggtggatggcagtattgcatgcatcgcggaactcacatttgcgatcagttgaagttaagagagtctggaacagcataggtttgataaatcactgtaaacaggcaaaaaggggaaactatggcagcattttttttgaagaagaaaaaagaagtaacagagacggtggaagaaccacagaaaacggcagagacagcaaaaaaagacgcagagacagttaatacagagccgccggcaacgatcgtctgtccggcatgtggcagggagatcaataagaaaaccgcggaaaaaaataaatatgtctgttatgagtgcggcaattatttccgcgtccgcaccaaaaacaggatccgcatggttgcggataaggatacttttgagccgtggtttgaggaattagagtcaaaaaatccattggattttcctgggtatccggaaaaaatcaaggccgcacaggaaaagacaggattgcatgaggctgtcacagtcggaaaatgtaaggtctatggtcttgatacggtgattggtgtgtgtgatgcccggtttatgatgagcagtatggggcatgttgtgggagaaaaaattgcacttgccgtagagcgtgcaacagaactttctcttccggtcattttattctgctgttccggtggtgcaagaatgcaggagggaatcgtttccctgatgcagatggcgaagacggcggctgcattaaagaaacattccgaggcaggacttttatatgtgccggtgttaacggatcctacgaccggaggtgtgacggcaagttttgcgatgttaggagatattatccttgcagagccgggggcactgattggatttgcaggaccacgtgtcattgagcagacgattggtgaaaaactgccggagggattccagagagcacagttccagctggaacatggttttgtggatgcaatcgtagaacgtaaagatttaaaaatgacactttaccgtattttaaaaatgcatcagaaaacagaaggatatgccaactttgatccattgcgcagcgatgactgctatgagccgacagaggtcatgaaagagcgtgctacaaaggcacagccgctttccgcgtgggagaaagtgcgtgcagcaagacgtgcagaccggcttgcatcggtggattatatcgacaatatttttgacgatttcatggaatttcatggagacagacagtttgcggatgatccggcgatcgtgggtggtgttgcctacctggatggtcagccggtcactgtgatcggtattcacaagggaaaagatttaaaagactgtatgcgccataattatggaatgccatcaccggaaggttatagaaaagcactgcgtctgatgaaacaggcagaaaaatttaatcgtccgattatcacatttgtgaatacgtccggtgcattctgcggaaaagaagcagaagagcgtggacagggtgaagcgatcgcgagaaatctctatgaaatgtcagccattaaagttccaatcctctgcctgatgatcggagaaggcggaagcggcggcgcgctggcactgtcggtcggcaatgaagtatggatgcttgaaaacgcaacgtattctgtactctcgccggaaggatttgcatcaatcctctggaaagatggaaaacgtgcaaaagaagcgagcgaggtcatgaagatcactgcccatgatctgtatgcactgaatgttgtggaacagattatcccggagtatggaacggcagacgaaaaggcatgtgagtcgatctccagatatatgaaaggtcatatgaaagaatttttagagcgtcagaatggcaagacaggagaacagctcgccgaagaacgttatacgagatttcgtgcgttctgataaaaataggatacaggaaatgtcttgcagagtacagatggaaataaaataaactccggaatgaggaaaaagtatgaaaatcaaaatcaagggaaccggaagtgcggttccaaaacttcgggtgacaaacgatgatttaagtaaattgatggatacctctgacgagtggatcagaagccgtaccggaatcggcgcgagacatcttgcagtggaggagacaacgacagggcttgctgttgctgcggcaaaggaagcgttaaaagatgcgggaatgactgcagaagaacttgatcttatcattgcggcaacggttactgcagataaattcctgccgaacttatcctgcgaagtgcagagtgctctgggggcagaaaatgctgtcgcatttgatttaaacgctgcatgttccgggtttttgtttgcattaaatacggttcagatgtatctggaaaatggtatatacaaaaaggcactcgtcatcggagcggaaacgctttcaaaaattatggactggaatgacagaagcacctgcgtgctgtttggggatggtgccggggctgcggtcgttatagcagaagatgagaatgtggatggtcattcggctgttacaagtggtaaatcagatgctgggatgatgcagacgggtgcagtaagcagaataaacaaaagcggtattttaagcatggtacagggttctgatggcgcgcgcggggaagtcctccgctgtgataaccgcccggtcaacaatccgtttgcagccaacgattccaagctgtcttatgtgtcaatggatggccaggaagtatataaatttgcagtaaaaacggtgccgaaagtgatagaagaggcagtgaaaaaagcgggactggaagtcgaagatattgacctgtttgtactgcatcaggcgaatctgcgcattatcgaatctgttgcaaaaagactgcatcagccaatggaaaaatttcctaccaatctggaagagtgcggcaatatttctgcggcgagcgtgccgattttacttgataatatcaataaacatggtatgatatgtgaaggtaaaaaaatagttttggcaggatttggagccggattgacatggggcgcgacggttttggtatggtaaaggcaacagtaaaggaattgactgcagtttacatagatgtggacagcaatcagtactgccatgaataggagtatatttgaatgacggcagatgaaacattaaatgagttattggtaaaattatttaaagacattatggagattgagggaaaatctctgatcacagatgaatttaaggatcttacctataatgattttcatgtaatagaggcgattggtatatcagagccaaagagcatgagtacggtagcaaagctgatgaacgtaacgaccggaacgctgacaaaggcgatggacggtctgaccgataaaggatatgttgtcagggagcgcagtaagcaggataagcgtgttgtctgggtgtgcctgaccgaaaagggaaaggcagcttatctgcatcatgaagagtttcatcaccggatgatcgatcatatcaaaggagagctgaatacacaggagacgacggtattgatttattcactggcaaaactggtggattttttccagcaggtatatggggagaatgaagaatcgtaatgggtttggataaagttatggatattatatagatagttaaggatgttttccggaaatgggaggcatccttttttgatgctgtaatatgatatgatgatgttgaggtcaaatagtgcatacaagattgttgattgacaaattgcacaaagccgtgcctgttttgttccgttgtacgaaaataagaaaatctaagtccgcctgctttaaatgttctcggagtgacgtgtacgtcttaaatgccccttccatggggcattaagacttttgctgccgtccatggcagcaaaacactatgcattgacaggcaaactaagatttactaattttctcccatagtcacaaaagtagtctcgactttgtgcaatttgccagtcgttatgctgtgaatgcactattcgccccccaatatcatctttatagaagaatgccagggcaaatagtgattttcaattttctgataacacagtcatgatatattttctcaaataaatgttgtaattacaacatacaatctgcccgaaataaattaatataacaccagagacaaggacagcagtgtgaaaaataagatttttcatacgcaggaaaggagaaatatcatgaaacaggtagaattaaataacagaaaagtggcagtgatcggatgcggatttgtaggagcaacatcggcgtttggactgatgcagagtggtttgttttctgagatggttttgattgatgcaaatacagagaaagcagaaggggaggcaatggatatttcccatggaatcccatttgcaagaccgatgaaaatttatgcgggtggttatgacgatattatggatgcggcgatcattgttgtgacggccggtgcaaaccagaagccgggcgagacgaggctggatctggttcagaaaaacgtcggcatttttaagagtattatcccggagattgcaaaaagagattaccagggaatcctgcttatcgtttcaaatccggtcgacattcttacatacaccgcacataagctgagcggtatgccggaaaaccgtgtgatcggttccggtacggtgcttgacacggcacgtttaaaatatgagttgggagagcatcttggtgtggacagccggagcgtgcatgcatttatcatcggagagcacggtgacagtgagatcgctgcatggagcagtgcaaatgtatcgggaatcccgttaaatacattctgcgagatgcgcggacatttcaatcatgacgattcgatggaacgcattgcagcaaatgtgcgcaacagtgcctatgagatcattgcaaagaaaaatgcgacctattatggaatagcaatgtctgtaaagaggatctgcgaagcaatcgtgcgcgacgagaaatccattcttccggtttccggtatgatccatggaatgtatggtgtggaggatgttgttttaagtatgccggcgatcgttggaaaaaacggaattgagagacaggttccgatttctttagatgaggatgaacagaaacagcttcagaaatcagcacagatcttaaaggagatggcggagcaggttttgttccgtcgtccgaaaataagaaaaactaagtatgcctgaatcaagttttcccagagtgacgtgaacggcgttcaacacgcgccagttatggcacgatgacatccatggctcgtgaagccttgttctgccatccatggcagaacatcactgtgaattgacaggcatactaagattttctaattttctcccaaagtcacaaaacgagtccaaacttcgtgcaatttgacatccgctaagttatgaaccaccttttaacaccagaatcttacagttaaacaaatacgaaaagcagctgcaaaaatgtgatagattttgcagctgctttttgtgctattttttagagacaaatgcttgacatgttttaagtgaagtgttattttaaaattaagttaagcgtttaagcaagcgcaaacccgggaaattgcgttatattataataaaagaaaaagtacgttcctgatgaacatgggaaaacagctaagtttgaagaatgggcacaggatacgcttttttttactatgttggttaaacgcttaagcaaaaaagaaatagctggggaataattgcagaaataaatcagaaaggaaatggagaaggatgaaaagaaaaggattcatgtattttatggcagcagcgttagtgacaacaatgggagtttccgggctgaccggatgtcagtcaaaaggaggggaaaaagatactgtggcacaggacagccagacagttatgacagagcagaagcctgaagcagagcagacagcgcatgtagtgacattttatgatgccgatggaaagacggtattagagacaaaagaggtggaagatggagcatgtgcagaggaatatgttccggaaaaagaaggttacacgtttgcaggctggtttgcaacaccacagatgagccataagtttgattttacgacagcgattacggcagatacagatattttcgcaggatttgtttcctatcaggaggatacgaggaagtttgcaattgtgggaagtggaacaagtccggtgttgttggaatcaaactggggagcggttattggtgatgcacagacattaacaaaagaggtcgatccggatgctaacgtttataccattacattagatctggaggcgggtgacgaattccagtttgcaattaactctgactggaatgaccagagaggctgtggttaccttactgccttttcaaaagatggaaaagattattttcaaaattcaggaagccttggagatgcgggtacaaagagagctaacattaagtgtcttgtgtctggaaattatacctttaccttaacaacatatccgggtgaagatatttatgaagagtctgcagcagattatagtgaagataataaagaagcgttcaatatcaacatgtatgatacgattgactggacttacaatggagaaaatgagtcggacggagcggaaaaacagatcgattattacattaaaggtgctaaaatcacaaactgggaagatgtatatacagatgagacagagtttgtggaaagagatgggatttacagcctgacagttgatcttgaagagggcgatgagtttatgtttacttccatggttacggtaggagacacaaagagcgttggaacagaatatatccgctatacgaacattgcagaagatgatacggaaagcttatcctgcgtgaccggaaaagaaggcggtaatcttgttgcaaatacggcaggttcttatacttttacttatgatccgtccacacagattctgacagtgtcatgtgaataaaatccgatggcaggatgtcagattaaaatatcatgctgccggattggaatcctctgcagtgcatattccagacaggtaagcagtgcatcagctttttctgtacggatggacggtacatacagtgtgttgtgggaagaatttaaaagctggtaaagtacatggtcgactacaacaaggttttcctcttttattgcggaaacttctaaaaaatcccgtacatatcgtatatcagcgtgaagtgtggaaaggaaatcctttttttcacagtttttggtatctaacaatacgagtgtgtatggttttttggaaaaataaatatcggcctgctccagaatattccggtagttggaattgatctggaaaaacagcggatcatggatcatacaatcataggcaaccagaggaataaaattactatcaccgatctgatgaaacagctcggaagaaatatcataacagatgattgcatctgcatgatcgaatttttcagtataagattcgttcaggcagacgagatcatagttctttttatgaaaatatgaaataaggaaatgcagaaaataagactgttctgcattctttaaaagtgagtctccggcggacaggtaaagggcaagcagctgattgcggtttgtcgccagagcttttgctgactggtttggtgtatagcctaacagattgatgatctgaaggactttttttctggtcttttcactgatccgtttatccgtacggttattgatcacgtaagatacagtggcaacggaaacacctgcttccttagcaacgtctttaatggtaactgattgtttcattggtgagactcccttttggcagcttctgtgttttcagtaagtgaaacgcttaagctcttttcatttgttataaagaaaaatgtcacatttgtcaacaataaaaaacataaaataaaatggttggaaaggtttattattaaaatgaatcagtatgcaattttacatataccggactcaagatattgttttgcggttggtgagaaagaacttgtgcttcgcctcaggatgtctaaggaggatgacggggcgaaggtgtatttaatctacgcacagaaatatgattttacattaaaacgacagaaaaaaaggatggaagtgtgttacagggattatttatatagttattacgaaatcaggcttgcgttagaggatgtccgttttgcctatctgtttgagattgaagaggcgggaaagatttattatttcagtgaagatggagtgacaaaaaactattgttttgaggaaggattttataatttttttcaaatgccttatatcaatcagaatgacgtattaaagacggtggactggatgcgggatgctgtattttatcagatttttattgaccgtttttatcagggaaacatgcagaaagacaccgggtatatcaatatggcgtggggggataaaccaacaccggaaagctttgcaggaggtgatattgaaggaatcatagaaaaacttgattatcttcaaaagcttggggtaacagcactttatctgacaccggttttttcgtccgtgtctaatcataaatatgacattaaagactatcggaaagtagatccacagtttggaacaaaggaggatgtcatacggctggtaaaaaaagcacatgaaaaaggaatcaggattgtactggatgctgtttttaaccactgcagtatgtatctggaacagtttatggatgtgataaaaaaagggcaggattccatttatttcgactggtttttgatcaatggcaataaagtggatgtggaaaaagggaattatgaatgttttgcatcctgcaattatatgccaaaattaaatacggcaaacgaacaggtacaggagtttttgatagaaattgcagcttattggatgagagagacagggattgacggatggagactggatgtttcggatgaagtttcacatgacttctggagaagattcagaaaggaagtaaaaaaaatcaatccggactgtgtcattattggagaaaactggcatgatgcatatccttatctgcagggagatcagtacgacagtattatgaattactcttttacgaaagcctgtctggattattttgcaagagagaaatttgatgcaaaagcgatggctgaaaaattaaatgcaaacctgatgcgtaatctggaacaggttaatgttatgatgcttaatcttttagattctcatgatacgcaccgtttcttttccgaggttggatgtgacaagagaaaattacttgctgcacttgctttggaaattgtatttattggtacgccgtgtatttattatggtacggaaatctgtatggaaggtggttacgatccggattcaagacgatgttttgactgggagaaaacacattgggatatggcagtttatgataagataaaagaactgcttgcattaaaaaaggaggaggttcttcagtatgggaccatctgtgttttagaggagaatggaatgctttccgttcatagaacatggaaaaatgtatcaattacattgtgggtaaatgggacagatcaaaccaaaaaaatcacattttcaaaatctgacaccaaaaaaatcatctgtgcagaaaatgagctggaatggaaaaagaatccaaaagaagagaggaactgtatcaatgaaccgctttttttacaatcaaaagggttcgtagttgtaaaagaggaaatgggggtatgatcatgaaacgaaaagtatgggtagcagcaatggcagtattattacttgcccagcagttatgtggctgcggtgagaaggtaaaagaagaaaaggctgcttctgccagtgagtctgcatcgggaacagcactgagtaatatttttaccggagaactggaacaaaatgtaacaatccaggttcttgaaaatgacacagcaatcgaaaaaggatattttgctgaactgatccaggcatttaatgaagcttataaagatcagggaatcacagctgtagatgcaaatatggatcagtacttagatcttgcaaatgatggaccttacggatatggaccggatgtgctgtatcaggcaaatgatgtgatcatgcaatatgcacagggaaaacatatttatccactgccggtggaatcaatggaatgttatggacagattccgcagactgcatgggatgcctataagatagagaaagatggatcggtttattattgtggagttccggtaaatgtgcaggcaccgatgctttattaccgtgcagatcttctgccggatgactgggagaacagctgggataaggataaagacggtataccggatatggtacagaactggaatgatatgtatgcattttccctagaacgccatgatgcggatccatctgcgtatggatacatgaaatctctttatgatgtttatttttccagtggctttttgttttcttatggaggatacatttttggaaataacaataccgatgcatctgatatcggttttgcggcgggagaagcagaaaaaggtgcgtgggtgttagaacagcttgcaagtgcaatgaatgaagaatgcattgatgatacgatcacaacgaatgcctacagtaagcttgcagatggaacctattttgcaactatttcgacaccggatgtttattcatcttttttagatgagatggtgtcagaatacaagtcagaaggtatgggggaagaagaggcagagagcaccgcaaaagaaaatctcattatgacaacacttccaaaacttcctgagagtggcgatttaactgaggaaaatcccaaactgacagacagcaaaatgatgggaggaatcaatgcctatgcagtcagtgcttatacaaaatatccgaatgcatgtcttgcatttataaattttgcaaccggttatgatatgatggtaaaaagaagtgaaatgctgggaattgcaccggccagagaagatgctgcgaaagaagccggcggtacatcagaacttttatatcagaatctggaaaatggaaacattatactgatgccttctatcaaagaagtttcacagatctggactccgggacagactttctttacggatcttgcaaaagatgcattccgtgcagaaaatgagaaaaagtatccggatctggaatccctgaaagcagggttagaagaagtagaccggcagatttacgatgctgtttatacgttgaaatagcaaaagaaaactttttacggaaaacataaagaaatggaggtagtgtgaaaataagatttttcacacgcaagatttgtgcttgcgcacaaactcgggatgcgcaaaagcagcgcaggaatggagattattatgggacagcagcggggaaaaaagatggaaaagtactgccataacagcagctggcaggtaaaattgtcagctgtgctgatgggaacagggcagatatgttatgggagtattataaaaggtatcttatttttgatctcagaagtgagtatcgtcctttattttgtgataagaggatggcgtgatatcgtaggattttttacattaggaacacaaaaaggtgatgcatggcttggaatagaaggtgataattctgttgttatgcttttgatgggaatttttgcatggatcgtgcttggtgtttttattatgctgtaccggttaaatctgaaagatgtatgttccatgcaaaaacgtatggaacaggggaaacaccggttgactttccgggaggaaatcggacagctccttgataagaaattttacatacttgtgctggcactgccggtactgggggtatgtgtatttaacattttgccgattgtatttatgatcctgatcgcatttacaaattatggcggggatattgtaccaccggaattagttgactgggttggaatttcaaattttaagaaacttgtgtcactctctcagtttgcaccaacattttttaagattttaggctggaatgtcatatgggcagctgcatcaacagcattgaattattttgccggacttggtctggcattattactggataaagactgtgtaaaaggaaaagcattctggagggcgtttccggtgctcgcctatgcaataccaggatttatcacacttttagcatttaaatttatgttttcctatggaggaccggttaatcagcttatcgcagcctgtgggaaaagtgccattggatttcttgatctggatgcgaaatggagcgcaaggctgatcggactttttgtgaattgctggatcagcgttccatccatcatgttacttgcaactggaaatctttctaacagggatgtttctttatatgaagctgcaaagatcgacggggcaggcagatggaaacagttcgaaaaactgacaatgccttttatgctgttttccacgatgccggttttacttggacagtttatcggaaatttcaataactttggtattttttatttcctgagaggaggactgtatctggatggatattttctggcaagtgataccgatctgctgattaactggttatataatctttctattgataataattattattgcatcggggcggcgatcagtcttatcattttcctgatcacatcagctatttcactgatagtatacataaaatcaccatcctatagagaggaggacacatttcaatgagtaaaaagtggaaattcggcagaatgatggatacaggcataacatatctgattctcaccgctgtagcatttgtgttttttttcccgtgtctctggctgatcctggcatcgttttcaaaatcgggaaccatttattcatttaacggttttttcccaaaagaatatagttttgcaagttttcagaagctttttactgatacgacactttacaactatccgagatggttttttaatacactttttgtggcagcgggaagctgtatattagggacatttcttgtgattttaactgcatatacaatgtcaagatttacatttacagccagaaaaccaatgatgaaaatcacgatggtacttggaatgtttccatcttttatgggaatgatcgcagtttatcttctgatgacgcagtttaacctgatcaatcatttgtggggcttaatcttgatttatgctgcaggtgcaccgatggggtatctgaca

SEQ ID NO: 181 - DNA, 38916 bp, unidentified
  source 1..38916: mol_type = unassigned DNA
ggcggtcttgttcatcttccagttgcctgcaatgattgccttacgctttgccttatccattctaacgatctccttatcacaaaatacctccccgccgccttcggtgccgcctctcccggcaggagaggcaggataaacgacatctcctgcctcccggatggagagctggcgaacgtcggcaagcctgagagatcttattacccaaaataaaaagtgcggcggcgtatatgccgccgcacctcagtgatgctggttcagatgcttatgcgttctggatcacagcgataccaggcagctccttgccctccagatactccagagaagcgccgccgccggtagagatgtgggtcatcttgtcgcccaggcccatctgctgcacagctgctgcgctgtcgccgccgccaatcacggtggtagcatcgctctcagccatagccttggcaacagccagagtaccagctgccagggtggggttctcgaacacgcccatggggccgttccacaccacggtcttggatgccttgacagcatcggcaaacagcttcatggtctcggggccgatgtcgcagccctccatgtcagcaggaatggcggtgacaggcaccacagtgacatccacgggagcatcgatgggatcggggaagtccttgatgcaggctgcatccacgggcagcagcagcttcacgcccttctccttggccttggccatcatttccttgcagtaatccagcttggtatcgtcgcacaggctcttgccgacctcgtagccctgagccttgacgaaggtgtaagccatgccgccgccgatgatcagggtatcgaccttctccagcagattggagatgacgttcagcttatcggcgaccttagcgccgcccagaatggcggtgaagggacgaacgggatcgttgactgcgttgcccaggtacttgatctccttctccatcaggtaaccgacagcggtatccttgatgtagtcggtgacacctgcggtggagcagtgtgcacggtggcagctgccgaatgcatcgtcaacgtatgcatctgccagagaagccagctcctggctgaactcaggcatgttcttggtttcttccttgcggaaacgggtgttctgcagcagaacgacatcgccgttgttcattgcggcaacagcagcctttgcgttctcgcccacaacgttgtcgtcatcagcgaacacaacggtcttgcccagctttgcgctcagagccacagcaacgggtgccaggctgaactttgcctcggggccgttcttgggtttgcccaggtggctgcacaggatgaccttagcaccatcgttgaccagcttctggatggtgggcagagccgcattgatgcggttctcgttggtgatcacgccgtccttcatcgggacattgaaatcgcagcggacaaggaccttcttgccgcagtaattctgatcgtcgatcgttttcttacctaaacccatggtaacaaactcctctcaaattcttttcgttcggaatcgaattttgctcttcatcgggggccgcgcactgcgaacttccccgtacatccctattataaacaaaaagcgtgtgtattgcaaggacgggagatggataatttattaacaaacatttgttgcagaagcaaagaaatgtggtgattttgccggaacgcaccaaaaaacgccgttttttccaaaaaggacccgccgcagagagtgttcgcccccgcagcgggtcctgtccattcaggatgttttccggaacttctgcttcgctttttccagatattccagcaccagcggatttttcataaccagcaggatggctgcgtatgcagccactgagcccagcaccgccgccagaatgcagatgagattgggtagagccagtgccttgaccccggtacagacaagaacgatgcccgcacagccgcagagcaccgagccaacggtgcgccggtcagctgagaccgtgaccagacccctggagcagcggatacagagcatcatggagcacagctctgccagcagggtggtaaaggctgccgcattctcccggaaccgcgggatgagcaggatgttcaaccccacgttcaaaattgcactcacaagcgttgctaccaaaaattgaccttctcttttccatggcaccaaaacacaagtattatagagccacccaaataaacttgccaccagtgctatactcaaaatgcgaagtggcacagctgcttccagatagctttcgcttgagataaaaagaacgacctcttgacttagttcaaacaatcccactacagccggaagaacggttaataccattgccccaaatactttattaaaaagtctttcaaaattcagcctatcctgcattcccgcataacgagacagcctcggaacagatactaaaagaatagatgccagaaccgattttaccatcgtatatatcttcattgcaacggtgtaaattcccacatgatagtctgaagttaaaactccgagaattgtcacatctgaatttacataaatcgtaattgcaaagctcgatgcaaaaatcagaagtattggttttaaatgctttttccagtctattcttgctgtcagtcgaatcgtgcaatatttcctagctcgaaagaagttcaatatattcgcacctgctgcggcaaacaccgtaattcctgcgtaaatacagtaatcgtcctgcgttttaacaaatgcgaacatcatcagaattgatattatttgaaaaataatacctctaactgtgatataggtatactcctcaaagatcgtgaacacccattcggtgccaatggtcgtaaagaagatctgtaaactcagcaccagcatcaggtcggtataggcatggagctttgtccagaagagcatcgtcacagccaatgccgcataggtcaggaccgtagagatcatattgatggagaacatctccgatgcaaaagccgacagcttttcccggtcattcacatagcgggaaccctcacgcaccgcataagaggagatgccaaggcctgcaaacagcagaaaatacccgcagacggaactggcaaagttcactttgcccaaattatttacttgtagaatgttagatatgtacgggaatgtaatcagtggaaagatgatttgtagaatcgtctttgttccactcattattgcatttaatgtaagcgatttcttcataactagatactttcactcaccctgttttttctttacccatgcgtcccagaagaaatacgaatacatggttttaagccagtaaaaatatctcttttcctgaagttgctgttgcatcatttcctttgcccatctgtaaaaccctgcttttgctttcggataaccttcttccataaagtgtgcactctttccatatttaaccaccaactcacgacaaacctgtgaatatcccgcttttgcagtcttctgtacaagtgattcattctcatacaatacaacaattcgctcccacgccatcatttctgttaattttccagtaaaataatcgcacagcgttaccgactgatcattgcggtagtaatagtataattcactttccgaacgaacaatcttagatgcttttttgatgcattctgctaagaaaagagtatcttctccaatatacaggtcatcagaaaatcgaatatccttcacacagctttttcggtatactgcgccgcaggcgactttatgcgctgctggtgtaaaccaatcgtaccgtcttgcatccaatatgcaaactttatctgtaattttgggaatatgttctacgtcactgccttcccaaacatccagcattttacagtatgcaatttccgcgtccgattgcaccaacatcatttccagccgttctataaattccgaatgaataaaatcatctggatcaacaaatgaaatatactttcctgtacttttttccaatcccaagtttcgcgcagaggaaacaccaccgtttggcttgtggtatatcttgatccgcagatctttttccgcgtaacgctggcagatggcaagggagttgtctgttgactcatcatccaccagaatgatttccagatcccgataggtctgaccaaggatgctgtccagacatttttccagatacttttccttgttataaatcggcacaatgatactgacggtatcgtttagcacaaattttcctcccttattttgccgccgggccgtttttcagcaggaacagttttgcatacagcctccggctgcatctgagcagctgatacttccgctggctgctggtgcagagcagctttgccgccgccgggtcacactcctgcagaaaggcctccatctttgcgcggcgcaccgtgtcctgcatcagatacggatagcagtgctccaccacgctcagcatggcagcatcattctccggcattcccgggtatgcttcccggatggcccgatatttctgatagcccatatccagcttatcctcatagaacttcatgttcctgcggtgaaggatgctgtccgggcgctgatagtaataatacagcggcaccgggcggtatacgaccttgctgcactgctgaaaaatgcggtatgtcgtaccctgatcttccatcatccgccccagcggatagcggatatcccggaacagctcccgcttgtagagcttgttccaggcaaaatcccccagctcatccgagacaagggtgctgcggatggcctcccggcctgtcatacactgcaccggtacggcgagttcagccggggcaagctcttcctcccattcaaacatccggaagcccaccacagccacgtccgcatcctgttcctgcaggtcacggcaaagcgtttccagcatccggctgttcagaaagtcatcactgtccacaaagcagagatacgttccctgtgcccgttcgagccccgcgttgcgcgctgcagagagtcccccgtttttctggtggactgctgttacacgttcttcctgtgcggcatattcgtcgcagatggctccgctggcatcggtggaaccatcatccaccagcaggatctcaagatcctgataggtctggtgcaggatgctgtccacgcagcggcggagatatcgctccacattgtagaccggaacaatgacactgatcagctctgtctccatgttctgttccctcagaagaatgtttctctgccaatgtggaggatctccgaggtgtacgggcaaatggcattgttgccctgaatatacgcctgatagatccagatgatgaccagcattccccacatggcagccttcagcagcttgcgcagacgctcatcctccacgcacttgaccacacggccaatggcgagatagcggaagaacgcaaaatacagacagatgcggtagagcggcacattgatgttgcgcagctgggccgttgccatctcgatcaggatcatcacgatccagaaatcggcatccgagcgggtaaagcggctgctgccctccccttcctctctggcgtaccagcggtacagcacaatgggcaggatcaggaacggcagacgcacaatgatgggattcagcgtgaagccgcccgcattggcaacataataatatccgtaaagtcgatcaatgaagtccacattcagggccagcctgaccacagccttgctgaagaaggcaaggtagaccgaaaatgccgccaggccacccttgacccaccagttgtcgaaatgctgaagcaggatatagatcagcagcgcaccaaacgagataaaggtggcattgtggaacaggcaggagaccgccagcagtaggaccgcccagtgatactttttcttccacgcaaagctgaacgccagaaatgccacgcccagcgccacagactgccgctcggcattgtaggtatcgccataatacaggcagaggtaagccagccagccatagggcacggagacatactccttatactgcaccagcccgatcataaacaggccgcaggccagcaggtccaccataaagtagagccagtggacatcaccaaaaacgtgggccgccaaatagaccagcgtcataaacagcggctctgttttgtgccgctgccggatacaggccagcagaccatcctgcagctttgcatccgccacccatccctcatacaccacgctgtccgtgccaatggacgggtcccgcaagcctgccaataccgccatcaccagcaccgccagcgccaggcagagataaaagcccttctcgttgtttttcttcgtccgcaggtgctcgccataggcggcaatgcccacagaaaccgcaaaagcccccagataaatcagcataacttctccattttatttttcaactgtgtgtttatttttccattctcccagcccataaacggcataaaacagccgcttgctgatcagaagtgtttccaccttgatccggtctgctcttttggcccagggccgccgggcaagcgcccggtgttcctgcacaaagcggcagatccgtgcctgagcctccggatagctgccaaagccgccatccagaatgcctttcagtgtcttcaggtatgtaaccagctgcaggtattccgcttctgctttcagcacaggaaccgtttccgcaataaagcgggtcacgtcttcgcccacatccagaatgaccagattcttctcggcaatgccgctcttcatggtcgaaccggtatggatgcggtaatcgtacatcggttccggaaacacttccacttttgcacagcgggcaatggcccgatacatcaccgcatagtcctcgtacaggatgccaacggggaactgcagatctccccaaacctcccgccggaagaaaacgccgcctgccccatgcccgatgccctgatgaagcagcatccggcgcatggtctcttcccggttcagcagctctgggatctggtgcggattttccgtccgcccctccggctgctctgtcgagaacatctccagcggggtcagggctgcatcagcaccatctgcctcacagcgctccacaaattggtcaaacgctgtggagcggatcaggtcatcgctgtccagcaggtaaaaatattttccctgcgtctgttgcaacccaacgttccgggcatcagactgccccccattgggcttatggaacacccggatgcggccatcctccacagccagttcatcacaaagctctccgctgccatcggtggagccgtcatctaccaaaagcagctcccagttctggtaactctgcacctgcacgctctgcacacagtcccgcagatacggataaacattatagaccggcacaatgaccgatacaagcggttttctttcctccaaccggatccctccactttacttttttccacgccattgcgttttttcataaacccgtcgggtcatggcatagccgctgtaggaaagtgccgccgccagccgggccttttttcgggcctgcgggtccagcagaacgttccggcggtattttttcacttcctgccagagagtcttctctattttttcatgctgcctgtcccggatctggaacagaatattgcagacattgctcagatagcggcactccgctgcacggctcagccgggggaaatcgcgctttacgttttccatcagcgcgtagcagtgccgcacactgtccagctttctggggttgaaggccatattctggatgctgctgccccgctggaaatagtagtaatcccggtttgcgatatgtgccaccttatgggcgcgctttgtcacctcgtaggcaaccgggatatcctcatagagcttgcccaccgggtagcgcacgccctcaaacagtgcacgcttatagagcttggtgggggtggtcacctccatgccctcctgatacaggatgcggcgcaggcattcctcccggctcaggatctcgaatgcttccagacgctctgtgggcacggactgcaccggctggccctcgaacacttcttcaaaacagctggctgaaaaatccgctcccgcctgctccagtgcccggtacaggttctcgatgtaataaggtgacacccagtcatcgccatccacaaaagagaggtattccccctttgctgcgtccacaccagcgttgcgggcatcggacagaccaccatttttcttgtggagcacccgcacccgggcatcctgtgcagcatattcatcacagagggcctcgctgccatcggtggagccgtcgtccaccagcagcagctccatattctgatagctctgccccagcaagctgttcacacagcggttcagatatggctttacattataaacaggaacgatgatgcttaccaaaggatccatcttatctcctcatttcagcaggtcgaagtaaaactcttccagcttcttcgcctcggtgacgatatcaaagccgcctgcccgcatctcagcagaggtatcccgccgccgggcattttctgcagctcggatcgccgcatccgcccagactgccgggctttcctgcaagctcaggtactgcatctcgggcaggacctgagcctcctgcggcacctctgtggaacagatgaccggcagtgccgccgcttgtgcttcgatcagcacgatcccaagcccctcataccgcgagggcagaacaaaggcatccatggcctgatagaactttgcgggatcgctttggcggcccagaaaacggacattctcctgcagccccagcgcctccgctttccggcgggcagcggcctcgttttccccttctccgatcagcagtaaaacggcatccggccgttgcttgcagacctccgccattacatccagcagaaattcgtgattcttggcatagcagaaccgcccgacatggcccagcaccagttcatctcccaggccaagctcctgccggacggctttccgtttggcggcatcataagtaaagcggtcgagctcaatggcattgttgaacacccggaaaggcttttcaccataaagccagctgcctgccgttctggagcaggcacagagccgggtgggatacactgcagcaaagggacggagcaggtacttcatcacattttttgctccttctcccctgcccaccgtagaatggttatgcgcgatccggttgggcacccctgcacgctttgccccccagagggaaagcacgctcagagtgttcatgtgggagtgaacgatctggtatccgttctgacggaacagccgcccgatctcccgttcatactgcggcaggtgggtatattttggcaccacatacacccggccgcccagccgttcgatctcttcccgctggggcagagtcgagcctttcagcgcaaaaaaatcaaactgaactctggaacggtccatatggcggtagtagttcatcaccaccatctccacaccgccgtagttcatatccgtcatcatctgggccacacggatgggctgtgcattctgctccatggtcataccagctccttgcggtcacaatcctcgaaccagtcccggaagctctcctccagcgtatagtggaacttgtaatcggtggcggccagctttctgccgcagacattggtggataccatcagtttccggacacgggcgggatggatgcccacctttttgcccccgatgggtcccagaatgcccgccgcaaacagcagcagtccggcgggcaccaacggcacatggcggtgcaggccggtcgccttctgcattgtatcgcagatttcttcaatggtataagccggctcgtaagtacagttatagatctctgctccggggaaggaatgatccagcatccggtacttgaagaagcgcaccagctccttgacatagatgcacgccttgatggtgtccttccggccggcatagaaaaagtagcctttcttctgccccctgtacaggcgggtcatgttgccgtgctcccctttgccataaacgatgcctggccgcacgatggtcagctcccgggccggatcacgggcctgccagatctggtggatcttttctgccaccagcttgctgattccatacggcgtgttgggagttggcagagtctcctccgtcttaaggtcctcagacgcgccatagggtgcaatggagctggtgaacaggatcttccggatgccgtatttttccgcaaatgcggtcacattttccgcgccccggatatttgtttcaaaataggcttcttccgggtggccgggggtgcggtggaccgctgccagatcaaagatcacgtcctccggagtcggaacgaactcaaaattgatgggcttgcgcacatccagccggatatactgcactccatcgttcttttccacaatgcccggcaccacgccctcttccccgggcatcacaagatccaggtcgtagatcacgtcgccgggtctgacgcattccttcagcagcaaatgaatgagatgggtgccgataaaaccagatccaccaaaaagaatataattcattttgcccctttccggtcaaacacaacgcccaccgtcctgaacagcaggtagatatccatccagatggaccagttgtcgatgtactggacatccagcttgaccacttcttcaaaatcatcaatatcgctgcggccgcttacctgccacaggccggtaattcccggcttcatggaaaggcggcgcttgtgatggctctcgtactgccggtactcatccagcgtgggcgggcgggtacccaccaggctcatggagccccgcacaacgtcaaaaaactgcggcagctcatcgatgctggtgcgccggatgaagcggcccactcgggtgatccgggggtcatcctccatcttgaacatcaggccgttcatttcgttctgggccatcagctcctttttgcgtgcctccgcgtccacatacatgctgcgcagcttgtggatgtagaacacacgtccattccggcccacccggcgctgcttgaagatcagcggtccggggctttccagcttgagcgggatggccaccaacgcaatgatggggatactgatgatgcaccccacgatgccgcctacgatatccatggtccgtttcagcacctgatcccgcagcttgagttccaccgtgcccatcgtcacaacattgccgcccgcacagcggctcagttcccggctgatgcgcaccgcactggtctcatcgcagcaggctttttcgatccgatccagcaccggcagacggaaatggaccgtcagacccatgctctccatctcctcgaggtagggcagcatgttttcttcactctcctgcgccacatccaggtacacttcatccagcgctgcctgccgcagccagtccatgaaattatcgaagttcgcctcgatcttcaccccatcgatctcagtgtgaagctgctccggggcagcttccagaatggcaagacctgtcacgcgcttggaccagtcctttttcagctcttccagaatggggcttgcgttctcctgcgtagtcaccacccccacaaggctctgaatccccttggtatagcgggagcgtaccagcatctttttgaggacagcatgagcgcccgtcatcacaaagacatcgatgacgggcacaaacaccagaaaatagcgggagtgcagcatggaagccttggtcagcgccagacaggccgcatcaatgagagtcagcaaaaaattgaaccgcaccgcaatttcaacttcacgaatcggagtgcggttcacgatattttcgctctgatcaaatgtaaaaaaggtcaggatataggccagcagcaataagaaacaggcttctaccagatcgtccagctggaagtcccccatcttgtgcagaacacctgcggtcagcccccacgccagcccaatgctgagaaccagagagagcagatcaatcagaaacaggtatccatactgcagtttttcacgtttcgtaatcatactgtttcgttgtctccatttatttttaccattttatcatatcgggagaagggttgcaatagatggagatcgaatgcgtgctgcttttgtcggatcattacgaatgggtcgtaccattttacgaaagcgccttatcgcgcccaaaatggtcagcaaaaagcgccctttctctcgcatcacacaagagaaagggcgcagtcaagctttattcagctcaggagaaactccgatcagcagttctcagcgaagtacttaatggtacggaccatctgagaggtgtaggagttctcgttgtcgtaccaagacacgacctgaacctgataggtgtcgtcgcagctacgctgaatttttgcacttttccaagtagttcttcacagtttcgtaacaacagttacagtaccagaacacaccgttgtcgtaccaaaaccggtttgttcgtaccacaattatatcacgtttcagcgtcatttgcaaggatttgattcgtttcacttatgacctgcatttttcagatttcagcgtatatttctacgacattccacggttcaaacgccttgggtctagggcttccgccggggcagcagctctcccagacactctcctcagaagctctatgacagctagattgccaacatgttcctgctgattaactgaaatttctccggacgtgattttgagccatggtgtgggaaatgtagtcatttcgttcgatatagaacagttctatttgttcaaagtcacaccaattaccatttatataagaaaaccgtatgaactgccagaactttagctctacgctccgactgatccacacggctctaaaatatttatttcagctttgcgaggatctcatctgccgtcataccggatgccagcagctttttcagcacatcctcagcttcggctttcttcgcagcttcggtagctttggtttcggctttgacctttttagcctcgattctggcgatttccttgtcgatacatttcagctctgccttctttgttttcaggtctgctttcagtacatcgatattagcggtgatggattcgatttcagcagcagcggcttcctttgcggcctgcttttcagcgagctgtgcagcaaagtcaacggttgcttttgcggtcttgggcttgttcttgcttcctttgggacggggcatatgggacacctccaatgtttttttgatggcttcagtataacactcgtcttttatgttcgcaagaggtgcattctgcagaataaaaatataatttgattcaagcaatgtgaagggggtgctcaactgcacccggcaacaactaatatttgtttatatcttctacttctgcttttgacgcgctttagtaggtttgccgcgtagatatctctgtcaactactgcgctagaaattttcaagttgcttcagctttgcaaggatctcgtctgcgctcacgccgcttgccgacattttctcagtttccctttcacagggataacgatcttatcttatacaacagatccactgaacgaattttgaacatttattaaaccaatctgaggctggagactcaactcttttataattgatatttctcttttcttgtttagttcatcgtttccctttgccgtcaaaatatgtcccgatatgcctgcatccggctccacttttttatatatcccgcactttcgagttcttctatgtatgcattaaacttttctttggatatgcctaatatatgctcatcaataaaccgttctctctgaattgttcgcaagagtgccctgtaataatccaaactgccgtcgatacgtttgcgcggaatataaggcttttcaatatcgggtaacagcagcgtctcgccatctacacacatgccagtaatgtatctttataaacataagaccaaaccgtatttttgctgcagctccacttctttaccgcctcatcaatagtaatcatcagtaatcatctgaagccctctagtatcaattcaaatctaataatttcaacttatattctagccacagaatctcactgtgttgccttttattccttgattccctgatactcctgctgaacctgctgatagctttccagattgccaatgtcataccgcttgcccggcatctccatagcatgcacatccgttactgtgcacaaccatgcaataaagctgcccggagcatcggtaccgcacttcttctgtgcaattgcatctttgacctttctggcatctgcccgagtgtacacatagaagggagggcagcaccagtggctcttgggctgggcaggcttttcttccatggaaaggatcttgtcctggtcgtcgagttccaccacaccgcatttggtgagtttcttttcgctgggctcataatagcgcatgatgcaagaggttttcttctcgtcggcataggcaacaaatctggagagggagaaatccagcacgttatcaccggcaatcacaagcaggtcatcatccagccccaactggtcaatggcaaactgcacatcacatacagcgccaagccgggtctcattgctgattgttccatcgtccaccacccggatattctgtttcttggttgccgcccagtcttcaaaatggtgggcaaacttgtggttgctaatgaccacataggtatccaccaaaccagcggtgtcaatgtcatccaccagccagtccaatatggtcttatcccctaccttcagcaagggtttgggaaagttttcggtcaatggatacaggcgggttgcgtatcccgcggccaaaatcaagcacttcatattagtcctccgtcttatgccctacgccgtccgcactctcgcacagatggaaactgtacttaccacgcatctccgggaatgcagtgagatactttcgttccacttcttcccggatgtcatctgccttattgggatcgatcaacgccatacagcaccccttaaagccagcaccactgaagcgcccaccgtaaatgccagcggtctccctcataatctcgtagagtttgatctgctccggcgcaccggattcccagttgtggatactgctccatccagattcaaaggacaggcgtccatactcttctagatcgcctcgccgccatgcttccgcaccggcttccacacgcttgaactcggtataccaatgttcacagcgtttggcccattgcaccggcagcttatctttataggtctggtagatttcatacgaaacatcacgggcattggcctcattgaactttccgtagtcaagacccgcaaaagcctgcaaggcgtaaatgcctgaacgcaactcatccactcgcatattgtatttagagccagccaagctgtgctccaaaccgctgaaaaataccgcaatcttgtaaggtttcatgttgggattcgtggaaatcagctcgtagctgttatccttacagtccagatacagcaagtggtcttttttactcagaacctcgcagctctgatccagggttcctacattaacacccacatattttttttctgcctcgaacgcaatgctgatcagcgctgaagaactcagcttgattccattgacctggcatagcgcctccaaaaaagacaggatcacagccgcggaggaagaaagccctccgataggcaaagagccctcaatgacaccactgagtcctactgtcaacggaaaccgattgctcagcgcccaagtcgctccccgcaggtagtctgcccagtcacccgttttttcgccaatctcccggatatgccactgggcacgtttcgggaattgaagactgcacatttcaacaacgccattcatctttggcttgtatgcaatatggattcctttatcaatcgcaagtcctgtgatctttcctaagttgtgatcactgtgggcaccaacggggcaaatccgataggggcaaaagctgatgccaacgggatcttttccatatatttcgtagaatctttcctcgcagcgcatataattcctcccaccgccttattccatatagaactttttataccactcagcaaacttccgcaggccatcgcgcagcggagtatgaggcttaaagccaaaatcacgctccagcggctcggtgtctgcaaaggtgacaggcacatcgcctggctgcatgggcaccagctctttgtgggcctcgaaatcatagtccgcaggaagcacaccggcacgcaccagctcctccgacagaatctgcacaaagtccagcaggttctccgggttagaattgccaatgttgtaaaccgcatagggaggaatgggcaaaccatcttcgccattcttcttttcgggcgcttttgccatcacgcggacaacgccttccacgatgtcatccacataggtaaagtcacgcttgcagttgccgtagttgaaaatcttgattgtttcgccgttcaccagcttgttggtaaatccaaaatatgccatatccggacgaccggcaggaccatacaccgtaaagaaacgaagaccggtagagggaatattgtaaagtttggagtaggcatgtgccatcagctcattggacttcttggtggcagcatacagggataccgggttgtccaccttatcgtcggtggagtagggcaccttcttattgctaccgtagacggagctggaagatgcatacaccagatgctccacgggatagtggcggcaggcttccagaatgttgtagaagccaatcatattgctctcgatgtaagcatccgggttggtgatggaatagcgaacaccagcctgagcgcccagattgaccacaatgtctgggtgatgctgctcaaaaatactgttgatgagagctttatccgcaaggttgcccttgataaaggtatagttctcgaacttctgaagctctgcaagccgagcttccttgatacgcacatcgtaatattcgttcatgttgtccagaccgatgaccttggtatccggctcagtggccaggatacgttttgccaagttggaaccgatgaaaccggaggaaccggtaatgaaaacaacattaccctgcatataaacaactccttttaaacttttggattgaccattggcagtgatataagctctcttacacacccatttatcaagccagtctttgatttttttcttttaaatttcttaacattgatttaatcacatgaaccattgggcgcaatgctgcctttatcttattttcatagaaaatatacattttttcatccatatattccacaaacggaattccagtcttttgttttgcgtattctttaaaatctacaatttcctcagaatattcttcgcataaagttttcagctgatcatagcaatctttcttatctggtcgtttccattcatgcgcgtgaaatacagccgtataacatccatattttccaattcgagggcacccacctgatcgacacggaatacatataattccttcacgaacaaatggcttactgctttttccgtctgaaacgtatttaaaaccatttgcggatagcgctcttaaagtattttcatcataggaatgtgctggtgcaaagaaaatgtctgttttgattccatgagaagccagtatttcttttccttttcgaattttttcatattgttcctcatagctatgtccagcaaattccgaacggaatgtatcattcacaattccacgtacagctgtgtcatatacatgaagatatccgtgcattgcaattgcaaaaccatcagcctgtaacgacttaaggtaatcccaaaaatccctctgcggtggatcaattaataaatctggatcttgacagtctggaattacacctatcagcggtttcacgtgatacagctttaaaattttcatcgcacgattccactgactccaatccatcgttgggcagatatcatcaaatcgaactaaaatctttctcatctttaaatttcatctcttcatttttttcttttgatagagctttgtcgcaggtattgagggaaaccacatcagataaaacagacacttgttttttattccctttagtgcacatccttttcgaaatttctgttgtgtcgcatcctgacgcaaaatatggttcatgatacagtatctcagcaactcttttgcatagcttccgccatcctgataaatttcccaatcattaagaaactgtgtactctcccatagtgcatttttacaattttgaattgtctttttatgccctgcggaaagtccagacgacaagtgatcattaccttcttgatgataaattctcaacatatcattaatgtaatacgcacaatatgtttgatccaactttcgccacagaatattctccgtcataaaggttacgccctctggttccgggaataaatttcttttcataacatttgctacaaagcacgcaacatgttcttcaccagattcataacaaatcttccgcgccttatcccatggaagctgatttatattttggggaaaaggttgacctactctctttccagattcatctttgcattgtgcaaccacttcccggtactttgccttatcaacatgtggaatttttttccatgtatcccaaaagaccttcaacgcttctgggaccaactcatcatctgaatccagatttatcaaaagttctcctcgtgcatttttaaagccaagatttcttgctgtatgtactccaccattctccttcttaatatacagcactggatgttttgtggtctgcataaattgttctaccactttatctgtactatctgtcgacccatcgtttacaatgatatactcccagtctgaaaaaacctggttttcgattaaccggattgtccttaacagcgtatcttttcgattatatgtcggggtcaaaacagttatttttacatccctattttcatcccaatatttgtttttgtactgttccatttttgttttccccaaaaaaattgcaattctattaatttgcgctcacttactcatcatttttcgcatcttttgctatacttttgcacgtaaagaacaagcagcataaagattataatcctcgttgtatcgtccaccaaatgacatcttaaatcgatcaattccatttggttcatcgtatgaagcaatcctacaccagtcgtattcctttactcccatctctttcagcaaaagccaatcattccagtgaagatatttatttgcccgtccaactgtatttcacattgaaatatccaaaattaatgtcatttgtttctgcgcgacacacggatattttccagttcgtgaaagcttaacttgatttgcattgacaaacaaattgtcataccctatcttaacactctctgctgtttcaaaccaaactcaattggaaacaaataatttttctttactataaatttgcctcatactctcctatttattttttgtcaccattgttaatataatttgaactatcatttgctttgcttctgtaaatcgtttcgttttcagaaacgcaacccaaaacagcgtacctgcaacaaccactgcaatcagcccacacactacgagctgtacgattccgtcaaaaggtaagtaggtacaaattacatatacgattgctgatgatgtcaatgcaattagcgcatattgaacctgatctaagttgtaacgtatttcatcttttcccatgaaatatgttttgaatagtttatgtgtccgaacggaataattgaatatagcaattgtaaatatcgtcgcacacagaatgccagtaacgccaaataactttcctaatataatattcaagaataaatttccaaatgcctctagaatataactccattttaaagcgttccacattcctgttccatcaatatactggtttctaatattgttcatattgattaaataaaaatacaggcaaaacaacagcatatctctatccgaaagcatcagtcttcttccgacccaaatttgcataaatggttggtacattgctaccatacatgttgtgcaaattatgttcaagccagaaaatagaaattgaaattttctaaggtcatgataatttttttctgcagactcacaagaaatactattaccgacacttcctgccaatgagtttcctataaccgagagaacaccgtatacggcagaataaatataataatagtttccataaacagtagtttctacaaggccaaaaaaagaggagatgacaatgctatcaaatgaattacgaaaggtgttgcagagcctgtcaatcattaacgcctttgtctgctttttcatctcttctggaacctttagcttcagatttttctgacagacaatattaggataacgcgccttcgtactcttctgaatcagaaaattcgaaaaaattgttcctacaatttgaatcactacataactatagaaattctttgtaatcagcagaaatgtaaattgtatcagataacggaatgtatctactaccgtgcggatattgtttgtaatatcactacgctgatctgctaaaaggagagtttctttatatgcaaataaatagtaactaatcgttgaatttacaaggtacaagaaatacaaagcgtacagatcgatttcctgtggataatttccactaatcaaataacgaagaaatggcataatgcagagaccgctgccaaagacaacagttccaacaatattataaactttacgaatcaacgtaagatagtagcagaccttattccaattctgttccgccattggtttatacatacaatagacaacagctgtattaaacccaagttcggctagattcaacacccccagaatcgatgtaaagagactggaaagacctgtatattccgcacctagaactgtaagaatcacggttcggttaataaaaggaagtaaaattgtgactcctcgattgatcaatcctgaaaagatatttcgtgttgtatttttagttctactatcagacatttctcatggcctcatcatacattttctctagttctttcacattttgcctgatgtcccattcttgcagattctcatattgaataggtttatcttcctttgtcaacacaagtaactcattcgcccaagcctttggcccttgatctaatcccagaaaacgtattttatttgagacctttgccgtttgaggcaccccttttgatgcaacacatggtaagcctgctgcctgcatttcaatcactgcaatgccgagaccttccgaaatggatgggaagagcgccgcatctgaagcaagaagaatttctggcacatctttgcgatcgtgcaatatcattgctgacttttctagatgtttcttattcagctctatccaggcttccttttccgtatcgcctttgccaaccatcaacaagaatgcttcgggcttttttttcttgatttgttcaaacacgtcaattaaaaaaatatgattcttgataggattaaaccgtccgatatgaaccactacaaacgcatttatcggcacccctaattctttacgctttttgttcctatctatgcattcttcataccggcttaaatcaataccattatttaggacagctgtactctccacattaaataatatatcgatttccttcttcatctcctgcgtaagggcaatgattcgtgttggataggttcgaatcagctttctcatcgcacgaacgtctgctttttcttctttccatctggcaaccgtgtgatgatttgtgtaaaaaatacgggttgtctttggcagtcggcaaaagctcacatatctatttagttccaaatgtacatgcaaaatatcaggttttaatgtccgtaaaactttacgtacttcaaaataaagttcatagtgatttacaacctttgccacaagtccctttttatatcccaatggcatccggtctcgtaaacaaatcacctggattccagactcttccagcatcttttcgtagggtgaattttcatgattcaaacaaagcactatagtttcaaatttgtttttatctatcagcaatgcatagtctttcactaaagtctccgcaccacccatatttaaaccatgaataaaatggacaactttaatcattaggtttcacctacaatattatttgttgaatctttcagccactcgattccgccaaaaagaaaaatatatccccaaattgatatgatggcatacggcctttgatacaaggatataaaaaagaacattacgtagatcaaacacattttatcttgtttgctacatttcaatgccgcaaacagccaactgcccaacagccaacttgttcctacaattccaaacggaaccataaaactgcttttatagcttgctacgccggaagccaataccgctccgcttcccattccaaaccaataatagatggaatttgaaaattctgcatattctgcatcaaatacactgttcgttcgattgtcccctgccaatccagactttgtgatggcaaatctacccacaagctcatttatcgcattattatgaaaatctatgtttggcaacacgaaaaaaaacatcaaaataatacctataataaaaataatattggaaggcttttttcgacaaagataaacagccacgaatcctaaaatcagcagtgcaaaagcaaatgaaacggtgagcgctcctgcagtaagaagaagaagtttttcccaccatttagttttgctaaatgtacagataaaaagtaaagcgcatgcagttcccaacgcaccaggttcattgaatattccgcacaaccgataagtgtgatcaccataggtataaattgcaaatatgccaaatttgtagtaatatgccgtttccaaaccattttgagtataaaaaagaactctttgaaatccggcacgattaaatagaaaaaaatcaatccataaaataatagatatgatattattaagctggataatttgatagacacattgaaatatttgtttctttactcttgttggtaaaagaacaaatattacggacgtgaggaaggtaagctctccaccgccctgatagctgccgtaagagtgcaccatttgcatcaaccagtatgataaaggcagtgttaccaataccaaatcatattgttttacttttcgttcacacaataaaaacagacatccaatcggcacacatagtcttgcaatgtttagcgaaagaaacgcatatattggcgagtaactgtctttatcaaatgccaaataaagactcctgcatgtatacatcgaaaaaagcaaaatcagaactgttccgacaattttttttaagccagttcttttattctccattatcatttcctcgtgacgatttttttcgcattgtagccctcttgatgtcatctagacaaacaaattatatcgtggacatagtctttccacatttgattaaccctgtctggcttaaatgtttcggcatgccttttttccgtcatgccatctttagtggtttctagaactttacaaatcgcttctgccagttgtgcagaatcattgcacggaaccagtttatcggaagcatcctctccaaatagctcccttggcccaccacaaggacaatctgtagagatacacggtacgctggccgccatcgcctccatcagtgcattgggcattccctcataatcagaagaaagcacaaacaaatctgccgtttggagcgcttttgctacatcattggtggctcccatcagaaaaactttttcatctagattcagtgactcgatctgattctggagcttttcccgaagtacgccttctccataaatttttagtgttgcaaagggatagattttttgcacctctgcaaatgcgtctatcagcaatctgtgatttttctgctctgtcaggcgaccgcaggtaacgatctcacctcgcactggtgtgcgctccacttggtaaaactcttccttaacggcgttatagatgattcgtgattttttctgtaagcgctccggaaaccacttttgtgcatcgcttgtctggaacacacagccatccgccatcggaagcaacactttgcctacaaactgccctatttttcctgcatattccttgttaggatcattccgaacagaaaccagtgtttttacaggcaatcctcttgtcgctaatattgcacgaaaattcggctcttccataaatgaaacaagtatgtcgggcttctcagatttgcataaatctctcaatttcttgattctgctaaaatttctttttattctggattgcttgatttccacttcttccagcgtaagccgtcttacagtcgccgcaagcggatactcccatgtatcccggaaagacgtgaccaaagtagtgtcgtatccattttcagaaaaatattttgccaagttcaccatgacacgctctgcgccgccgccatttatagcatttacataaaatacaatcttactcatgtctgttctctcttgtgaatattcgtatattttttacaatcaaattgttaaatatgtctctttatttgattctcgatttcgacaaaaaaaggtccaatatcctttgaattgaaaatagaatgcgaatcagctttagcaaaatcagcaaaccactccaaggtctttttttgtgacagtgcgacctttaagtcattaaaatccggaataaatcgaattgagttgctaaaagtcattggcaaattcggtagttgcccaaacaccgaatagtagcaccatataaacggaaggtttacgccagcactctttacacagtaggcgtttccatcgttgcgcatattaatttcaagaaaataatccttattattttcatcacggatgaactcaacactaaataagccgctataacctatctttcttatgaattcatgaactgcttctgaatcataatcaagaccttcaatcggcgaatactctagataacccgtgtttgtattgcgtggctgccgcaaaatcctcgtgtacccggggataataatcgtctctccaccatctagggagcatccaatcaactggaattccattttctttaaaatgaactcctgaatttgaacttctttggcttcaattttcccaagtatggattccaattcactataagaagacgcaatgcaaatatcgcatttccccgcaccaataacgctttttaagggctttgttatacacggaaaccgattccatttaaaatcgtttccctgtgtaataacggtgctttgaggaacatgaagtccacaacttattgcaactgcatcttgcacatttttttccattaactgactaatgtcaattttactcgatggtaaataaaagttgtccgatagctcttgcttatttgatattactacctcagaggctccatcagagcagcacacaaccacccttttttttccatcctccgccagttttcttaaccacatgactattttttcgcaagactcattgtgactgacattccgtgctaacacgtatttactggtagaaataatgtttctatttgtaatatggtctccgattaggagcacatgtatattttcttttttgataccctgctcacctaaagatcgaatcacgccgagtgtattatgatgaacccctccaatcacggcaacgtgtatgcaatctattttgtttttgtccatatccataataagctccatctgacaagctatgtgtcatcttctcaggaaatacagttcccgtaaagccctgtccaacagattccgccctctttttttgcctacagtaatcgatattctaaaactctcggcgttttttttgagaaaccgttcaagaacatcaaaatcatcatctttcatcatattgggatgatagcaaaacgtcaccactttaaacggtagctttcttacccgcccagactgttgcggaataaaatagaagttgttttcaaaatacacatcatttgcaatagtatcgctgatgattcgaatatcggattcttccttcaaagccaccagtgtattttcatcaaatgtatgtgaaggagcaaaaaacactttcggctcaatatcatggcctttcaaaacatcaacaccgtgccgaatcatttctttctgcttgtccagtgggacacctgcaaattcacttctttggtttaccgggttgatgccaccttccttggtcgtgtacttgtgatagcaaccatgaagtgccagctcccagcctttttctttccagcatgcagtcttatcccagaattcagggtcttgttcatacgtatcggtaagagatgaatcccgattgtccggaataactccgaccaacggcttaattccatactggtctaaaagttcctccatccgctgccacttttttacatccatataatcggaggcatcgtccaggcgcaatatatattgactcattttcttgccctttcatcctgttccagataaaaactttgaagttgctttgcaaccactgttgcatcaaacggttgcagcttcgccatattctctgctgtggcagcaattcgatgttttctctgaagattcgcaacatcacaaagccatacttttttatcagtcaacgtaagatacttcactttgtctgtcaaatcaacatcgtgtgttatcacgtcagacaggagacagggaagcccatttgcctgagcctctactacagaaaccggaagtccctcccacaaggatggaaacacaaatacgtccatgacttggtaataatcctcggtgttggttttactgccgaccataataaccgaatcgctgattccaagctgcgtgcactgctgctgcaccgtttcgaacaactcgccatcgcccaccaaaagcagtctgctattggggttctcttcgtggtactctgtgaacagctccaccaagaattgatgattcttgggaactgtgaaccgcccgatgtgtcccagaacaaaagtatcttcggcaattccaagatcctgacgcatctgctgccgcttttcctcacaaaacgcaaagcgcctcaaatctacgccatttggaatcatccggtaattcggctgttccgtagccttttctccatacaaccatttgcctgctttgtcggaacaagcaaacaaataatccgctgtatgccgaattggaagtcgcaacatatccttcacgatagcagaaatgccacttccgtttgaggtgctatggctgtgtgcaattgttaccagtccatgcttttttgcaattttcagatagatagatgccgtactccgcacatgtccatgaatcacatgatattccggatgttccgtaaagaaatcatcccaccacttacagtatgcaaaatggtttttcccagtatactttgggcagacaaaaattcgtcctcccatttgttccacctgactgtataaatctttcctttcctctggcgtaacaacaaaatcaaattgaaccttttctcggtcaatgttgttataaatattcatcacaaaagcctgtgacccgccaaagtgaagacttgcgatattatgtaatactctgattgattccattatgctgctgccgaacctccgttgttcgtttttgaataatcacgctgtttgccgggaagtcccctttgacgactctccctcccccgacgacagtattatccccaatcgttgttccccggagaatcagggcatgggcacctatccagacattgttaccaatcgtaatcggtgcagttttgaatttcatagctgaaacgcccccctcagcctgataatcatgatcttgatcataaatcagaacattaggaccaagcatcacattgtcaccgattttaatatggtcgtaggcagtaacaacacagccattgctcattccaaagtttttgccaatttccagttttccgcctttgcgaacgcggatctttgcgccattatgcattttcaactttttcgcaatgcgcagttcggattttccgtctatggtgacttcggtcatcggcgacataattgccggaaagacagcatggaaccgtccaccattctcaatcttcaggatggcatacttgattcctgcaagcggaacacaaaataccgccttgatgtatttattcatcgttcccctccaacgcttgaatctcttccaagtaagctttcaccacgatttttcggtcgaactcccgttccatctttacacgaccggccagacccatggctttccgctgctctggcatcatctgcataaaccgttccagcgcatggactagagcttcctcattctgaatgggaatcaggaatccggtcactccatcttccactgtttcccggcagcctgcacggtctgtggcaatgatgggtcgggcactggccgcaccctccaagagcacgttgctcattccctctggatagtaggacggatgcacgatgcagctcgcctgtttcaggaatggaatcatatccttctgctggccatgatagaccacatctccagcctcctgtgcctgcttcaagatctcttcataggcaggatcgtcacaaccgccgcagatatggaacaccgtgttggggtactctgcatggatccgtttggccgcagcgagatataggtcgatgcccttctccttcaagattcgggatgtaaactggaaatgcactgcctcgccgtctggatacggaaacgctggatgactctctaaatctacgccagatcccggcagcaatcggatcttcgcatgcttcggcatcatcttgtgtgtttcaaaaaagcgctggttttcgctgttctggaaaaaaatgcagcttgcatcagccacacccaccttgtaaagccgggtcgtcagtgcctgcaaagggcctggattttccaccggggtaccgaggccggttacattcggaagatacggaatttttaattgctgacatgccatgccaccatacacgttcggcttgatattatatgtaaggacaacgtcaggcttttcagctttcaaaattctcttgtaagtatgcatcaactgcaaatcagagataggattagtgccatgacggccggtttcaacgccaatcaacttggcacccagtgcctttaacttatcctgatgcttcaacaactgaccgacaattaccacttcaaaatcttcatcaatcaacttctcgataacggcaccacgcaaattaaatgcataggtcgtatcgttgatcaacataattacctttttcatttgctgctctcctcgcacttttcctgccccatcgccgtggtcgcaccttctgctacaccttccgtgctctccggcatgaacaaaatcttcaccgttgccagcatgattttcagatcctcaatcaggctgggatgcgcaatatacatcaaatccatctgcagcttatcgtagggggtggtgttgtacttgccgtacacctgcgcataaccggtcaagccagcctttgcttgaagccgtaacgcaaactctggcatctcttcgcaatactgagcagcgatctcagggcgttccgggcgtgggcctacaatggacaagtctcccttcaagatattgagaagctggggcagctcgtccagacggcaggcacgaataacgtggcccaccttcgtgatgcggtcatctttatcaccggtggaaaggcgtgctacaccatccttttcagcatccactcgcatagaacggaacttcaggatctcgaacggtttgccgtctttggtaaggcgaacctgcttgtaaaaagccggaccaccatcggatttgactgcaatagccgtaatcagaaacaacggactcaggataaccagtgccgccagtgagatcacaatgtccattgcccgtttcacaaacagaaattccgggcttgccatatagcgacccacacgcagcatgggcagatggaacatatgcatcggctgggcaccgctcataatcacatcgcccacacgagggatcacaaacacattgatgccctgtcccacacagtatttcaggatgatattgcgctcatggctgtgaacaccgctgatgaacacgctctgcattccatccagtaggctcaggtcgttcaggcattcctcaacgttcaaggtcatcttgacatcgtactttttcgaaaggccatattcattgatgagcttttccagaccatgccggacatcgtagaccactgccgtgggctgaggcggaaaggtccggaaataccagctatgggcgcatcttacccacagggttgccatcacgacctgtccgacaatcgccgcaatgcccggcagaatattgcagagccgccgagacatcaggcagatcacgatatacaggatgccgtctgtcgccattgccgccagcacttgcccataaatcaactccgaaatgcgttgcaaagacatccagaacgcatcgtagacttttcccagcaggaagaacaacaccgcaaacaaaccgatcatggtccagttgcccctccagccaaactttgcatagacctgatacgaataatacaggtcccaacagagtgcaaacggaattgtgatcatcaccaaatcgatgatttttacgatcttcaacatcacatcatgctgaaattttgacataataccccaataactcctttagctttttcttttgctcttcgctcaacttttccgaccagctttgcagcagccgtttctggttgtacacccatcggctcagccaaatgccatccgcagtcttgtattttgccggaatatccagattcccatgaactcttttatattcctgcgctagctcgtaccggtgctgccacgggtcatgtttctcccactgcattccgatggcatccaacaatgcaacgcgctgtggagacaaaatcgcattgcttttctccggattccgatacgcatactgctgtcgccgcacccattttccaagggcatagccctccggcgaaacataggccaccgggacatcaaggtctccatttgcctcaaaataacgcttggcggcaccatagacctcgttccactggcggtcatagcgactgccccactgcattcctatggtttccagtcgtttgatctgatccgcagacaattttttctgctcataggctagttcttgattttgaatccagcgaccaagcgtttttccatctgctgttttataatctcgtggaacatccagatttccatacttctgcgcatagactgccgcaagtgcgtacccctgttcccatcggacatcaaataccttccatgccatccccaactgatccaactgtcggatgcgctcttccgtcagctttccatcgtttcggcgtttccgcgcattgttgatccactttcccagaggatagtcatctttcgttttgtatttcgccgggacctgcaaattcccaaactgttcccgaaattttctcgcttcttccagaccacgttcccatgcggcatcgttgcggttgccccactccatcccgatgctatccagccgtgtgatctgctgttcggtcaagttccccggaatctgtcccacacgaacacggcgctgggtcgtcagccattcgccaaggctcaaccccgccggtgtggtataacgttttggaatattcaggtcgccatgctccgcatagtaaatgcttgcttccgaaaaataatgatcccaactggaagaaaggcttgcctgcaactgctcaaacagcacccggcagtcatgcacctgctcaactacctcgaaccgctcggtgacgatcttatcaccctcgccgttggcatagagccggtgaacggcctcctgcatctcgtcctgtaaccccgcaatgctgcatagaccctcgaagttgttgactacatcaaggataagcggcgtagaattttctccagcggtcaaagcgcggccgatctgctgcttgtagatgatgggtgaaatggtgggccggaacaggatgacacctgaaatgccttctacatgaactccctcgttgagcatgtcgatgcaaaacagcagcttcagcttgtcgctctcatccgtcttgaagtcggcaaaagccttgtctgtaccggggtcatccgagtaggcttcgtaaaccgccacttccgcattcacctttgcaaaccactccggcacatgagagatcatttcgtccatgtgctccttgttggcgcagaacacgatgtactttccggacttgttcgtgatatgatgagcgaaaaccttatctaatccatctgcctgttccaaggcacggcgcagggcatccagatatttttgattcacatcctgaatgccgggagaacgcagattgtccactctagtctgatagcgtgccaagtctttctgatattggtagaccgttgttacatagttcggagtaggcaaaatacccctgacgattgcttcgccaagggtcatgtcgctcgcaacacggccatcaaaaagctcttcggccatgtcgcggttattatccagataccggatgtttgttgccgtcagccccagaagttttgcattcggacataaccttaataaagccaacgtgctttcgccccagcattccgcgccggcacggtggaattcgtccaatatgatataagagggctgaagtcctgcgatttctgcaagctggccttcggtacagtacatcagcttcgcataggtgtaaaaatggacgtttgccaacggaaaatccgggtcgttccttttcaggctctccagctgggtcttgaagatatattcactgggagaaagccagatcacaaccttctccgggttgtcctcgatcagcttgaacgcaatatagctctttccggtaccagtgggatgaacaatggcggccttgccatactgctccatcatccggactgccgcatgatatgctttctcgttgtgttcaaacagacgcagtgccaccttgttcacccctttccgcaattcaggggtatccttcacatggaaaatggaggataccgttcctttgacatcattgtctataatctcatcttattttatcatggttatatctgggattcaatagaaatcatcataaatgtatcacatttgaccctgaaaaaacatcgcgaaggccggattgtttttgtgtcatacccagttctgtataataattccagctgcaaacgaaaaatgagaaaataaggggtcagatgagggtctaaacagcaggaggaaacagcgatggcgcgacggggagaaaacattcgcaagcgtaaggacggtcggtgggaaggcaggtacatcaaagcgcgcacaccggaggggaagatccagtggggttacgtttacggaacggcctatgcggaggttaaacgggtactgatccagagaaaagcggaggcgggtttctacaatctgaatcaaaccgacctatcctttgaagtactggccgaggtgtggctgtactccctgaaaaacgctataaaggaatccacctatgcgcattattcgtacacgctgcacaaatatcttcttccgattttgagcaaagtgcccgttgcatctcttgaggagagctttctggagcagaccatgcagcagatcgtcacgcctacagatgcgtcacacaagccactgggaaactcctctgcccgggaatgcctctcgatgctgcgacgtatctgcaaatatgctgctcatttacgtctgattcgtccaatggagctggaagttgcgttgccaaaagccctcgacaaaatttctgcgcctctctccccggcggaacagcagcgacttcatcaatatgtacaggcgaaccctacgcctcgcaaaatcggcttactactggggctggaattggggcttcgaattggtgagatctgcggcctgcaatggggcgattttgacctgaaacttggcacgctgaagatcaaccggacggtctgccgaatttcctgcggaaacggtcatacaaaggtggtcatccaaacgcccaaaacccgcacctcccgccgggaaattccaatcccgaaacagctgcttattatgctgaaaaagctgcgcggaagtgccagcaatgctacatggttcctgtccggcagcgagtccaagccaaccgaaccccgctgctatcggaaaagcatcaaagcgtatctgaagcaggcgattgtccgtcaagtgcgcccgcacgcgctgcgccacacctttgctaccacctgtttgcaggcggggtgtgatgtaaagaccctcagcgaattgttgggacacgccaacgccaacatcaccttgcagcgctatgtgcactctgacctgacccgaaagcgcagggagatgaaccggatattctcccatcaggtgtctatgcggggcagaaaagcactgaatctgttggaataacgccagattttccccatggccctccattttccatgtggaggatacttttttcttttttgagcagccttcttcttaacgcaaaaaggcccctgcccatcacatttctgtgaaaggcagaggccttctgttgatagattttaatgtttcagcatccgggcaaccgcttcatccgtcaaaggcttcccgtttttgctgagaaacaggttcttgtggcgactagggtattcctttaaataggcatcccggaggctacgatacttcatcagctgcttggacagcgcaggcgactttggcaccacacgttccttgctgcccttgccatgcttgaccagaatatagtccggtttgatatcttccggctccatcaggatcatctcattgcagcgcatcccggtgtcgaacagtaacataatacagaaattcatcgcggagatccttcaaacacataaaaaacacccttcctctcacggaaacccgcaaaaggaagggtgttgaactcaatatcctgttgtcgtaccaatcacagcatgttcgtatcagcaaagccaatactagttgtcattcagcacggcacctcaagcacttttgagcgtagagctgtgattagcagttctcagcgaagtacttaatggtacgaaccatctgagaggtgtaggagttctcgttgtcgtaccaggacacgacctgaacctgataggtgtcgtcgtcgatcttagcgaccatagtctgggtagcgtcgaacagagagccgtaccgcatgccgatgacatcggaagaaacgatcggatcctcgttgtaaccgaaggactcagaggtagcagccttcatagcagcattgatggactccttggtgacatccttgcccttgacaacggcaaccaggatggtggtagaaccggtgggaacgggcacacgctgagcagagccgatcagcttgccgttcagctcggggatgaccaggccgattgccttagcagcgccggtgctgttgggaacgatgttctgtgcgccagcacgagcacggcgcagatcgcccttgcgctgaggaccatccaggatcatctggtcgccggtgtaagcatgaacggtggtcatgatgccggagacgatggggtaggtcttgttcagggtgtcggccatgggagccaggcagttggtggtgcaggaagcagcagagatgacctgatcctcagcggtcagggtcttctcgttgacggagtagacgatggtcttcagatccttgccggcgggagcagagataacgaccttctttgcgccagcctggatgtgagccatgctcttctccttgctggtgtagaagccggtgcactccagaacgacatcgacgttcagctcgccccaaggagcatcctttgcgtccttaacagcgtagatcttgatctccttgccgtcgacgatgatggaatcctcggtagcctcgacggtgtgcttgccctcgccgatcttgccgcagaaggaaccctgagcggtatcgtacttcagcaggtgagccagcatcttggggctggtcaggtcgttgattgcgacgacctcgtaaccctcagcatcaaacatctgacggaaagccagacggccaatacgaccaaaaccattgatagcaactctaacagccatgttaatagtacctcctaaatgttcttacccttttatcggataataatcacggtagctttattatagaccaaatcgcggaaaccttcaagtgcccgccaaaaaattaacaaggtaatttcacacttttttgtttttgaacgattttcacagcttttatgggaatcttttcagcaattcaaccaacggcgtgtcggggtattgcaggccttccgtcacttcctgccacccgcgccacagtgaaaagccccagcgcgccgatgcagcacatgccaaggccaaacagcacctcgggcaggtcggctgccgtgatgccgtggaacagcagcaccagcacccggggcagctcccagcagaagcagagcaggaacgtgcagatcccggcctcgcacagctggcagccgttggacgtttccggcagccaaagggcgcggatcatcgccgaaagaaacaccagcgcagccagcatctgccagaccatggcagtcggttccacccggtgccagctggagctgttctccataaagcggctcagcaccccccagtagaacaccgccgtgccaagcaccgccggggtcatgctccggccgggcagacggtattctcccttatgcgtccagctgcggcccagtcggatcagccagacagcgcacaccagctccagcacagcacgcaccagcgcaccaacgccggtcatgcccactgccagacgcaccgcaccggccaggccgacacacacgccgcccagcaccgatgtaactcccaccggcctgcaggcactgcgcagaacaaggggctggcgggccagcttccgggcggcaatgatgccaacgaccagcgctgcccacaggctgccgtaccgcagccagacagagcccgctgtgcacaggccggtgttccagtccgtccacagggcaagatcaagcccgcgcccaatggcaagggcaccaccacaggtgaaaatcagcacaaataaagcgttcatcagcgttcctcgatcggtttatatttctggcgcacgcccagatacttataggcgggccggatgatccggttggcaaaaataacttcctccacccggtgtgcgcaccaacccggcacacgggcaatggcgaacagcggggtgtagatatcctcagagatgcccagcatgttgtagatcaggccgctgaacaggtccacattggcgcacaccggcttgctgctgcccttctcctcggcaaaaatatcgggagccagccgctcgatgctgcacagcatgttgtactcttcctcaaagcccttctcgtaggccaggtgcttggcgcgctccttcaggatgacctcacggggatcgctcatggtatagaccgcatggcccataccgtagatcaggccggagccgtcgcccgcctgcttgcgcaggatgcggcgcagatactcgcgcacctcgtcgtcatcctccgggtgctccacatgcttgaggatatcctgcagctgacggttgaccatcaggttggcaccgccgtgcttggggcctttcagcgcgccaatggcggctgcaatggccgagtaggtatctgtgcccgaggaggacagcacacgggcggtgaaggtggagcagttgccgccgccgtggtctgcgtggaccagcaggcacatatccagcagtttggcttcctcgtgggtaaacttctggtccgggcggtaggtgctcaggatgtgctccgccgtgctctggccgggcttgggcatgtggaagaacatgctctgcttatcataatagcggcgcttcatctggtaagcgttcaccatcatagtgggcatactggcgatcaggttgatgctctggttcaggatattctccagcgtcagatcctcggcgtgctcgtcgtaggaatacaggcccagcacgcaccgctgcatcttgttcataatattgggcgaaggagcattcatggtatccataaaaccatcgggcagggcgcggtgctctgccagcagctcacagaactcgtccagctgctcctgggtgggcagactgccgaacagcagcagccagatgacctcttcaaacacaaagcggtcattgcggtaggcctcgttcacgatctcattgatgtccacgccgcggtagatcaaacggcccggaatgggaatgacatgcccctcctgatcctttttgtagcccacaacgtcacagacattggtcaggcctgccagcacaccggtgccatccgggttgcgcaggccgcgcttgacaccgagacgctcactcgtctccggatcgatgtagttgtttgccagatactcttcacacagcgtccgcatggtctgcgggtccagcgacgctacttctgcatgggtatagttcatgcgcaaatttcccctttctcttatttctctcttatatactttccggccatccaccatgatggcacacccttatgatagcgcttttgtgaagtaaattcaagtcttggatgaaatgtgcgctttttcaccccgccgtactggtacactgagcccagaaaaatgcctgtccgggagggaaaactacgatgaaaaagacattctttctcctctgcgccctgctgctggtgctgggcacactcctgccgatcgccggttaccggctgacactggcagtgttcggcccggcacagggggcttcttctgctcctctgccgggcactgcggcttcggaaaccgccccggacagcgccgccgtgccgccctccgatcaggacagcgagagctttctgctggccgaccagagcaccggggccgtggtctcggtgccccggcgggactatctgatcggtgccgtggcggcggaaatgcccatcaactggccggacgaggcgctcaaggcgcaggccatcgctgcccacagctatgccctctactgccgcgaccatgccgccgaaccagcttccggctggctgagcgtggaccccgtccggcggcagggatacttaacagatgcagtcctccgcagctactggggcaccgcctatgaggaaaactatgcccgcctctcggcgctggtggacagtgtgctgaccgatgtgctctactatggcagcgcccccgccggggcaagctactttgccatctccaacggcatgaccgaggccagtgaaaacgtctggggcaccgcccttccctatcttgtggccgtggacagctccaccgacctcaatgcggacaactatctttataccgtccaattcaccgccgaacagatgcagcaggctctcgccgggctgggcctgctccctgaccc

SEQ ID NO: 182 - DNA, 13675 bp, unidentified
  source 1..13675: mol_type = unassigned DNA
cgaacaagtccggaaagtacatcgtgttctgcgccaacaaggagcacatggacgagatggtgtcccatgtgccggagtggtttgcaaaggtgaatgcggaagtggcggtctacgaagcctactccaatgacccgaatacggacaaggcgtttgcggactttaaaacggacaccagtgaccggctgaagttggcacaagagcctaagaggaaaagcgaaaatctgaatgtctcagccgaccataaaacgggagaaggtatcggttggtgtagtcggtcgtttgacccggagtagttacttcaaagtgggtcaaagaagttgtgaaaaatgcaaaaagctaaaggagttattggggtattatgtcaaaatttcagcatgatgtgatgttgaagatcgtaaaaatcatcgatttggtaatgatcacaattccgtttgcactttgttgggagctgtattattcgtatcaggtctatgcaaagtttggttggaagggcaactgggccatgatcggtctgtttgcggtgttgttctttctgttaggtaaagtctatgatgcgttctggatgtctttgcagcgcatttcagagttgatctacggacaggtgctggcagccatggcaaccgatggcattctgtacatcgtcatctgcctgatggcccggcggctctgcaatcttctgccgggcatcgcagcgattgccggacagatcctgatggcctcaatctgggcgaagttggcgcatggatggtactttaatacatttcaggcccagccgactgcagtcgtttataatgttcgtcatggattggaaaagctcatcaatgagtacggtctttcaaaaaaatacgatgtcaagatgaccttgaatgttgaggaatgcctgaacgacctgagcctgctggatggaatgcagagcgtgttcatcagcggtgtccacagtcatgagcgcaatatcatcctgaaatactgtgtgggacagggtatcaatgtgttcgtgatccctcgtgtgggcgatgtgattatgggcggtgctcagccgatgcatatgttccatctgcccatgctgcgtgtgggccgctacatggcaagcccggagttcttgtttgtcaagcgtgccatggatattgtgatctcgctggtggcactggttatcctgagtccggtgtttctgattacggctattgcagtcaaatccgatggtggtcctgctttttacaagcaggttcgcctgaccaaagacggtaagcagtttgagattttgaaattccgctccatgcgtgtggatgccgaaaaagacggtgtggcgcgtctttccactggtgacaaagatgatcgtatcacgaaggtcggccatatcatccgagcctgccgcttggacgagttgcctcagttgctgaatattctaaaaggtgatctgtctattgtgggtccacgcccggaacgccctgagatcgccgcccagtactgcgaagagatgccggagtttgcattgcggcttcaggccaaggcggggctgaccggctatgcacaggtgtacggcaaatacaataccaccccctacgataagctgcagatggatctgatgtacattgcacatcccagcctgattgaggatctgaagattatgctggcaaccgtgaagatcctgtttatgcctgaaagtaccgagggcgtggcagaaggcgcaactacggcgatggggcaggaaaagtgtgaggagagcaagaaatgaagaaatttctgattgtggctcattacagccgatttttggtgcagtttgaactaaatgatgtgagattgttgcagttgatgggatttgaagttcactatgcaacaaactatcagcaggaggatatgttctccggtgcgataaagataattcaagaaaacggagtgatcttgcatcaaattgactttgtgcgctcgccttataatattccggcaaatattaaggcgtatcgccagttgaaaaatttaatggtaaaagaaaaattttcaggggtgcactgtcacacaccgatggcgggtgctctggcaagacttgcagccaatgcgaccagaacaaagccggttctttataccgcccacggcttccatttttacaagggctgcccgctaaagaacaaactcatctatcagacagcagaaactttcttggcccgctatacggatgcacagatcaccatcaatcgagaagattttgcagcagcgcaaaagtttcctctgcgtgggaaagcatactatgtgcccggcattggcgtggatgtgaagaagatttcttctgtgcaggttgaccgggcaaaaaagcgtgcggaactggggattccgcaggatgcgcttgtgtttatatccgtaggggaactgaatgaaaataaaaaccattctacggtgatccgtgccttggcaaaagcagatatcgccaatagctattacctgatttgcggcgaaggaaaattaaagcagcagcactttgaattagcacaaaaattgggaatttctgagaaggtgaagctgttgggcttccggaccgacgtgagcgaaattctaagagcctgcgattgctttgtgttcccttcattccgagaaggactgtccgtttcgttaatggaagcgatggctacaggattgccgtgcattgccagccgtattcgtggaaatgtggatttgttggagaatagtcgatatctgtttgaaccagcagatgaaagtgcgctctgccaattgctgaaagatgcggcgaatggtgtgcagaccgagcaagagtgtgcacagaaccgggaaatgttgaaaaggtatgatattaaaaatgtcagcaaacagatgcaaggtatttactctgctgcaattgaaggtactacgacaaatgagagttttacatctattaaaaagtaataaatattctggcgcagaaaatgttgtgctgactattatggacgcgtgtccggatattgaaatgatttatgcctctacggatggacccattcgtaaggtggttgaagatagaggacatcggttttatccgttggaagaaacatcggttcggatggtgaaaaaagcagttggcgaactgcaaccggatattatccatgcgcatgattttaccatggcaagcacggcggcatgggcggctggagatattccagtgatagcacatctgcacaacaatccaccatggttgaaaaaagttggcgtaaagtcaatagtctttgcactagcgttacccaaaatacggcaggttatcagtgtttcaaaagcggttgaagatgaatacattttccgtgggttaatgaaaaataaaaatactgttattggtaatgtggtagatgcagaagatgtccgtcaaaaagcacgggaaaaaagtgactgcaagccggtggatttggtgtatttgggcagaatgtcgttgccgaagaatccgttggaattttgcaagatcgtgtgtgaagtaaagagactgtttcctaacattacagcaaggatgatcggagacggagaactgatgccgcaggtcaaggaatacatttgtagccacgagttggaagatataatcgagcttgttggttttcaaagcaatccttatccatacctaaatgctggaaaaattatggtaatgccctcaatctgggagggttttgggttagcagcggtagaaggcatgtgtcttggcaagcctgtcgtgtgcagtggtgttggtggactggaaaatattatagatgaatcctgcggagcaaaatgtaggacaacagatgaatacagtagaatacttctaaaactgttgaaagacaataccacatatgaggttgaatcgaaaaatgcaatgcggaaaagcggaaggtacaccgacatgaagaagtatgcagatgatatctgcagaatttataaagcggcaatagaaagatgaggaaaacaccggtggattattgcttgagattagatgatgcatgcccacagatgaatgcagaaaaatgggcaggagtagaaagaattctggacaaatataaagtcagaccgatcgtcggtgtgattcctgaaaatcgtgatccggattttgttgcagttgcagatgagaacttttgggaaaaagcatgtgaatggcagaaaaaaggctggacgatcgcattgcatggtttacatcacgagctgcattttcacgagcccagaggatactaccagctttcacattccagtaaaacagaatgggcagggaaaagtagcacagaacagtatgaaatgttgaagcagggatatcagatactcaaagagcatggactaacgccgacctgtttctttgcgccttgccatacctatgatgaagcaaccgtcaaggcgattgcattgatgaagacggaagggtgtcctatgtatatttcggacggatatgcccttcatccgtatcaaagagatggcgtttatttcctaccgacgctatttgatacaccccataagcttccaatgcaaggcatttatacgtttgtctatcatcctaataatatgcaggaacaagactttgcatatctggaagacttcttaaagaaatacgcatcgctgtttcgaagtgcggatgaaattatggaaaaatatgactctgtaaaaaatcagggaatccttggaaaaataatagaacacgcaatttatttcctgagagggataaagggatctaaggagtaaaagtgtatgggtgatttgaagaataaggtgattttaattggaggaaatcatcacaacgggctgggtttggcccgtagttttggtgtaaatggaatcaaaccgtatggcattattgtcggcgagggcgcagagcatggttttgtccgaaaatcgaaatattgggctaaaacgtgggtgattaaatcggacgacgaaattgtcgagttccttttgaatgcctttcagaatgagaaagaaaagcctgttgttattccatactcggatggggcagcagaagaaattgatttgaaccttgatcgattgaaggaacactttttgttgccctccattggtggacagcaaggaaaaattgcagagttgatggataagcaaaaacaggttgaatttgctcaaacctatggaattccaatggcaaaaagctgtgtggtggacttgaacgatattcgactgccggaggatatgatctatccatgcatcgtaaagccggttgtcagtgcagagggcgaaaaatcggatattcgtaaatgtgatacagaaactcaaaccgtagtatatctccaagaactccgaaaaaaaggctatcatcgatttttggtgcaagagtacctgaattatgatacagagtatttgatggcgggctcaattcatgaaacaaggaaatgctggattaatttaaataaaattagagtatggcctgttgttggaggaagtagtagctattcacgtttggaagataagcaagcagttgacgaattctacggaaaagtaagaagtgctttccgcaaaattggatacgacggcctttttgatgttgaagcacttgaagctaatgggaaaatatacttaaacgaagtgaattggagaaattccggggcggtttattatgcgttggagacgaatgtttattatccactaatatggtacatggaaaaacttggagaaacaaaattgaataattataatatcgaatgtatgaatgaaggcttctatgcaatggatgaagcattggacttgaggcacgttgtatgtggaaatattaccttgagacaatggttgtgcgatagaaagaggactaaggcctttgcactttggtataccccagatatgcgtccggcaattgcgcagtatttgcacttactgaaagagttgataaagaggcatggagtgtaacatatgaatgatacgataatggtaacggttctaactccgacatataatcgtgccaaaacacttcctaaattgattgaaagcctttgcggacaaacaagcacaaattttcaatggttggtaattgatgatggaagtacggatgacacagattcaattttcgagaggttaaaaaactatgatcttccgtttcagtgggaataccacaaaaaagaaaacggaggaaagcacacggcgctgaattttgctcacgcatatattaaaggtgaagttgttctgattcttgatagtgatgattatttgacagatgacgcaatagaaaccgttgaaaaagaatggcctttatatagaaattgtgcggatatttgcggtatgagttactttagagggaaaaaggatggaagtcatctgagtgttgcaaatgcacaggatgtctacattgacgatgacatccattatcgggtaaatcaaaaaatcaaaggagatcgttgcgaggttgtgaggacggttctcctgaaaaaaaatccgtttccagtttatcagggagaaagattttttccagagggatggttttggaacacattggcgatgaactacaaaaccgtgtaccgaaacaaaacgatttacatttgtgagtatctggaaggtggcttgacaaaaagcggacgtgctctgcggatgaaatgtccattgggaatgatggatgattgccggatgtatcttgacaatagagtttgcattagaagaagagttaaagaaatgctgctttactgggtctatgcaaggtgtgcagggtattctttggggaaaacgctttcgacaagtggcagaccggtgggaatgatgttgactgctttgccgggtatgatgctatacagttactggaagagaaagtatctgaaataatgagggtttggtgtgatttattttcttgtgattgattgcgtattgttctattctgcttggtgtagaccaaaacaatcaaaagtgttgtatacaacgaccgttataggactatggtttctgatggcatttcgtaatatagacttaggcggaagcgacgcacaggtatatcaggagtggttccacacggcagtgccgaatttattgcagtttgagtggaatcctttcgtgtttcaaagagaaattcaggacgaatggggatttggctggctatttactctactggcttcgattacaaaaacaattgtaccgacctatgagttttttcaagtggtttatgtaacgttgagttttgggattttgattttgatcatagaagatatgcagcttaaacagcaagaaaaggggctttttttgtttgcatatctctcacagcaaatgatttggttcttttgcgttctattgcgacagaatctggcaaatcttgttgtctggtttgtgctggaacataaatttaaaaagaacgctctcataaaaaaagcacttttactatatttggcaacactgcttcatacatcggcctatattgcaattgcggcaattattgcgttgtgggtgattcggaaacttccggctcgaaaaattgttccagggagtcttttgataggtgtgactgtgttttttgctggaaaaaggctgatatcgtatattctttacttcatggcaaattatgtcgacacacgttacagtatgtatctgaatgcagcaggggaatcatcaaatgccataaactttgttctgagattgtgctttgtggtgttactctatctcgaattcactcggaacagggaagatggttctgaaaaaaatctgtatattggagtgataggttttctgattggatcgattccgcaagcgctggttgtgcggatgacagaatactttgctattgcaaataactatgcagtggcaaaactaagaaaaatatttaagataaaagagaaccgtgcaattgtggcaagcatagtccttatcgtattctttattgtatttgtgagatttttgaacgtaaatgctgattttatgagaaattataaattccttttttgacaaagaatctgattccttatgttattgtataatccggaattaagcgtatatatagggcgtgacactttggtctatattgttcttcttatttgatgcattttatcggttgagtgaaaaaagcatatgaataatatcaaattgtcttatcattaaatgatatatttacgtaatcaagtaaactacgtggttgaaaggaaaatcaacaaatgcgaatacttcaagttgtaagaacaatgaatatcggaggattagaaaactttgtaaaaaacatgttgcaatacttgagtgaaaaatgcgactgtggctgcctgatttgtgatgaaaaaaaatcagatcacgaggatgatctcgtaaaagctggaataaaaatttaccatattccagagccagacaagacgaagataaatctatataataatctgcaagcattttttgaaacccatagagaatatgatattgtccattgccacatggctggaacaaatggaattgttgcaaaggcggcaaaagatgcaggcataaataaagtggtatgtcattcgcatggagtggctttgcaacaagatgaagcgctttcgatgaagctgtacatgctttgtatgcgaaaactaatgcaacgacacgcggatgcttttattgcatgcagtaaagctgcgggaaattatttatatgggcaagagtcttttggagaagttggcaaagtggttccgaatggtattgaaatcaatcggtatcggtattcagatgatgaaagaaacagctgccgtgaggagttgggatttaaggagtcagattttgtgattggtcacacgggttcacttaatggtgtgaagaatcaggaactgattctagacattgcaggtatcctaaaagaaaaacgtattcctgtaaaagttttgttagtcggtggagggaaccgagagcaggatttaaaaaaacaagccaaagatttaaaaatagaagaagatgtcattattactggaaaacagatgggcgtgacaaagtttttagacgcaatggatgttttcatgtttccttctaggagtgaaggctttggtctatccctactggaggcagaagcaaatggtttaccatgtgttgtttcagacaaaattcagccggaagtcaaagtattgaatagtgttttgagtgttagtctaaatgaaccgattcaatgctggatagaggcggtagaaaaggcgaaggtgctaggaagaagtaaaatggcaaatgaaattttggatgaaaaaggcatgagcgaagcagcatgttatgagacggtatggaaaatctataatgaggtactatcaaaatgattctgtataaagttttatacaaggtgattgcttgccatctgcctgcgtctgggaccagcgtggggccatttagaattggtgaaataggaaggaaatttcgggcattttgtttttgcggatgaaataatgaacaaactgagaaagatattaacattgagaaaaatgtgcgattgagtgagcaggttactttgggaaaaagatccggaattggcgaagattctattatcagtggaaaagtaactatcggtgataatgtaatgattggtccagagctaatgtgttatacaacaaatcatcagattaagcgaacagatattccaatgatagaccagggcttttctgaaatgcacccaatcataataggagatgacgtgtggattgggagtcgggtcatcatcttagggggggggtgaaaatcggaaatggcgcagttattggtgccggcgcggttgttacccatgatatcccttcgaacgcagtggttggtggaaatccagctaaagtaatcaaaatgagagagtgacaaaatcattgttgcaaatcgtggttggagatcaatgattaatgatgagtgaaagaaaaaaaggtgcaatattatcatacattcaagtggttttaagcgttgcggttagtgttatctatgtgccaattctcctacggtatcttggacaaagcgagtacggactatatcagattgttggttcttttttctcgtacatatctgtttttgaatcatgcatgtcaacgggcgtactgagaaattattgtaatgccttagggagccaagacagagaggctgcggatgtgacattgtcaatggcaaaagtcatatatagagtgatggctgttttgatggccattgttggcgttgttgtactttttgcttttaggcgtttctatgcgagttcttttagtgcggctgaaatgaaagaaagttcagcaatattgcttttgctttttgccaatatgatggtgaccatgttagggtctgtctatttaacaatccttaccgggcacgaaaaatttacatttctgaaggtgctggctattataattcaagtagcacagcctttttttgtaattctatgcgtgcgaaaaatcccgtatgcgattacggtttcgacagtaattgtggtgctcaacgtattgaccgtcttgatgcgatacctatatgtgacccacaagttgaaaataaaaatcgtaaagaagaaaaaaaatcgaaaagtcattagggaaattgttggactttcagctactattctactgggatgtattgcagatcaaattttctggaaaactgaccaagtgattttgggcaaactttttagtacagcagttgtagcggtgtattctgtaggcgctcagatttatatgatgtatatgcagtttggtactcaaattgccagtgtattctatccgaaagttagcatcttgtatcaagaagaaaacggaaaccagaaagtatcggatctctttgtgagagttgggcgagtgacatttatgatcattatgctaattctttctgggtttattgtgtttggtaaagagttccttttgatatgggttggggaagggtatacagaagcgtactatgtggctattgtggttatgattccattttcggttgacctcgcccagaaccttgctttggcaattttgcaggtgaaaaagcagtacgggtttcgtgcaaaaatttatctgttaagtgcgatgatcaatgttgttactactgtgatacttacttcgtatttcggtatcatcggtgctgcaatctcgacgggactgtcgatgttcattacaagtggactgattatgaactggtattacctgaaaaaagcaagtcttgacattgtaaaattctggaaagaatcttttaaggttatcgcagcgtccatggcaataatgattctggcacttttgataaagaagtatatatcttggaacagcgccggactgcttcaacttggaatgcaaattctcctttttgtatcaatttatgtgtgtatgatatataagtttattatgacatcggaagaaagaaaacagattctcgcatttgtaaagcgaaaattatgaacatgcctataaggatttctttatcgttttaattgtggcttttaacagctttaggaaattgtataataatcgctaaaaacgaattataaggagcagaataaaatgggaaaatactttggaaccgatggcttccgtggcgaggccggtgtgaacctgaccgccgaccacgcctacaaggtgggccgttttctgggctggtattataatgcactgcgggagcgcaatggcaacaacgagcctgcccgcatcgtcattggcaaggacacccgccgctccagctacatgtttgagtacagcctggtggcgggtctgaccgcttccggtgcggatgcctacctgctccacgtcaccaccacccccagcgtggcctacattgcccgcgtggatgattttgactgcggcattatgatctccgccagccataacccgttctacgacaacggcatcaagctgatcgactgctacggcgaaaagatgcccgaggagaccctgctgctggtggaggactacatcgacggcaaactccatgtctttgatcaggactggccggagctgccctttgcccaccgggagcacatcggctgcaccgtggactatgtggcaggccgcaaccgctacatgggctacctgatcagtctgggcatctactccttcaagggcatcaaggtgggtctggactgcgccaacggtgccagctggaacattgccaagagcgtgtttgatgcgctgggcgcagacacctacgtcatcaacaaccagcccaacggtctgaacatcaacctgaacacaggctccacccacatcgagggcctgcagaagtttgtggtggaaaagggtctggatgtgggctttgcctatgacggcgatgcagaccgctgcctctgcgtggacgaaaagggcaatgtgatcaccggtgaccacatcctgtacatctacggctgctacatgaaggagcgcggaaaactcctgaccaacacggtggtcaccacggtcatgtccaactttggcctgtacaaggcttttgacgagcagggcatcggctacgccaagactgccgtgggcgacaagtatgtctacgagtatatggccaagaacggctgccgcatcggcggtgagcagagcggccacatcatcttctccaagtacgccagcaccggtgacggcatcctgaccagcctgaagatgatggaggtcatgctggccaagaagaagcctctgagtgcgctggccgccccgctgaagatctacccgcaggtgctggagaatgtccgtgtgaccgataagaaggccgcgcaggacgatgcttctgtgcaggcagcagtcaaggcggtggccgaggcactgggcgataccggccgcatccttgtccgggagtccggcaccgagccggtggtccgcgtgatggtggaggcccccgaccatgacacctgccagaggtacgtttctcaggtggtggatgtcatcaaggcacagggctacgctgtttaacgcatattctgctgatctatatttcttgccatccaatatttgtaatgctatacttatgttataaatactgaatggaggtgtcccttatgccccgtcccaaaggaagcaagaacaagcccaaggccgtaaaagcaaccgttgactttgctgcacagctcgctgaaaagcaggctgcaaaggaagccgctgccgctgaaattgcatcgatcactgcgaacattgatgcattgaaagctgacctgaaaaccaagaaagccgagctgaaatctatcgacaaggaaatcgccagaatcgaggctaaaaaggtcaaagccgaaaccaaagctaccgaagctgcgaagaaagccgaagctgagggtgtgctgaagaagctgctggcatccggtatgacggcagatgagattctcgaaaagctgaaataaatattttagagccgtgtggatcagtcggagcgtagagttatagctctggcaagttcacgcggtttacttatataaatggtaattggtgagactcggaacgaataggactgttctatatcgaacaaaatgactacatttcccacaccatggctcaaaatcacgcccggtgaaatttagcatctgagccagtaactttttgtgcgacaatggaaatctttccatatgagatctgtccaattacagcacaatcgaaattgaaaattattatatatcctacgagaaaaatctgctaaggaactgtaagctgggaaataaatgaagtcctatttatagtattgtaaaaatgcgcgacaaaaatgcgacaatgcacagaaacaatgcagagtagtctgtaaccgaatgagacgaaaaataacgcgttatcggtaaatttgatgaatataaagacgaagttatcctgagaattactctcttttaatcagagggccagggattcgagttccctcagacaatcaggccccgggt

SEQ ID NO: 183 - DNA, 8535 bp, unidentified
  source 1..8535: mol_type = unassigned DNA
tcttgtgagcttatgcgccaatgatataggatacggcatgtattcttctgtctcattggttgcataaccaaacatcattccttgatctcctgcacctattttttccagctcatcatcactaagtttatttttttttgtttctaaagcctgatttactccaagagcaatatcttctgattgttcatctaatgttattattacattacattcatcacaatcaaaaccatattctttattattatatccaatctctcttattgtatctctgacaatcttatcaatatttatatttgcatttgctgttatttctcccataaccaaaacaagatttgttgtaatcgctacctcgcatgcaacatggcaatttggatcttcttctattaatttgtctaatattgcatcagaaatttgatcacaaattttatctggatgtccctctgttactgattctgatgtaaatagatgtttattcattatatatttctcctgtactaattcgtatttttctattatatataaatatagtggtttctattatccaaattctgtatctataattttcattgatattttttgtagaaccttacaagaaaacttgatagtgttttgaataccttcttcaatagaaacttctggtttccaaccatacttttcaaaagcgtaatcattagaaagttcagtatactttgttacttcatgatcaagtgctttttcagaaataggataagcaccttcatatagattcggatagttgttccaaaaattcttagaatcactatattccggtaataattcttctttatgcataagtttagtaacaatcttcatcagttcatttatggacaatgtcgtacccgtagaaacatttacaatatgaaatcctttatcctgtaacactaattcgcaaagtcggattaaatcttcaacataaacaaaatctctccgttgctcgcccgtcccgtgtaataccggatgtctatcatagaataattcccgaatcatatatcctactaccggtggttgtgttctcaagcaatctaaatgtggtccataaacatttgcaaatcgtagacaggtaacattcatattataaatatccacataactacggcaaaactgttcagctgtatatttagtagatggatatatcagacttggtggcacaacattagtttcaatcgaaggaaaatctgtattattttcatacaccgcagatgtactggcaaatacaacttttttcaccccataaatacgacttgcttcaagaatagttacggttcctgtcacatttacgtccaatgcttctgaagggttcatctgacaatcaggaagcggagtaattgcagcaatatgataaacatagtcgaattgatgtttttcaaaaatttgattgatcaattctctatctcttatatctcctctgataatttcatttctaaaatcatggttggaaaatacgaggttgtcctccgaaccataagaaaaattatcaagcaacgtcacttggtctccttttttccaaaaataatatgcaagctgagaaccaataaaacctgctgctcctgtaataaatattttacgcataagtaaactccttagtttttaatatgatcaataccacacatgctcttataaaaaacactcatcattaaatgattaaaaatcatatgtacatcctccgtgatttgcatactattaataggcacatgaagagaaatgtctgatagttcttttaaccttccacctgaatatccagtcaaaccaacaactttgcaaccttgttttttaccatactctacagcattaatcacattaggagaatttccactaccagagatagccattaaaatgtcccctttttttatttttccttgaagctgaaaacgaaatacttcttcatatccaatgtcattagctactgccattatagtagcaatattgtcatttaagcataaaaagcgaaactttttatctatatgctcggaaactcccttattaaaatcattttgaaaatgagacgccgttgcagcacttcccccatttccaaaaacataaattgtagcctcccttttcatacctgcttctaataaatttaacacttcgttcactgcgctcacatcaattcttttcagaatatcaatttcttgctcaagatatgtctcaattaattcattataatccataatatcctacccccttaatcactaaaaacaattcgacttccctcatggcaataactaaatggtatatatgtaaattcagaaagtgcttcttgtactaaattctgtctctgttgtggtacataaagcatcataaatccgcctccacccgcacctagaatcttaccaccaagtgcacctgcacttttagccttagcatacatactatcaatctgcggattagacacaccgtttgcaaacttctttttaatctcccatgttctatcaagctcggctccccaaaagtctagattgccatcataaagtgcttgaacagcacggtctgtagtatttaccagttcatcaagcataactgttttatctaaaatagtatcagattgctcattaagaatttttctggaatctctagttgttccagtatagaataacatcaaattatttctcagttgaaccattgcttcttttttacagacaacaggtgtaatacttacgctaccatcattaaaaaatttatattgactaaatcctccatgtgcaacagcaaactgatcctgaatcccaatgcgttgtccaagacgattaatttcaatctcgcatgcttcgcgtgctaaaactccttgtgacacaaattcacctttatatgcatgtaatgcatttaaaacaccaactgcaagtgcactggaagatgcaagtcctataccggcattacttaatggaatgtctgccatataaataatttcaattcctttttctatgccaacaatttttagtgcttcccgaataatattatgtttcacttcatccacacgactaactaattcattgccagaataaactatacgaatattatcatcaaactttctgttcacaataatataaacatacatatctaatgctgtgctaacaaccgtaccataacccaccttactgttttcatagtaagtggaaaaatctgtccccccaccaaaaaatgatgctctaaggggtgtctttgaaataatcatgtatcttctcctttttctctaatgaaactatttctttggcaacatccaaaactgtgtatttttcatcaaccatcctacatatacaaccggcagcctctcccgctgcaatatcacgttcatcatccccgataagatagcattcggagaggtttaatgaatattttttctgagcttcaaaaatcatacctggatttggttttctacaaaaacaaccatcgtcccaattatgaggacagtaaaatatatcgtcaatttctgttctttccttcaaaagatctgcacgcattttttcgtgtatgcaatgcaacatttcttctgtgagattacctcgtgcaattcctggttgattcgtaatgataatgacgagaaacccattttttttcagcatatgaattgcttctattgctcccggaagccaaacaaactcttctggcttttctatgtaacaagctcgtgccgggcgtttgtttatggtaccatcacgatcgagaaacacaacacgtttcggtttaaaaaattcttccgtaaatttgattcgctcaaaagaaccaacagagtaatattgatgctcagtcattgtggcaaacaacttgttttgtgcaactaattgtggataaacctcttcctcaaaattacaattttcctctgatattaacgaaatgacgctcttatcgactaacgcataaccaatatcaactccctgtaaatttggtataatacgttttttgtcataagttgtgatcaatccatcatcagtaatatgtagattgctttttgtatagttgtcacgattgctataagcagtaatttgaatctttgctttattattacaaaagtctgcgaacaattttgaatagttaatcggacaatagttatcacaatataaaagtaaaaatttatctgcgatctgtggagcagcatgttttattcgcatacctgtgtcgtagtctactggcgttatatcataatttatggttaatccataacgtgaaccatctccaagatagtccataattttcttaggtaaataccctaaaaggagcaatgcctcttccattccgaaacttttaatctggcgtattagataatcaataaatggaatgttattaatcggatacatcggttttggtgcagtatttgtaaatggtttaagacgtgtgccaagtccaccagcaagaatgacaacttgagtaactcttttgttcatattcactcctcttatttttatccacggccatatcgtagtatattaaagttcctgacagtcattggacatattgatatcaaaaggaatcttattctatcactaatttttactgccgaatttattaaatatatatatctcgtttttttataaaacaatgaaatatttactacggattctttaaatttttcatcactcataagacatactatattgtaaaaataccataacacatcatacagataccttttttgcaagtctttcacaaattttttatcagagcttaacaaacggcattttcttattccatctaaccagcattcatataaatctttcaaattgccttttatttctgtccccatcaatccatcatctctaatcctgtaatgatataatcccttgtgatatgcaactatctttttacattttaaaaaaatagttggcatcacatataagtcctcatgaagttttccttccggaaacttcacgtcttcaaatatttgttttttaaataattttccccaaacttcaccagccgatatttccaaaatatgtaatatcattttctttccatcaccaatcaatacctctcctgttgaatgctcatttcctgctttaatgataaaagcgatgtccgattcattctcttcttccaaccaaaccaatgtttcaattgtattattttctatccaatcatccccatcaacaaacagtatataatcaccagttgcctcctcaattcctctatttcttgcagcagataccccttcgttttctttatgtactactcttatattttcatattctttttcatacttatgacatatctctggagttttatctgtagatcctccatctattagaataacttcaatatttttatacgtttgattaattagtgatatgatacattcctctacatatttctctgtattatatactgtaacgattactgatactttacacacaaatccactcctcattttcttttttttaatacactccatagtttaaacttcgtcatatctattatcattaatctttatcattcaaacaattaactaacattccctttatctacacctattattccatattactttttctatgcatatttatatccattcctaataagcactaaaatactcaaataataaaaaatagattttgtcttttatgatctcaaacaaaatctatttttcttatatattttcaaaataaatatttaatttttccaaactattttctaattgccagaacaaatctttaattttttttattactatttcgccatacttctgtccttttattaaattatatttcataacaagacttctcaacatctcatttttatgggacatatcatgaaagtcattctggatatttcttatatacgtgttatcagataggtatttatgctcaatcatataatctattctacaatacattatctcattaaatatgtaaatcaaatgaattattctaaaatcaaggcgctcatgtttacatacgcattcattaaaatattctattatatgatttaggcattcaaacccatataaaacagcttcgtgtactgtaaataagtctgactcatcattaattgtattctcacgtgattttataaaatcagtaatcatattacgaattctatcaacatttaaagcatactttttattttttaagtatttaaatgttctaatttcgacagaattcacattatctctttcccttatatatcccgcatgggcatcaaatgccattctaaaatctaaatatgaaatctcttgtattgaataagtatgtttgaaaaagtctgctgtaaagaacacttttttttcattatcatatccccaaataagcatttcatgttcgctatgttctttttcctcaatatccttccaccacgaatctataaaatacatatctactgccaaaaaaatatattcttgattatctatactattcttaataatatcattaacatcttgattctttcttacatctagaattactgtttccaacactggacattgctcataataattaatatccctgtcatacttaaaatccaccatatactcttttctttgtctccttgcatatatccataacgaaatataattattatataaccatacttcgtcatttccataagcttctaatattccgtttattgcagtatttattgaatatgtcttatatttaggaatcttaaatggtagcttaattatattattatttttgccttccatatctttattttcctctcttatgaacagttattcactaatcacttataatgctttgcctgtgtactatacatattatagtataatccgtccgcatttttcattaactcctcatgacttccttcctccgtaattgttccattattaaatacaattattctgtcacaaaatctacatgaagataatctgtgtgaaatatatattgcagtttttccataaaccaatttgtcaaagtttttataaacctcatattcagaaattggatcaagagctgctgttggttcgtccattactacaatcggagcatttttatacaatgctctggcaatagcaagtttttgaccttcaccaccggatggctcaataccgttttccacaaacatcttatagatatatgtctggtcttttttatcaagactatcaatccatttatcaatgcctacaatcttatatatttcttccagatccgtatttttatcatcaaatacagttacattttctttaattgtaaaagcaaaaagtctaaaatcctggaatacaactgataacatcttcatatattctacaatgttatactctctggcatctttaccgtttactaatatctcaccttcgtagttgtcgtacaaatgacaaaggagtttaataaatgtagtcttacctgcgccattttgacctacaattgccagatgttcccctgctttaatctttacagataggtctttaagaatatacttgtctgtgtttgggtatttaaaactaacatccctaaactcaatttcgcaggctttgtcagttacctctacaacacaatcacttaaatccatcaatctgtcgttttccccatatatatcttcaacaaaatcgatgtaatactttaatatcgatgaagtataattcatttccaaatatgaatttacaattcctctaatagcaccaccaaatttagaagtcgcctggaacaaactggagaattcaccaattgaaatgatcttgttaaaaacatttactgataataatatatagatagcagaatcacaaacagcataaaatacattatttatatcccagtattttataaattttgtatgatactttttgctggtattatatattctacctacatatccgtcatatttcttttcgaatatttcagatgtatcatataaacgtacatctttggcatatctgctttcctgtagttcagtgttaaaatatgtactacctctctctacattgcccatttctttaaaaaacttacgcctgctcttattaacttttgaagtagtatatgaattcgctgcaaacgaaataattaccggaatcattaaccaaggaattcttgtacaaaccaaagtcacaacacctaaggcaacaataaaattcgtcacaatgcttgctaaagatgtgataagaccatttacctgcccggtttcatttaaagctctttctgcatttttaactttatccaaaaattccgtttcttcagtatgtttaaatttcatattgatacagctcatacataaatttgttttaaaaattcgatcaaacttttcaccaattctggcaatgttttctccaacccatttcattatgttggagcaaatgaaattacctccacaaataaatgctacccagaataccacccaaccgatatttctcttagatgcatcagcaatttcatcaattaaatactgagagcccaaaattgatataaacggagaaactgagttaacgattatatttattaacaaaagcaaataatattttttatcattctgccaagcaaatttcccgaagaacttaaaacaacgaatattatctttactatttttcatcgttctgtcctcccacactgtctttcttatcctcataatattgggactgaatctgga

SEQ ID NO: 184 - DNA, 5925 bp, unidentified
  source 1..5925: mol_type = unassigned DNA
tttttcatcgcccggcggcgggtcgagccgaatgtcctgagccagctggctgagcagaccgtccgcatcggcatcgtctgggccgcgctgggccgggccgacgctctcggatgggatgcggggcagcgctgtacggcagtgctgggcgcaacggcggccagcgaggccgtcagcaccggtctgatggccctgttctactgccgggaggcccgccgctgcttcggctcacagcctgtacagcgtccccatgacccggggaggcggctctgggacatcctctggccggtggagggcgggcgatgtctcgccagtgccctccacaccgccgagaatatgttggttccggcctgtcttgcggtctatctgcaatgctccggcgggcgtgccgaggctgtgacccagtacggaaatctgaaagggatggccctgcccctgctgacctttcccttcgggctgctggggagtctgtccgtcctcctgatgcccgagatcacccaagcccatctccgggggcagagcaggcggctctccgtcctcatcgaccggatgctgcggctcacaggctatttttcggcgctggcgggggcggcattctgggtgtggggacagccgctggccgaggcactctacggcagcgcggaggcgggcagctatctcgtcatcctcggcccggccatgccgctgatgtacctcgagagcatggtggacggcgcgatgaaggggatgggagagcagaaagccgtcttccggtacagtatgtgggactcctgcctccgcatcgcgggggtggtgctcctgctgccccggttcgggatgaaggggtttctcttcgtgatcctgctgtccagtctctacacctgcgccgccaacaccgggcggctgctgtccagctgcggcctgccgctgcgactgtggcggtggctgggggcgccgggtcttgcggggacggccggtaccggagcggggctggcgctgcggaagcttctgaccccatggctggcgagaggagtgcccgcgcagctggcggcggtggcgctgggcggtgcggggatgacgctggtctgctttgcggcggcatggccgctgggcctcggcgaggagctgcgggacgtggcggcaggggagagaagacacaaaagcgctggacatggggagaagaatcgagtataatgatacagatacgatggggcgataggcccttgggtcgaaaaaacggcggctggtgtctctccgacaccggccctgatgcaaaagaggactttctgtgaaggaaaagaaaacaagtatgctgcaggtgctggcccgccgggcctttctggtggtgctggacgcagccatcgtagccttcagcttttattttgcgctcctgctccgtgcagacggcgcagtcgaggcctcgtggtggcctcacaaccgcgccctgctctacgcgaacctgccgtggatcgtggcggtctatctgctcagcttcttgggcgggaggctctacaccatcctctggaaatacgccggagagcgggacctcatccgtctggctgggatgatcgctgccccgacggtcgtggtgtatctggtcaaccgctgcttcatccatggcgtgctcttcaactcggccaacgcgatggcttcggtgctcatcttcctgctcgtcggcgggagccgtctggcgtggcggctcttcctgaaccacccgttgggcgagcggctgcggggcaataccagcaaagaccccaaccgccctgtgatgatcgtgggcgcgggcgaggccggtgcgtgggccatcaacgtctgcaagagcaacggcagctacggccacccggtggtggcggtggacgatgaccccgccaagctgggccagaccatccacggcgtcccggtgaagggcacgctggaggagatccccgacctgtgcacccggtacagcatccacaccatcatcattgccatcccgaccctgcggggcagccgcctgaaccatgtcatcgacctctgcgtctccacccactgtgcggtgcagatgctcagcgacccccagcttgtgggggcgggcgcaccccagcagggggcgttccgagagctgaatactgctgacttcctctcccgtgaggaggtcacgctggacacggcccagatctcgggctacctcaccggcaagaccgtgctggtgacgggcggcggcggcagcatcggcagcgagctttgccgtcaggtcatgcgcttcagacccgcgaagctgctcatcttcgatatttacgagaactgcgcctacgagctgcagatggaactgcagcagaagtatggccgcgatgtgcccatcacggtgctggtgggttccatccgggacaaggcccgtctggacgaggtctttgagacctaccaccccacggtggtgttccacgccgcggcccacaagcacgtcccgctcatggagatcagccccgctgaggccgtcaagaacaacgtcttcggcaccaagaacctgctggtcagcgccagcgaacacggcgtggagcggctggtgcagctttccaccgataaggccgtcaaccccaccagcgtcatgggctgcaccaagcgcctgtgcgagatgctcatccagacctttgcgggcaacaccgacatgaagtgcgtggccgtccgcttcggcaacgtgctgggcagccacggcagcgtcatcccgctgttcgaggcacagatcaaaaagggcggccccgtcaccctgactgaccccaacatcgagcgctatttcatgaccatcccggaggccgcgcagctggtgctgcaggccggcgcattggctgagagcggcagcatctatgtgctggatatgggtgagccggtcaagatcatggacctcgcaaagcagcttatccgtttctacggctacgagccgggcgtgaatatggacatcaagatcgtgggtctccgccccggcgagaagctctacgaagagctgatgatggacgaggaacaggacaagatgcgccgtaccggccacaataagatcttcgtggctccgccccggaacatcgatcttggtgagttctatcagcagcttcaggagctgtctgccgccgccgagcacaacgacgacaacgtcgtggcccagctggccaagatggtgcctacctttacccccacccgagagaacctcaagctgtgaactgctggctgcacagcattcggctgtgtaaaaatatatgagagggatgtatatcatggaaaagaaaccgtttttgactgagtcgatggctcaggacatcattcaggacgtgcccacccccttccacgtctacgacgagaaaggcatccgggagaacgcccgccgcatcaacaaagccttcagctggaataagggcttccgcgagtatttcgcggtcaaggctctgcccaaccccgtcatcctccaaatcctgaaggaagagggctgcggcgtggactgctcctccctgaccgagctgatgctcagtgaggtgtgcggcttcagcggcagcgacatcatgttctcctccaaccagacccccgtggaggatatgaagaaggcctacgagctgggcgcttatatcaacctcgacgacgccacgatggtggacttcctcgaccgggtagccggtgtgccggagaacatcttctgccgctacaatccgggcggcaccttccagttgggcgagagcaaggagggctttcaggtcatggacaagcccggggatgccaagtacggcatgaccgaggagcagatgatcgacagctacaagaagctggctgcaaagggagcaaagaacttcggcatccacgccttcctcgcttccaacaccatttcggacgcctactaccccgagctggctgcgatcctgttccagctggcggtccgcgtccagaaggccaccggcgtccacatcgcctacatcaacctgtccggcggcgtgggcatcccgtaccgtcctgagcagactgagaacgacatcatggccatcggcgagggtgtccgtaagaaattcgaggagatcctggtccctgccgggatgggcgatgtcgccatcttcaccgagatgggccgcttcaccaccggcccctacggcgcgctggtggcaactgccatccacgagaagcacatctacaaagagtacatcggtctggacgcctgtgcggccaacctgatgcgccccgccatgtacggcgcttaccatcacatcacggtgctgggcaaggagaatgcgccctgcgaccacaagtatgacgtagtgggcggcctgtgcgaaaacaacgacaagtttgccatcgaccggatgctgcccaagatcgacatcggcgacatcgtgtatatccacgacaccggtgcccacggctctgcgatgggctacaactacaacggcaagctgcgcagcgccgaagtcctgctctgcgaggacggctcccaccgcctcatccgccgcgccgagaccccccgcgattactttgcaacgctggacttcctgcccttcatgaagccgctgctgggcgagtacgacgactaagcggtctcctgagaccattacaccagaataaagcgaggaacgacgcagatgttttttggattccaactcacctgtggcctgatgctggtcttttacgggtattcggtcatgaaaaatccccgggtctggggcgatcagggccgtcaggccgtcaaggctgaaaattttcccgagtactgccgtcagaacggacttttcttcctgaaggcgggctttctcatggccctcatcggtgcactggacgcactggtaacgctttcgggcctgctgtacgtcctgctgtacctgttcgggctggctttcgcgttctatccgctcacccgctggtgcaaagagaacgagggcttttcgtggccatggcctcgtgttgagagcgagaaaaagcgcatcaaaaagctgcgtcagcagcaggaggccgaaaaggcggaacgagaagaaaagtaaatagcaaaaaataagaggtcgctgtaaaagcaacctctcagtctcacttcgttcgacagcttccctaccgaggggagcctctggcgaagagattgggctttctgccatgccaaagcctcccctcgataggggaggtggcacggcgaagccgtgacggagaggttgaacacagcggcctctttttgttttcttaaatcaaaccattttctttgcagtagtggtaaataccatcctcagcacagggacgacagacctcgctggcaatggatttcaggtcgggggaggcgttgcccatggccacactgtggccgacggcctgaaacatttctatatcgttgttcccatcgccgaaagccatcgcatcttcctttgtcaggccgtagtgggccagtaccttccggatgcctgcgcccttgccgcccgaggtggggatgatgtctacggccctgtcccaccacgcggcgatctttgcgccggtggtgcccttgaggatggcgggccagtcccgctcgcggcagcccatcaacagctggaagacttcacctcgggagacttcatcgaacttatcggaaatgaccggcgctcgtccgccaatggcgtaatatgccgttaaatcgtcatccgttccgttggagagcagctgcgtccgtcctgcaaccgacaccggacgaccaagcgctgcggcgttttgaatcagcgtctgcacatcctgcggcgggatggggctggcaaaaatatctccgcgacggtcgtagcagtaggagccgttgtaggtaagaaagacgtcgaactccacgccgtcgaatcttggcacgatgagcggggaacgcccggtggcgatggccagcaggatgccgctttgctgtaagcggcgcagagcgtccaaagtcggcttggtgatgcgctttttctccatgtcgatgagagtaccgtcgatgtcgaaaaagatgatgcggggcttgcgcat

SEQ ID NO: 185 - DNA, 5776 bp, unidentified
  source 1..5776: mol_type = unassigned DNA
atgggagctaagaaaaattttgtgattgatacgaatgtgattcttcacgattataactgtttgaagaattttcaagagaatgacatttatcttcccatcgtagtccttgaagaactggacaaattcaagaaaggtaatgagcagattaatttcaatgcgcgtgagtttgtccgtgagctagatttgattaccgatgacaatctgttcaccaaaggggcgccattgggagagggcttgggccgtctgtttgtggtggcaggcatggtggactctccccgggtacgtgattcctttcccgaacgcatccccgaccatcagattctgtcggtagtggactggctttccaccaaaaagcctaaaatgaaaaccatccttgtcacgaaagacgtgaatctgcgcatgaaggcgcgttccatcggtctgctgtgcgaagactacatcaatgataaggtaatcaatgtggatatattcgaaaagtcgaatgaagtgttcgagggtattgaccctgcgctgatagaccgcatttattcttccaaagaaggactggacatcaacgagttcgattttaaggacatcattcgtcccaacgaatgctttgtgctgaagagtgaccgcagcagtgtgcttgcacgttataatccctttacccattcgatttgccgggtcaacaagacaaagaactatggcattgaaccgcgtaatgccgagcagagctttgcttttgaggtgctgaacgacccgaatatcaagctggttgccctgaccggtaaggcgggaaccggtaagaccctgctggcactggccgccgcattgggaaaacttaccgactacaagcagattcttctggcacgtcccatcgtggccttatccaataaagaccttggattccttcccggtgatgccaatgagaaagtggctccttacatgcagcctttgttcgataatttgaatgtaatcaagcatcagttcgctgccaattcctctgaagtgaaacgcttggaggatatgcaaaaaagtgaacaattggtcatcgaggcattagcctttatccgtgggcgcagcttgagcgaaacctactgtattatcgatgaagcccagaacctgaccccacatgagattaagaccatcatcacccgtgccggcgaaggtacaaaaatggtgtttaccggtgatattcagcagatagaccaaccctatctggacagtcagtccaacgggcttgtctatatgatagaccgcatgagagaccagaatttgtttgcccatgtcaatctggtgaaaggggagcgcagccagttgagcgagttggcaagtaatctgatgtagcggataccgcattttccggggtaaaactatttctatcccgctttccgactgttaaaacgggggaggcgggatggtttctttatagacgataaatagttgatataacatttttttatcgatttattgtctgttttgcctaaaatagtgtatctttgcctcgcctaaaacaaaactgtcaagcgaaatgaagcgaaatttttttcatcggtatctttccgcgaaagtgcttccgatatggactattctattaattgatgtatttatcatcgtcatatccagtctgttggcctatgctcttcgatatgatttcagaagcatttttttggaatcctctaccattgacaagaccattttatggacggttgttgtcaatctgatttttttccgtgttttccgtacgtattccaatgtgttgcgcttttcttcctttgtggatatcatgcgcatttttgtgtcattgacggtgtcgtatgcactactgatgataacaagcgtcttgacagaaagctatttggagttcaacctggctccggtcagcgtgctgttcatgtcctatatcatcagctttgccatgatggcatgctcccgtgtgattgtcaagactttcttcgaggcgctgaacttcgacggcacccatagtgccaatgtgttcatttacggtgccaaggaagccggggtcaacattgccaaggcattgcgtgtcaatctgcgcaaccactaccgtctgcgcggattcattgcggacgaacctgagcttatcaacaaggtgatgatgggtgtcagggtgttccccaacgatgatacgctgattgatgtgctgaacgaccgcgatgtgcagaccatcatcatttctcctgccaagatggaggaactgaagaagtccgacatggctgaccgcctgctggtgcacaacatcaaactgatgaccgcgcctcccttgagcgagtggaacggccaggcgctgagccgcacacagttgaaggaaattcagattgaggacctgcttcagcgcaatcctatcgagatagatatccataaggttgcctctcatctggagggcaagcgtgtgatgattacgggcgccgccggctccatcggcagtgaaatcatgcgccaggtggcttcgttcaatccctataaacttattttagtggaccaggccgagacccctctgcacgacatccgtctggaacttcaggaccgttggcgcgacatcgatgccgagaccatcatagccgacatctccaatgccacgcgcatggaggatatcttcaaggagttcaagccccagtatattttccatgcggccgcctacaagcatgtgccgatgatggaggacaacgtttccgagtccatccaggtgaacgtattcggcacgcgcaccgttgccgatcttgccgtgaaatacggtgccgagaagtttgtgatgatttctacggacaaggctgttaaccctacaaacgtgatgggctgttccaagcgtatttgcgagatttatgtgcagtctcttgcgaagaagttgcagaaggagggaggccatgccactcagttcatcactacgcgtttcggcaatgtgctgggttccaacggttctgtcattccccgtttccgcgaccagattcagcgtggcggtccggtgacagtgacccatcctgagataatccgttacttcatgaccattcccgaagcttgccgccttgttcttgaggccggcagtatgggcaacggcggtgaaatctacatcttcgacatgggtaagccggtgaagattgtggaccttgccaagcgtatgatcagcctttccggacgtacggatgtgaagattgaatttaccggtctccgtcatggcgagaagctctacgaggaactcttgaatgtgaaggagcttacaaagcccacctatcatgagaagattatgattgccacggtgcgtgagtatgactatgacgaggtgaaggagcgtattcagaaactgattgatgtaagttacacctatgaccagatgaaaattgttgctgccatgaaggatattgttccggagttcgtaagcaagaactcctgctttgaggcgctggataagaagaaataaaaagatagcggtatagtataaaatgaaagggtgataacgtcattgtagtgttatcaccctttcaattttattgtcttcttgtcagtcttttgtctcattcatgtgaagagaagtatttcaggaactgtgtacgttcgaaggtattgacccccttcgggtcgtttacgttcagaatacctttgaactggctgatggtttccatacctttgcggtccatccacaagttgaggaaacggatatactcctcaatgatggtagctgaattctgataaagcacactgcatatctctacggccgaagcacctgccaatattgccttgacaacgccttcgggcgagtgaataccaccggaagcggcatagtccagcttgtttacggctgccgaagcgatgcctatccagcgcagggctttggacaaatcggattcattgctgaatacgttaccggatacttgtatcattttctcaatgttgatgtccggctggtagaagcggttgaacagcactactgcggcggcaccgttggcatacagctggtctatcagagctatcggattggtcaggttgtcacccagcttcatgatgacgggtatcttgaccgtcttcttgatgtggctcagaatgtcgatgtggcgctgctcgaaggttccatacgtatactgtacatccgtctgcagtgcaaggatattgatttccagtgcgtctgcgccggcttcttctattttggcggcaaattccacccagtcggcattctgatagcagttgatgctggctatgatggggatgttgcaaacctttttgctttccttaatcaggttcagatattcgcctaacttatgttcacggatatatcctacaagatagtcactgccttcgggatacatattcgggtctcccagccagtcagcctccatcatgatttgctcttcaaagagtgattttagcacaatggcacctgcaccggcctcggatagtttctgattcttggcggcgctgtccgtcagtccggagctgctgacgataatggggtttctgagtttcagccctgcaaaagtagtttctaatgttgccatgataatgattttttatggttaatagtttctttctccaaaaatcttgcttcctacacgtatcaaggtgctcccggctgcaatggcctcgtgatagtcgtgagacatccccatggacagttcccggaatgattctgcatcggcaaaccatttggctttcacttcattgaagaagctacttaaagaacaaaactctgttctgatttgttcgtcattgtccgtattcgtggccatgcccatcaatccgcatatccggatatgcttgagctctctccattcaccggccgccagcatttcccggcattcgtcaaagctgaatccgaacttggtctcttcccgggcgatgtgcagctgcagcaggcagttgacggtttttccggctttggcagcctgcttgtccacctcggccaacagcttgtaggagtctatgccatgaatcagcgctacgtaaggaacaatatattttatcttgtttgtttgcagatgcccgatgaaatgccattctatgtctttgggcagactttcgtatttggcggtcatttcctgcaccttactttctccgaacacacgctggccggcacgatacgcttcttctatcgcctcattggggtgaaatttggaaacagccaccagccgtacctttccaggcagttcgctcagtacttgttttaaattctctgcaatcatctttttaggggttaatgagttaatgtgccaatgtgccaatgtgctaatatgctaattggctgtgctatgtttatcttgtgctgttacgccgcaggtcattggcatatttgcacattagcacattacgaagctctgcttcgttacacttccggtttgtcgtcgggctctgcactgtacggatatacatccataatggcggtttccgctacagatgctatctgataatcggccattgtgcctttcatgccctcatccagtttcttcactgcatcacgcaggtcggcagcctgcaccaatacctgggtagaggttttcttttccgcaccgcttttctcgtccagtgtgatgaaaaccagtttacatttaaaccagcggtcggcagcttcctcttcgctggggaacaattcgctatagttggcacgtttgatgtccgatacggtgaactctcccgaaatgaacggcgtcatctcttcgatgatgcgtgcttccgcttccgtaaaactgagggcatctaccaggtacggttcggtcaccttcttgttcattccattttccattgttttctcgtaacggatcttacattcaaaccatgtatgcattgccat

SEQ ID NO: 186 - DNA, 42725 bp, unidentified
  source 1..42725: mol_type = unassigned DNA
accgatcattgaaacgcaggcgggagatgtatctgcatatattccgaccaatgtgatttctatcacagatgggcagatttatctggagacggagatgtttaatgcaggtttccgcccggcaatcaatgcgggactttccgtttcccgtgtaggaggagccgcacagatcaaggcgatgaaaaagattgcggcgcctatccgtacagaactggcacagtaccgggaactggctgcatttgcacagttcggttccgaactggatgcagacacgagtgagaaactggcacagggagaacgattaaaagaaatcttaaaacagccgcagtatcagccgatgccggttgcaaaacagatcgttatcatctatgcggcagtgaaaaagtatcttatggacattccggtagaggaaattctgcattttcaggatgcgttactcgaacttattgataccagatatccggagattaccggaaagattacagagacgcaggtgatcgatgaggagacggaacagaaactgatagcagctattcaggaaacgaaaaaagaatacctggcgtgagggtatgataacagggggtgataacacatggcgtctatgagggatataaaaagacgaaaaggaagtatccagagcacacagcagattaccaaagccatgaaacttgtttctaccgtaaaactccagaaagccaaagggcgggcagaacagacagatccctattttcagtatatgtaccggacggtaagttccattttagcacacagcggcaatatggatcatccatacttaagaagcggagaatccaaaaagaaagcgatcgttgtactgacttcgaatcgtggacttgcaggaggatataatgcgaatgtggtgaaactgatcacagaaagtgatgatgttgccaaagaggatgtcgtgatctatgcagttggcagaaaaggaattgagatactggagcgaaaaggatatcacatcgaggtagatgcctcggaaattatggaaaatccgacatatccggatgcagcagcactctgtaagagagtgctcgacgatttcgcggaaggaaaaataggagagatctatctggcatatacgcattttaaaaataccgttagtcaggaagcgcagctgatccgtatgcttccggtggaagtaagtgaaccttcggaggaaaagtcttccagagaaattcttatgaattatgagccaaacgaacaggaggctctgaatcagattattccaaaatatgtgacaagtctgttttatggggcactggtagaagccgtggcaagtgaaaacggtgcccgcatgcaggccatggattccgcaacaagcaatgcggaagagatgatagaggatctttccctgaaatataaccgtgcaagacagggatctatcacacaggaattgacggaaattattgcgggagcaaatgcgatagagtgacgtaataaaggagaagaaacatggaaaataaaggagcaataggaaagatcacgcaggtgatcagtgccgtgctcgatatcaaatttccggaagggcatcttccggagatcaatgatgcaatccgtattcctttaaaaaagggcggagaactgatcgttgaagtagcacagcatctgggggatgataccgtgcgttgtattgcactcggaccgacggacggacttgtccgcggtatggatgctatagcgacgggaggaccgatttcggtaccggtaggagaaaaaacacttggccgtttgtttaatgtgctgggagagccaatcgatgaaattgcacctccgcagaccaaggagcactggccgattcatcggaaggcaccttcgtttgaggaacaggcaacttcccaggaaatgttagagacaggaattaaagttgtcgatctgctctgcccgtatcagaaaggtggaaaaatcggattgtttggaggagccggtgtaggaaaaaccgtgctgatccaggaactgatccacaacattgctacagagcatggtggatattcggtatttaccggagtcggagagcgtacccgtgagggaaacgatctgtattatgaaatgaaagagtcgggagttatcgataagacaaccatggtgttcggacagatgaacgaaccgccaggggcacgtatgcgtgtagcacttaccggacttacgatggcagaatatttccgtgataaaggcggaaaagatgttctgttatttattgataatattttccgttttacacaggcaggatcggaagtgtctgccctgctcggacgtatgccgtccgcagtaggttatcagccgaccttacagaccgagatgggggcactacaggagcggattacatccacaaagaacggatctatcacttccgtacaggcggtatatgtgccggccgacgatctgacagacccggcaccggccacaacgtttgcacatctggatgccacaacggtactggatcgttccatcgtggaacttggaatatatccggctgtggacccgctggcttctacttcgcgtatccttgacccgagaattgtcggggaagaacattttaaggttgcgcgtggagtacaggagattttgcagaaatataaagaactgcaggatatcatcgcaattctcggtatggatgaattgtcggaggatgataagcttgttgtcagccgggcacgtaaagtacaaagattcctgtcgcagccgttttccgtggcagtacagtttaccggactggaaggcaaatatgttccggtggaagagaccatccgcggattccgtgaaattctggatggaaaactggatgacgtgccggaaagttatttcctgaatgccggaacaattgatgaggtaaaggcggcatatgcagggtaatgtgtgtgccggctggaggaaacagagatggaaaagacatttgatgtagaaatcatcacgccggaccgcgttttttataagggaactgcggatctgctggagtttaatacggaatccggcgagatcggtgtatatcgtgatcacattccacttacaacggtactggaaccggggcttgtcacgatccatcatggggatgaagaacaggtggcagcagtgcatgccggatttgccgagattctgggagataaggtaacacttctggcagaactggcagaatggccggaagagattgatctggagcgtgcggaagccgcaagagagcgagcagaggagcggattcacaacagaaatgacaatctggatctgaagcgcgcggaatttgcattgcataaggctctgatccgtattaatcttgcagagtatcgataagtgaaaatggaaataagagggagggtatttcatgggaatatcctccctcttttatggacttttacaccggagtttggtacaatcttagtagtaagtttgtatacaaatgaggagatattgtgtaccgaaagaataaaaacaattgggtaaagcatctggattttatgattctggatctgatttgcctgcaggtggcattttttttagcctatacattacgacatagaactgtcaatctatataccaattacatatatgcaaatttgtctatcgttctgatcctgatagatgtttgtcttttgattttcctgaatacacttaaaaatgtattaaaacgtggatatctggtagagtttatcgcaaccattaagcatgtggcgattgtggaactggttgctgtcctgtatctgttttcggtaaaagatgcgggaaatttttcgcgaatcacgttctttctcatggcattattctatggattgcttacttatggaacaagacttctgtggaaaaaacatattcttcgcacgctgcatctgaagcagaacaagtccgtactggttatcacaaactttgaccggctgtctcaggtggaaaaggatatccgggcgaaacgctatgtgatgtttcagatatcgggagtggctgtgacaggaaacatgccagaggatcatccaacggaaattgcagggattcctctggttgcagcaggtgattacgtggtggaatatctctgcagggaatgggtggatgaagtatttgtaaatctgccattgcagagtgcccagctggatgatctcatccggcagttaaacgagatgggaattacggtgcatattcagctggcagataaactgatgttcggaacgcagcggcagtttgtggagcgtcttgggggatacaccgtgttaaccacaagcatcaatacgatttccaccggagaactgtttgtaaaacgtctgtttgatattatcgggggactggtgggatgtgtactcaccggtattctgtttctgtttctggctcccgccattaagattcagtcacccggaccggtattcttttcccagatccgtgtgggaaaaaacggaaagaagtttaagctgtacaagttccggagtatgtatactgacgcggaagaacgcaaggcacagcttgccgcagaaaacagagtcacagacgggctgatgtttaagctggattttgacccacgcatcatcggctgcagacagctgccggatggaacggtgaagaaaggaatcgggaactttatccgtgactggtctttcgatgagtttccgcagttctggaatgtcttaaagggggacatgtctctggtagggacgagaccgcctacagaggatgagtgggtcagatacgaactgcaccaccgaagccgtctggccatcaaaccgggaatcaccggaatgtggcaggtgagcggccgcagcaatattacggattttgaaaaagttgtggaactggaccggtattacattttaaactggagtctgggactggatgtgaaaatacttttccggacggtaccggaagtcgtgaagaagaacgggtctatgtagaggaagtatgggggctgcaagaaatagtttgagaaggcatatcgcataatttctttgggaggcgggcgccttttcttttttcctggcgtatctcgtcagacaccggaacctgaatttatactccaattccgtgtatggaaacctttccatcgtgttgatcctgatcgatgtatgcatgatgttctttttaaatacatgtaagaacgtactgaaacgcggatttctcatagaactggcggcaaccatgcgtcaggtcagcctggtgatactgtttgccgtgctttatctgttctttgtgaaagatgcgggggatttttcgcgtattacactgtttctgaccgctatcttttatgctataatcagttatggaataagaattttgtggaaacggcatgtgttgcggaacctgcggcttggaagaaaaaattctatcgtgatattgacagactgggccaatcttccacaggtgcgggaagatatccaacatcacagctatgaactgtttcaggttcgaggaatcgttgtgatcgatgtcaatgaaaagaaaacacttcccgaaaaactgggggacatcccatttgtggcagagggagaatctgttatggattacttgtgccatgcatgggtggatgaagtatttatcgatctgcagccaaatgatccgcgggtagacagatggatcgaccagctgacggaaatgggagtaacggtacatctgaaacttgccaaccggatggagctggcggcgaacaaacagtttgtggaaaaactgggacgatacacggtgctgactacaagcatccgtaccgtgagtacttgggaactgtttctcaaacggctgatggatattctcggaggcatcgtcggctgcatcctcacaggaattctgtttctgatccttgcaccgatgatctatcatgaatcgcccggtccgatcttcttcggacagaccaggatcggaaagaatggcaagaaatttacgtgctataaattccgcagtatgtatctggatgcggaggagcgcaaagcagcacttgctgcagaaaaccgtgtatcggacggaatgatgtttaaactggattttgacccgcgcatcatcggcagcaggcgtctgccggacggaacgataaaaaaggggcttggaaataagatccgcgactggtccatcgatgagtttccacagttctggaacgtgctcaaaggggatatgtctctggtaggtacacgtccaccaacggaagatgagtgggtgaaatacgagttgcatcacagaagccgcctggcaatcaaaccggggatcaccgggatgtggcaggtaagtgggcgcagtgagattacggattttgaacaggtggtggcacttgatcgcagttatattgcgaactggagcctggaacttgatgtgaaaatattgtgcaaaacagtgggagtcgtgctgagacatgaaggtgcgatgtgagcgggagttatctaagatgaagcatgtgacagacaaaaaaaatcttaaaatttgcttagtgggttcttcaggagggcatttgacgcacttgtatatgcttaaaccgttttggaaggataagaatcgtttctgggtaacgtttgataaagaagatgcgaggagccttcttaaggatgagaagatgtatccatgttattttccaacaaatcgtaatatcaaaaatttgattcgcaatacgtttcttgcaatcagagttttgaaaaaagaaaaaccggatttgattatttcttctggtgctgctgtagctgtgccgttcttctatctgggtaagatggtgggggcaaagttgatttacattgaagtgtttgatcgtatagataaacctacaatgacaggaaagatggtttatccgattgttgacaagtttattgtacagtgggaagaaatgaagaaagtatatccaaaggcagtcaattttggtagtattttttagaatggagaaattatgatttttgtaactgtggggacgcatgagcagccttttaaccgtctggtgaaaaaaattgatgaattaaaaggaaacggaacaatacaggatgatgtttttatccagacgggatttagtacatatgaaccgaaaaattgtcaatggagtaaattgatttcatataatcagatgattaaaaaggtggaagatgcacgtattgtgattacgcatggaggtccggcaagttttattatgccgcttcagattggaaaaactccgattgttgttccacgtcagcatcagttcaatgagcatgtaaatgaccatcaggttgaatttgcaaggaatgtggctcagagaatgggaacaattatcccggtagaagatattgaaacattgggagatatcataacgaactacgaccagatcgttgccggcatgggacatggtatgagcagtaacaatgccaagtttaatgatgaacttgagaaactggtaaacgaattatattgaggatgaatggatgagaaaagttggaatcatgtcgatgcagcgtattgcaaactacggatcttttttgcaggcatacgcactaaagcagctgattgaagaatttgattgcaaagttgagtttgtagattatcatgtaggcgcacccgtaattacggaaaatgctgatagcaaaaataagtttgtccgaaaggttgaaaaaggtctggaaacttttcaatatcaggctccgtttgcacataagttatcgttcattcgttataagcagtctttttccaaaaagtatatgccccttttaggaattacggatgaaatgaactacaatccgacagtggattgtcttgtgattggcagtgacgaggtttttaactgtattcaaaaaaattccaatgtgggttattcgccagaattgtttggaaaaaataaccatgcgaagaaacttatcacttatgcagcgtctttcggcaatacaacattaataaagctggaaaagtataaaaaggccaatgaagtcggagctttgttgaagaagtttgacgcgatttctgtacgagatgctaattcaggaactattgtagaacagctcactgggaaagaaccagtgtacaatctggatccggttctgacctatgattacatgaactgctgcgacaaaatcccacaggttcagactaatgagaagtatttgattctgtacgcgtatgcaggccgcatttccaatgatgaggcagattggattgctgcttatgcaaagaaaaagaatttgaaggtatatgcaattggtggtatccaaaaatgcgcagaccgattcgtggactgctcaccctttgaggttctggcctatttcagaaatgcagaagaagttattaccgataccttccacggtagcatcttctcggtgatcacacatcgtccgtttgcaacattgattcgcaagagtgtaggtaacagctatggcaatgaagaaaaattgagtgatttattgaatcgtttgggtctgacagagcggatgacaatgaaagtggaagagacggaacatatcaatcagcagccaattgactatgaaaaagtagatgacgttttgcagaaacagagggaaatagcaaaagcatacttatgccaaagtataggtgaataaggggagaatagacatataaaatgaatgctaaaactttgaagcacgctgttacaagtttttttacagcgataaaaacaaaaaacatcgtgcccatcgaacatatagttgatgatgctaaagtgctggataaaaaagtggcactgataacaggtggttcaggaggaattggatatgcaatagcaaagtcatttatcgaatctggatgccatgtgataattacaggaacaaacgctgaaaaattgaaatcttgcgtggaaaagcttggagacagttcaaaaggaattcagctgaacttagatgatttgtcagatcttgatgaaaaagtcggcgaagcagttggatgctacggaaaaattgatattctagtaaattcggcgggagtccattctgtgaaatcgatgacggatttctttaatacaacgcaagaagaatttgacaagattatgcaggtgaatcttaaaggaacatatttcgtttctcaaaagatagccaagtattttgtagaaaataaaatcaaagggcatattttaaatatctcctcgtctacagggggggagccggggtggtcggcatatcgtatatctaaacaggcaattgaaaatctgacactaggacttgcgcagaagttgagtccgtatggaattgttgtaaatggcattgcgccgggatctacggcgaccaacctgttgaactataaagacggtgattctatagcaacaagagataatgtgataggccgtatggtgatgccagacgagattgcaacctatgctaaaatgctggttagtgatttggggaatatggttgtaggtgaaacgatttatatttctggtggtagaggaaaatttgatattagataatagagaataagataaatggcttggatacagtgcaaatcttgattttgtagattgattattgtttgaaactctggatttgagcgaggttcaattaattcggaaaaaggtagtgaccggtaaaaggagaattgaaatgtttaaagatgcggtttcccattggatttctcattataatcatgaacgatattggaaatggagaaaagttgtcatagattctgataataaaattccgcgcctgataaaaatgatgatgctcatatactgcaaaagaagcgaagcatttcaaaatgcttatttgggaacgacgttgggggggggagcgcggtttaaaacagctccgaatctcccccatggattaaatggaattgtaatttcatgcttttcaaagattggtgaaaatgtgacgattcttcaacaagtgacaatcggtcaacaaaggctgggggcttcgtgtgcgcctaaaataggagataacgtgtatataggagctggagccaaagtattcggctcgataacaattggaaacaatgtttttattggtgctaattctgttgttgtaaatgatgttccggataactgtacggtggtgggagcacctgcaaaaattgtgaaaatgaatggtgttaaggttaaatagaatatagtgtaatgggaaagagattatgtcgtatgaatagaccgttgatttcaatgatagttgggatgtataagggtgaaaagtatataagagaatgtatcgattctgtaataaggcaagattataccaatttggagattattcttgttgacgatggctctccagataattgtggcagcatcgcagatacatacgcagagagcgatagccgcattgtcgttgttcatcaaaagaacgcaggcgtaagcgcagcacgcaaccgtgctttggacatggcaaaaggtgattatatctgcattatagatcaggacgacgtcctctcaactgactatgtgtcgtatttttacaatctgattataggcaacaatgcgcagattgcattgactcccacagcagaaaagttttttggatcaccaacttttcaaacagagtttaaggatcatgttgaggtgtggagtggagaacaaacagcgattgagatgctgtaccacaaaataattatagcaccttggaataaaatgataagccgcaagctgttggataataatcacgttagatttaacccggacttcttcggtggagagggctttgcattttcagtacagagctatcaatacgcagaacggattgcggtcgggcacaagcttgtataccattatcgtgtcggcgatcctgaaagcggagcatcaaaattccgtgaatccacaattcacagcagcattaatgcacagcaatacataaaagatacatttgtacatgaaacacctgagttgctgaaagcttggaaatttagtaactggcatacttactgtgattgcttgaatattatggttggctgtggggtggcaaaacagtataaggatttgtataaagagttggaacaggtgtgcaaaagtgaagcaacctgtgcattttctgctccaatttcagcacagcaaaaattgcgtggaattctatttaaaatcgacccctatatggcggcgaaaatcataaaccattttagaattagaaagttcgaaaaagctaataggggggagtaactaagagctgttacatcctcgattgtgatgcgaatttcccggaaagatgctaccaaattgaaacatgtgaggaattagaagaattgtctgaaaaagtttctgtaattgtttcggtccataatgtggcaccatttgtggcaaagtgtattgaatctatcgggaatcaagaatatcaaaatcttgaaattatcatgatagatgatggctcgatggataattcgggcgaaatctgtgatgtctttgcgaaaaaggaaaatcgcattcgagtgattcacaaaagaaatgctggtgtgagcgctgcgagaaataccggaatcgaagcgtgtacacgcgatgatatttgctttgtggacggagatgactatgtaataccagattatgtccgaaagttattccttttacaatgaagttgagagaacgtcgatacaaggttgcagttacacatagataaaatctgttgaacaaagtgattgtgacggaaaggtttaagtatgaatcaaaaggtaaaaatagcaatggtcacaaatcattttggtataacagggattagcacggttattctaaattactgcaaagaattagatcgtcataaatatgatttgactgttattgcaggaaaaccaattgcagaagaaaataggaaagaatgtgcagaaaacggtatttgcctaatagaattgccgtcacgtcatcaggaatctgtaaggcattacgttagcctctggaaagtactcaagcaaaaccattacgatattgttcatgtacatggaagcagttctatgatggcggttgaactaacaattgctaaaatggcaggtgtaaaaatcaggatagcacatagtcataatacaatgtgcccaaatatgaaaatccacaggattttgaacccgtattttcgcaaaatttatactcaagcacttgcgtgtggcaagatggcgggtgattggttgtttggcgaaaacgagtttgaaattataccaaatggttttcacacagagctgtttgagtttgatgaggaagagcgtaagcgagtaaaaaaagaacttgatattgaggataaactcgttattgggcacataggtagatttaatgaacaaaaaaatcaagagtacttaattaaaacttttgagcaggtggcaaaagtatgtggtgatgcagtgcttctgctagttgggacaggacctaattttaatagagttaaagggatcatagataatagtttgtacaaaaatcagattatcctttatggagttacaaaagaaacgagggcaatgtactcagcgatggatgtatttgtgtttccatcgagatatgagggtcttccggtggtgcttttagaggcacagatgacgggacttccttgcatcgtttcggataaggttactagagaagtcgattttggtgagattcagtggctctcaattgaagatgctcccacaaattgggcaaaatcaatcttacaaacagcagtgaaatctaatgtgcaacgtagaaattatagaagcaaacatataaccagaatccagagatatgatataaatcaaacggtgaatcagttggatagaatatatgagcgtctagttcatcagtaaggaggaaagagtatgcctacatatgaaggactgaggctaaaaatattaaaatactggagagtgggtctggcagattggagaagaaaacaactgaagtctacagactttacaattatctccaataactgctggggcggtatgatttatgaaagctataacttgccaaaagaatctccgacagttgggatgttctttatggcaaaagattatattgagttcttgtccgatctgaggggttatgtcaatggaaaattgacctttatcaagccggaggaatctcgttggaaagatatgccacaggtctcagaagataagagatttggctcgtatccggtgggcgttttgtctaatggtaaaaattcgattgaaatcttcttcttacattaccatagtgagcaggaagcaagagaaaagtgggaacgtcgagtacagagaattaattggaataagttgttgattaaattcaatgatcaaaatggatgtacggaaaaggaggtgaacaagtttatgaagatggcttataaaaacaaattattttttacttgcaaggtttggaaaaatgctcggggggggggtatacagttattcatcagttcccaaagcacgagtttataatggcttcgtatgaaccatttgggaaaaataaatatatagatattacatctgtcataaaccaattgtaaaaaattttccttttcgtgcagaactgtttgtggcggattagcacggaggattatgaaaatatttcacaaatgttatattggcttagtgagcgcatggaagatattatgtgtcaaaatttgtacccgtggaaaggctcgagcgacatggattaattcaattagaggagcacttaagattgaaattataggggatgggagtattactattggacatcgtttgatgtccagaggaccactttatcttaagtctgtggatggcgggaaattgcatattggtgaaagcgtattttttaatcataattgctctcttacttgtgcagaaagcattgtgattggaaatcattgcatgtttgccaataacctagttatcattgatcatgatcatgaaatgggaaaagatggtgttactggagctcttgtttcaaagcctatagttattgaagaccgagtttggtgcggggctaatgtcacgataacaaagggggtccatattggaaccggggctgtgatagcagctggagcagttgtgacatgcgatgtacaggaaaagactgtagtggcaggggtaccggcaagaaaaattcattaaatcaaggagaatcagagtggatttgattacaatagttgtaccagtgtacaatgttgaaaaatatataagtgactgtttggactctttgatcagtcagacatataaaaatatagaaattattttggttgatgatggatcaacagatatgagcggggcaatatgtgaccgttatacgacattagatgccagaataaaagtgattcataaacaaaatgaggggcttggatttgctagaaatactggattagaggttgcacaaggaaaatttgtgacctttatagattcagatgatatggcagatgctgatcttgttgaaaaattggtaaatggactttatgaagagaactgtgatacttgtataggcggattcaagagaatttcagaaaatggtacagttagttttgaggaaaaatacgataaaatagtatacgagggaaaagatgtatatgataaattgttcgcacgaatgttgggaagtgcgccagatagacatgattcagtaagaatgtctgtatggaatgttatgtattctatggatgttattcgaaaacataaaattgagtttccttcagaacggatatttatttcggaagatattatttgggattctgaatactataaatatgctaagaaagctagtgtgattagctcaactgcatacaattatagaattacacctggatcgttgacacagaagtataagccggatatgttagaaaaaatatgtgtcttgtacaaagaactgtataatagatttttggatgataaaataaaaattgcacgtcttcaaagacaattctttgtgaatctcagagcatgcattaaacaggaacgtttttcagtgtctaataaaagcaatatggaaatacgaacagcgataaaagaaatcgttaataatcacgtagttcataatgtttcagaagaatatttacaagttattcatcaaggaaaacaaaaactgtttgtttggatagttaggtataagtgtgtcgaattattatattttattaataagataggaggactgtaagatgggatggaaagataaaataaagatacttatattgggatatcgagcaacaagtgcttcgtatatagatcatttgagaaagattggagtaaggatcggtaatgatgttgtactgttccgacctatgaatacaacgatagacacgcaaaatccacatttacttagaatcggaaatccggcacgcaaaattatgtcactagaggactattatgagaagcgaaagaaaaagcaattggcggaggcagtgaattatgcgcaatgctataaagagtgctttggtgaaaatccgatgatggataaattagatgagtatttctacttattctttgatccgaaaaatgaggaacaaaggaagatttttgattttaagttgaatttgatgggaaactatgatgaggctcttcaggcagcaataggaggggcaatttttaaatcatatgaggaatttatagactattgcgaattaattaataatggatggaaaaataatgagtgagttgaaaatacgtcggtcaacgcttgaaatagtgatgttatgtctatcattttatgaatttacatgtgttccacattcgcttttcctaatcatcaagtattcaattattgcatacttgcttctttcgcacataaaagaatgtggaaaaatgaagaaagtggtagcccccattttgctatatggaggcattacgtttatagcgacactcgtacatcaaaatgtactaaatcgacaaggggcggcgtttgtttatatgctacatattttggcgatttatgttaccattgttgcatttatgcgatgtcgcggggtggaaacacttgtaaaattgcttataaagacattgttggtgtttgcacttgtgacagatattcctatggtgtttattaattacgatttctcgagtccatcagagagctatttaatagggaataagtttgccgtttcgtatttacattgttttattgttgcgttactcttttgcataaataacgaaaaaaaattaaaaaaatcatattttaaaatttgtcgaatagtgtttcttatattttcaatcatgatttgcagactagttacatgtacaacaggtatgctaatatgtttgattttgggcgcaatgatttgctttcctatttcgataaaaataagacgcattctttcgtcaccaaaagttgtgattctgataacggccgtgataaattttttgatgttgggaagtgttagtttacttaccaatccgtatgtagtaagttttgtttatgatgtattaggtaaaagttatacgtgggttggtcgattacatatttacgctatgatttctgacgttataaaagtacatccatggattggttatggatatttttccaatattgtggaagaaattctgggatttggaaatgcacagaatggtgtgttaaaaataatagtggattctggaatcgtgggattaataggatatgcattgctcgtatatagaagtatgaaaagcaatgaaaattcatcaaaagaaggatgggcgttgacggcttttgtatattgtatgataattgcatcgatcgtagaaataaatttgacggactacttatttttcctaacaattgcaattatattttctgcgaaggaaatgaatttggatatcagaaattatatagaagagaggcggaatacagttgaagaactcaatggggaaaaacgcgtttttaaacggatttaaaaatgtattaaatttattgtttccgctacttacattcccatatgtttcaaagattttgaatgtcgagggaatcggacgatataattttgcacaatcggcagtaagttatttttctttgattgctggtcttggcatatcttcttatgcaattcgtgagggcgcaaaatatagagaaaacaaaaaagaatttaatatcttcgcttctgaggtgcttttgtgtaatgtgctctcaacaattattgcgtaccttttattagctcagtgcatgattcttgtggacaagctgaaagcgtatgcagcactaatttggatctttagcattcaaattgcatttacaacgattggaatagaatggctgtattctatttatgaggaatatgaatacataacgataagaagcattgcttttaagattatttctattgtaatgatatttgtttttgttagagatagtagtgatacaataaattatgcagcgataacggtatttgcctccgttggatcaaatgtgctgaatttgattcattctaggcaatattttcggattgtaaaagtgcatattagagattgtgtaaagcatttgaaaccgatattggttatatttgcttctaacattgcaattatgatttatgtgtattcagataccacaatgcttggatttatgcagacggattatgaggttggaatatattctgtttctgtcaaaatatataccattgtaaaaaatctcttggcctcggtattgatcgtgtcgattccacgtctttcaatgtattatgggatcggaaaaataaaggaatttaaaaacacggcgcaaaaagtatatgatgcaattactgcgttggttatgcccgctgtaattggattactatgtgttagtgaaccagttgtgttggttatatctggtgatgcatacatatctgcacaatcgtcactacgcattttgtgtattgcattattattttgcatctacggttggtttttcagccaatgtatactgatgccggcgaaaaaggagaaaatgattctaattgccacatgtataagtgcagctgtaaatgtaggcctgaatttttgtttgataccgatatggaaagaaaatgccacagcatttacaactgttgtagctgaatttattatgttccttgcttgcgtaatgcgcggattgaaaatcacaaaaattaaattgttgaataagaatactcttggtgtcttggtagggtgtgcggaaattgtctgcgtatgcagaatagttgtgtcatgcaattatagtccggtcatacaactgataggcactgtagcgatatctggaattgtatatgtattgacacttgttttatttcacaatgataccatatgtactattttaagaaaggtatgtcgaacacatgaagagtaaagtgacatttttaataccatattttggaaaattaccaaattatttcgatcttttcctaaaatcttgtgaatacaatatgggggggtataaatggattgtgtttacagatgaccaaacaattcggaattggccggataatgtattacgtgttttcatgacgtttgatgaactaaaagaattaattcagtcaaaatttgattttgaaataaaaataatagaaccacataaattgtgtgattataaaccagcgtatggctatatattcgaagaatatttagaagaagctgactactggggacattgcgatattgatacgatacttggaaatctcgatttctttttacatgatttgttgaagtgtaactatgctaaactattttgtctcgggcatatggaattatataaaaatacatatgaaaacaaccgtattttcatgcggccaataggagaacgatatttatataaagaatctttttcatcgagtaggacaactgtttttgatgaatgcggaagtggcgcggagaatataaatgatatttttaaatattacaataagcctgtttatgaaaaagattactccatgaattgtagcattgttccgacacgtttggtaaaggttacatatttggctgaaaacgattctttctatacagaaaaacctaaagatgctttgtatgtatttgataggggaaaccttttcagattgtacaaggatacgaaaaataataagatagtccgagaagattttttgtatattcatcttcaacttagaaaaatgaagtttgatagcgatatattaagcaaagaatgttttaaaattttggagaaccaatttgcacagatcaacaattcgagcattttaaataaaacggtagataatttgtcaattagagaattcaacatggtcaagagacatgcattgtcacttcgcttttttaaattgcaagtgaagtggaaaattaataaactgaaaagagttgtgagaaaaattaatggatagagaattggtaagcgtaattattcctgcgtataatgttgataaatttttgggagagtgtgtacgttcgttactttgtcagacatatacgaattatgagattattattatagatgatggatcgactgataacacatatgttattggagaaagccttacatttgaaagtacaaaagtggaagtgttccgtcaagaaaatcaaggtgttagtgtagcaagaaatgtgggtatgcaaaaagcaaagggagagttttatgtttttgtcgatgcggatgacatagttgcaccccgatatattgagacacttgttttttgtgcccaaaaatctgacatggggattattgggtttacttccgaaagaaaagaacttacaacagaagtaaatctgaataatgtatatgttaatgcgtctgatgtgatagaaaatatattgtgtggctccaattatgatggttatttatggaacaagatatttcaaaaaagaattatagaaaataataatttgaaatttctgaaaaatatagtggtcttggaagatttgttgtttgtattacagtacttgaaaaattgtagtacaattgcagtttcaaatgaaaaactgtattattatcggaatagagagggtagtgctgttaataataatcgactggataaatatctatcgaaatataaagtgatggaggaaataaaaaagcaggactttacttgtacagaacaaagtaaaaagaaaacatcatttttatattttgaaacaatgtttagctacttgaatcagatccttattcgagaaaataaaaccaatgagctggctgaaatattgcccaatgtagatatcgtagaacttttaaagttaaagaacataaaactttttttgaaattcttgtatcttaagataaaaggaaagctatataaaatatgaatgaacagaatttgtttgagactttacaaaggaagtcaactggggaaaacttatgggatgcagtatgtttttttcaaggaaacatttttaaaacttattcagggttagagtttacatatgaattgagaagaggacgaaacggaggatatacaaaggagttgagacattggggtcagaccctttgaaatactaataaaatgagtaaatatgttctaaaagttttctaaagaaagtataacataaagaaattacgaatctgtatgtgttaaggatgctcagttaaagcaatatgaacacaataaggagagatatgaacacaacattacttatcatggctgctggtatcggtagccgtttcggaacaggaattaagcagttggagccagtggatgatactggacatatcatcatggattattccattcatgatgcaattgaggctggcttcaaccatgtagtatttattatccgtaaggatatcgagaaggaattcaaagaggtcatcggtgatcgtatcgcagctatttgctctgctcataatgtaactgtggattacgcttttcaggacattaacgatattccgggaactctgccggaaggacgtacaaagccgtggggaactggacaggccgtgcttgcagcgaaggaagtaatcgataccccgttcattgtgatcaatgcagatgattactatggcaaagaaggcttcaaggccgtccacgagtatctggtaaatggcggtgagtcttgcatggctggctttgtgctgaagaataccctgtctgataatggcggtgtgactcgtggtatctgcaagatggacgaggataacaacttgactgaggttgtggagaccaagaacatcgtaaggactgcggatggagcagaggtagatggtgtggcagtcgatgtgcattctctggtctccatgaatatgtggggcttgactcctgattttctggatgtactggaggacggattcaaagagtttttccagaaagaagtaccgggtaatcctcagaaagccgagtatctgatccccatcttcatcggtgagctgctggagcagggcaagatatctgtgaaggttctgaagaccaacgacacctggtacggcatgacctaccatgaggatgtcgcagcagtgaaagacagcttcaagaaaatgttggcgaatggcgtgtataaggccgacctgttcagtgatctgtaaataacgatgaaagaaacgattgatttactcggcaagatcatcacaaacatcctgactgctctctatgaatcgtttggattttcactccttctttccttcctcgcccccccaaaaagcaaaaataactcagaatagcgaatggcaggaaaaaagtcaagaattttgaatcgaacatgcgttcgcactatgctataatacgttttgtataactgaaaagaaagtaggatgtggatttccgattattaagatgccctctagtattacgaaagagggtgatgccctatgaacacaatggaagtgcttactttattgctagtagtttttgcggcactgtcttacatagataatcataataaaaagaaatagcatcccagaccgtccaaagttgaggatgctattctttgtagtttaactttactgagggcaaatcggataacacatccgataacctttctgagtaaattatacatgagggtgcttgatttttcaagtgcccttttcgatacaattagcaaaataaatcttgacatgagtgcgaattgcgaagaggaagaaacggcgactatacaaatgaggtgccgggatgggtcgatttggaacgattgttgaatgcagtagttcacaattttgagttgcttttttccaattattctcattttattgattcacgtggatccattatgtggaatgtaaaggtgattaatctgattcttgcgtttggcaaggaagatgctatggatatgattgagaagaaggttatacagtttgtttcgtgtgaataatggaatgagagatacactagcttgtggttgggtgcaaacttcgaaacagacaagaagggtacgggagatatgaagatactaatgattggaaacggctttgacctagaacacggtctgcctacaaaatacacggattttttggattatatcattacttttcggggatattatgcaagggtctatcagggacaggctaagccacgatgcgatgctgataaaggcgactattttgaaaagttattttccgataagaagaatcactataaagtagaggcgttgcaggcgatgacgaaggataatctgtggatcgattattttattaaggtcagagagcagcatctaaagaataaggagaactggatcgatttcgaaagtgagatatcgagaattgttcaggatcttgatgaatttcaaaagattgcaggcagttcttcccggacagaagagtactatcattacaaagagaaactaagagagattcttgaacaggaagatttgactccggaagctatccccaaaacgattgataaacttatgctggagttgaataagttgatctgtgcattggagatttatctggatgattatgttggcgggaagaagattatactgtacaatccggatattgcgcagattcatccggataatgtgatttcgtttaactatacggatacatttcggaaagtatatggcgagtatgatacgaataccctgccgtcatttgttcatggtatggctactgatcatacagatcgatttcgggttcgacttagaaaaaaaggcgataaaaatgccaatcgggttgaacgaaccattgagaagaacaatatggtccttggtattgatgaatatttgccggaggatcgtagagctgcagagattgattttattgaattcaagaagttttatcagcggatttataaaggaacaggcaatgaatacaagaagtggctgctggcaaatgaaccgaaaatgttatatatattcggacattctttggatgttacggacagggatctcttgcgggaattcctcgagcgggatgatgttaagacggtagtcttttatctggataataagcagcgccgacagctgatcacgaatctggtaaagatacttggagaggatgcggtcattgagaagacatatgggaataacccaagtattgtttttcagaaacaaagtccggcagagaagattgaaaacagcaagtttgatctgcttcgcgacatcggcagagtgcggcgtctgtgtgagatgccggaagcatcggcaagagtgcttttgaacaaaatcgatacgaagatcaatgatcgggatctggagtatttcggaacgcaggtggaagtgatcgatctgttcgatgcgttgcagagaatcggtctgggtgagcggtacaaggatgatttgtaccatattgcggtttctttggtggaagaggttggctgtgaaccgaagcaatttaacgaggaagattggagctgcggtgaatacgatggctcgtttgggccggatgcagatacggcagcgtttattaaagaaattaattcatttacctggatttatcaaaatgcgcacgaacaagagcatacagatgaggaagatgatatattttcaaaatatgagtatctttttcatagtgatggagaggttcgggaaccgatatttaaaagggtatgggaagattttagaaaggcatgttccgagggggcatatagccaaaagaaattgtgggatttcatgcgttcgattgttttaggacctgcgcaaaatattgcgtatggaacgattcgtaaattccgtcaggaaacggatgatccgatcgagattgcacagctcacagagctgatgtatgagatggaggcgaacgagtacatggagtctgtggcggaaaatttacataacaaattggattaggaaagataggaaccgcctcaggtgatgacatggggcggttcggtgctacatattatttgttttgcttagcaagggcggcttccaattcagcgatacgagaggcctgttgattgatttgccaggtttgttggtcaatctgcgaggcctgttggtcaatcggagaagcttgctgatcaatggtttgcgtcaattgtgaattggcttcttccagatagcgaagcttattgttttttatggtttcccaataggcggcatcagcgcgtgactgtgcgcactggcgggctactgcgtctgagttgagctgatataaggagtccgcagctttttgcattgtttcattattttttgtgatcatacgcaaatcctcccatgtctttgttttgaaaagttttgcccaacggtcaattccatagtgccgatcctcttctgtgccaaaaagcaaaaataaatcagaatagcgaatgacgggtgaaaagtcaagaattttttgaatatgagggataagccgaatagcagaaatcacagatatgtgcgagtctaaattgtatttttaaaatgaatccgctatactataaacagtatagcggattttatgtttggagagagtgtatatggtccaggaatttgatttcaatatgatgaagataagtgaaattattaagcgtgttacacagatttgtcgtagccttcatgtagtacgcctggatttatttggatcttttgcgactggaaccgcaacaagtcgaagcgatgttgattttgttgtttacggagaagtggatcatgaggcgttagaagaagctgtggagaaaattgatacacttaggaagattgatttcttttattatgatgaaatagaaaataagtatttgctggaggatattaagaagtatggaaaacaaatttattaatcgatatcattctttttgtcatagtttagcgaatctgaagaaaagcaccgtggcggatcctcaggcagattttgtgttagaaggtacagtacagaattataatcttacctttgatttatcctggaagattatgaaagatattttagttaagtatatgggaatcctggattttgctgtaggttcaccgagggaagtgctacagacggctttctccaatggaatcattgaaagtgatatgtggctggaaatgctgcgggcacggaatcaactggctcatgattatgatggcgaattagcaaagaaatattttgagcggattacggtggagttctatccgctatttgtcaaacttcaggagcgggtcagaaagtattatgaagagccttgtctgcgggaaacaatgactttttacacaaagggttgatcgatgcgaaagtatgtatatttatttgaattggattctgtccgtaagacggatgtggatattattgccggacagaaggcgctatatgatgagattcatgtttctgcactggatcggcaggaagaaaagctgagcgcagaaaaggcagaaatcgtaaaacagtgcgttacactgtacgaggagtatgccgacggaaatatatgcaaggaagaattcatccggcagtgagatgcctacagagtgcaggaagatgaacggatggggcagattcaacgacttcgtaccgagaaagatcaaattttccagcctgtgaagaagaatacggataatttgcaagccgtgatggatactgtgagagaagctggcgatgtgatgcacttatcacagaatgtggtagaaacctttattgaccgcatcgaggttttcaacgatgagcgtgtgaaaattcgttttacatttgaagatgtgctggcagactatgccgaatgagtcgtagccagaatcaatacagtaagcagagttttttgtaagaacatgagattcatggtatcatagaagcaataaaaagtctgtgtgtggctacgcgaaaggagcagcagagatgaaaaaattgaacatcccagttggtatttcggactttgagaagattcggaacggtgggttttattatattgacaaatctggcctgattacggaaattttggacgaaaaagcagaagtgacacttatcactcgaccacggcgtttcggcaagacgcttggcatgagtatgctggaaagtttcttcgacatccgtaaaaacagcaaagaattgtttgagggactggaaattgcggagcatcaggcattatgtgatgagtggatgaatcagtatcctacagtctttatttcattccgacaggtagacggtctggatttcactggggcatacgatatgctcacaatggtgatagcggatttgtacaacaaacatctttatttgcttgatagtaaaagtgctacagaattccaaaaaacagcgtttgagcatcttgcacatggcaatggttctataaaagaagttaagagcagccttatgcttttgacaacgatgatgcagagctattatgcaaagcctgtaattcttcttatagacgagtatgatgtccctgtagcaaaagcgaataacaacggttattataatgaaatggtcgatgttatgaaagggttgatgcaggccctaaaagacaatcaagcacttcagtttgcagttgttacgggctgcttaaagattgcgaaagaaagcatttttacgggaacaaataattttgtatcggatactatcacaaattctcgtctgaacgagtatttcggatttgtacagagtgaggttgacctgctgctaaaggatgctgacttgacaacgcaggctgagagcatcaagaaatggtatgatggataccatttcggagcctttgatgtttactgcccgtgggatgtaatgaattatttgctggaactgcagcgcaatccgaaagctaagcctatcagctactggaagaacaccagcgacaatgcaatcatccgttcctttattgactatgcggggagtaccatcacaaataaacttgaaaccctgatggctggtggctgcatcgttcagcgtgtggatgaaaacctgacctatgattatctacattcctcagaagacaatctttggagtacgctgtacctgacagggtacttaaccaaggcgcgtgaagaagattataagggtgagttgccggatggcatggttgcccttatgattccgaatgcagaaatcaaagagatttttgaaacaacagtcatcaaatggttcgatgacagtacgaagaagtggaatcgaaatgctttgtttgatgcagtctggaacggtgacagcgaaggcattaccaaggaaatgaatgctctgctccggcgcaccataagctaccatgactaccgggaagacttctatcatgctttccttgcgggcatctttacaggtgccggatatatggtggattccaataaggagcatggagaaggccgaagtgatgtggtcgtttacgattccatcaatgcccgcgttgcaatctttgaagcaaagtacacgaaagttttggaaaatctggaaagtgaatgcgatatagccttgcagcaaattgatgatcggatgtatgcaaaggagtatgaggatgattacgatcagattctttgctacggtatttcgttctttaaaaaacgttgcatggtaaagaaaaagtgattcacagcaaatcttaacttgaattctgtattataacttaaaatgagttaaaatacagaaaaagaattataaaataatgttaaactccaatgaaatggtggatgcatgcaatggaaatacatttaagtatgcggattttgaagatatgctgacaaattattccgtatatttaaaaggcgaattgaaggattatatgttaatttatatggaagacagtgattacagtaattttatttcattctttgattattttcagggcagggattcgtatcactgtttaaaacaaaattgtatttttaatattaatccgttatactatatgcaaagtataacggatttttattaatcaataaaaccaataacatttcattcgtgaaatcgtataggataaatcaggagataattatgttaacaatcgtttatggagaggttgatggggcaattaatgacccagacacctattttaatcatacctattctcaaaaatggtttgaggacccttttgttaaggagatgatccgggcggtagacaagtcggaggtattgtcatcccatgcaattgaaagtcctgttcttggaattattccgacatcgaaattgtctggtggggtaaaggcacttatccttgtttataaaaagccggagctgttgatagattgtactgcatgcggtgaaaattgtgccgaatggattcttaaaattgcggaaaaccagaatactttgatcaatttgaattatttcatggattttccggaaccatttgaacttcagaatgtatatagttcgacattaagttatccgccccggcttattacgccggattacgtgctgtgtgaggattctaattcagggttggagatgtttcatgctttagctgaaaaagtttcagcagaatgtcatagcgcacatggaaaatccaagtgactatacagagagcacaaaatacctgagctgggaaaggtattttacgcatgtactggaagaacatacgaaggggacagaactggaatatcacaagaaaaaattaaacaaacagtatctttatgccagagcgatgaaaatattatcaaagtttttactggacagtaatattaattttgacaggtgcatggtataggaaaaaaggatgagataaaaccagcgtctaagcccgacacataaagaaaggagaacgaaaacgatgaaagcattaaaaaaacaacaaattgcggtcattttggtactgtctgtcatactcagcacattcgcagctgttacacctgtaagtgcggcatcgctgtctgcacagcagtatttggaaaagatggatatagcggtgcgaaacttaaaatcatatgattttacgcagacaaccgatcagaagatgacaatggaagggcagatcattcaaaataagacggtggtaaagcaaagcgtatacaacagtcctctgaaggtaaaaagcgtaacagatacaaccacagtacttgcaggaatgagttctaagaaccaggcggttgcctatctgacaaaagatgcggatggattgctgtgggagtacatttcttccaatggttccggatatcagaaaacagggattttaaactataccaatcagatcaaaggtatggatatttccatgtattcggatgcaaaaattgtgaaaaagaaaataaaagtcaaccggatcaataccgttcagatttcggcgcaggtaaagggctccgatgtggtgaaatttttggaccagatgggaatgagcaaagagatcaatgcggcagctgctgtggattacaatacgttgccggcaatcaaagtgacctgttggatcgataaaaaaacctgccgtccagtcagaaccacggcggatatgaaagcgtttatgaacgggtatatgtcggcgctgtatcagaagctgggacaggatctgaaacttgtttattcgcaggcaaaagtaacggtaacctatataaattttaataaggctgcaacatttaccataccgaaggaatgcagataaagataccacattttcaaagatgacaacaacagttactgcggatacaaataaaatagtatatacggcaaaggttccgaaagacgctacatctgcacggtaagtattcggttggaacatacacctatcaaaaataaatgtttctgagaagagagaatagctgtttgcgaaaacggctattctttttttatctaaaatggcatatttcttgtcagaagcaattgaaattataattcaaatatgataggataaagtaggctgtctagtgtagaaaagacacataaggcagagttggtgatatatgtaatgtcagagaatgatagttactacatataaaattataaaactacggaggaagaaacatgaagaacaaagattatttaacagtaagacaggaagaattgatgaattttctgtggaaggtcaatgagccgctgactgccaacgagatggcagagcgtctggcagaagacggatggaacaatgttacattgtttaagaccgttcagtctctgacaacggatggctatctggaagttgtaggacttgagaaaaccgtcaagacttatgcacgtaaactcgctccgtctatgtcaaaagacgattattatgcatctgtattgattaagcgtggaattgacagcagttctattgcgaacattacagctgctctgatcggagcaaaagataagcagacaaaagaaaaaaatgcagaggttattgcaaagttagaggagattattgataccctgaaaaatgatgaggaataagaatgcaaataacgatattttcggtttggatgacgttcgtttggtgtaacatttttattgtactgtgctacattctcagaaaacgatcggttctgctgaatttatccagtatgacaggaatcatcattttatatttgttttgtctgatcaggcttgccgtcccggtggaattgccatggacgaaagtggtatccggaggcagcctgtataatttcctgtatcagatattcgggtgtgaaataacctgtgtggcagggcacgaaatctatgtctatcatatatttgtggtggcatggggagtggtcatggcagttcttctgacgcggtatctgatacagtatcacagagttgtgtcgtatttttcagagatggaaaaaacggaagatacagaattaaataatattttagatgaaatttgtacggataaagaaaagcggaacattaagatcgtatagacagccgtggtagaagtaccgtgttgtatggggattcttgagaaacggatattgattccggacaaaaaatattcgcgtgaagaattgcattatattattctacatgaatatacacatttggataataaggatatactgacgatacagctgatcaacattctgtgtattgtgttctggtggaacccgtttgtgtatattttaaaaggagatatgtatcagagtattgagatccgttgtgaccagacggttacaaagaaactcaaatcggcagagcgggggaactatctggcggtgatattaaaagagtataaggcaagtgtgcaggaaaaagaatttcgaaaacctgcaggagccatgccgttgtttgaagatcattcggatcatctgatcgaacgatttcgtctggtcgcggagggaaagcaaagtggttcgcgtattggaagaattctcgttccggtgattgcggttgcactgttggtgctttcgtattcgcttattcttcagccgaggtatgatgtgccagagaatacatataccatagaaaacgaatttgaggatataaatcaagacaatgcatatctgtacgtgtcagatggaaaatattatctccattgtgaacaggggaatgttgtgattgataagcagagcatgaagctttttaaaaaggcgggtttaaaatttaaaggaggaaattaacatgaaaaagaagtttttaattgctgtagcgatttgcgcatcattatttgttgttgcgcctgctgtgagtgtgagtgcagcggaggttgaaccagaggtacagactcagaacgagcagagcaatataggtgttgcaccgtgtgcggatgagatcgtgatgaaattccgtattaatgttaaaacaaaacaattacagtatcgacgttggaaccagaccagaggatactgggtggataagcattggattgatatgaattaaccaaagaatttgccggtgcagctgcaccggcattttttttataaattattctttcgcaaattataattcttccggcagttcccacgcctgtgcctgttgttcatattccgaagcacgggagagaagatccccggcagagcatggatcacagaggtcattttctgccaacgtgcggtaacattccgccagtcgcagcaatgctttttttcctgaaatttcaatatccagaacaggctgtgtctcaaatgcagcattgtaaaaccacagagaagcttcctggggattctgccgttcccggtagtattgtccgagctcataacaaatttcggagcaggaagaaccgcacatatctttcagacagatcgaaaagaaatcatccacagaattttggatacgggcagcgtgtgccagaatacacgcggattctgcatcagcgtgtgcttcatagtgtaacgaaaaataatccgccgcgcgtagaaaatcttccgcatccccacatttataaagttctcttgcatacatgcgcgtgattttctccgagaggacatgattttcacgaaatgctttttcaaacatggcaaaatctcgcttggcatgcatggtatgtgggtggtgcagaatatcaatatcactgtcatagatgacgggatcaatgcggatcgtttcgtgaaccggatcgacccatgaaaacgtgcgcaggcgtttaaaaagttttggacgtggctcttttttacagttctgcacggtgttgaaatccggtggggtgatatagttcatctgaacaatttcaatttccggaagaagagcaccttttaaccggagaaaacgtctttgattttccagatcaagggattcgtccgcatccggacagtagatgtaatccatggttgcaagcgaaaacgcataatttcttgcggcggagaaatcatcacaccaggtaaaatcatagatccggctggtgtattgtgcggcgatttctttggtgcgatctgtggagccggtatcaacgatgatgatttcgtccatcatggaagcaacggaatccaggcatcttgccagaaccggttcttcatttttgacaatcatacataaacttattgtgatcataataacagatggtccttccgaggtttttcttttatattacactatcctgcaacagttttacatagaaataaagaaatatacttgtatcttttttgaaccatggctataataaaatttatgtggtgtgaaattataaaacaaattttggcagatatgcgccagccacttcaatatgtgccatgggcactgattattgtggtacttgggctggttgtaacaattgtactttctgaaaaaaaagatggaaaaaaagcatccgtccggttttttcgtatactttttgcgatttatatacttgtggtgatacagattacttttttttccagagaacccggttccagaaacgggtgcatgaatctggatctgttttccacgtggggatacagcgtggttacccatgcattttttattgaaaatattcttatgacagtgcctttcggaattctggcaccgctttgttttcgtcggctgcggccgatgtggaaatgtgttgtactcggaggtgtctgttcggttctgacggaactgagccagtacgtgacgaaacgcgggtattgtgaagtagatgatatgctgaccaacaccataggtgttttatgtggttgcattttgttatggctgattgaactgataataaaacaaaggagaaagaaatgaagtatgattatctggtggtaggagcgggattatatggctccgtatttgctcacgaggcagcaacaagggggaaaagggttctggttgtcgataaacgtccgaatattgccggaaatgtttatacggaggacattgagggaatccatgtgcacaagtatggcgcacatattttccataccaacaataaaaaggtgtgggattacattacaaaatttgcggaatttaaccgctttacgaattcaccggtagcaaattacaaaggggaactatactcgcttccgtttaatatgtacacctttaataagatgtggggtgtggtgacaccggaggaagcagcggcgaaaattgaggagcagaaaaaagccgcaggcattacagaaccgaaaaatctcgaggaacaggcgatcagtcttgtgggaaccgatatttacgagaaactgatcaaaggatatacacagaaacagtgggggcgtaagtgtacggatctgcctgcttttattatcaagcgccttccggtgcgcctgacgtttgataacaattattttaatgcgctgtatcagggaattccgatgggcggttacacaaagatggttgagcatctgctggagggaatcgaagtccggcttgggattgattatctggagcagaaagaggaactgaaggctctggctgagaaaacggtatatacgggagcgatagatgcgtattttgattattcgctcggcgcgttggaatatcgttccgtgcggtttgaaacagaacttctggatactccgaatttccagggaaatgcagcagtcaattatacggatgcccagacgccgtggacacgtattattgaacacaaatggtttgaattcggcaaggatgatgagggacatgatttaccgaagactgtaatttcgagggagtacagttcggagtggaaaccgggggatgaaccgtactatccggtaaacgatgaaaagaacggagctctttatcagaaatataaagaacttgcggaaaaggaaaaaaatgtaattttcgggggaagactcggagagtataagtattatgatatggacgctgtgatcgcttctgcactggaaatgtgcgaaaaagaactgggataggcttctagaaagatacaaaaaagagcattcgctgtatggttacagctggaatgctctttttgttatacatatttgtccagcatcattccggaatagatggatgtgatgtatggggttgcaaagttgtgaccgggatttttataggccacgactatcttgttgacatagttcatcggattgatggagatattttccgcttcttttccgatggaatcccgaaattgggataaagtttcaaatgtattctgatcacgttccggaacaactgcttcacggagcgcttctttatcaatagagatggagccgttctcgtttgtgaccagaccgatgtcctgtaaagaactccggcttgaaccggatatggaaagaatctctgtctgaagtttgtttccggcactggcattggtgtctgcatacacggctgcggtggaaagtatggaattataggcatccaccagagactggatattgtccgcaattgcatccgcatctgttttaaatccaatgtttactttctcactatcggttggctgatttaaggtcagttcaaatacctgattgatggaaaatgtgttggtcagggaagagtggcttgtgccattcagtgtaaaggcggaactctgtgcaggggaagtgatgcggtcaattcccagctgatccatgatttccgtggaacctgtgctggcatccggtgcaatggaaaaaagttcggtttcgttatctgccagaccggtctgtatggaagtcagtttcagcgcactcgaaccgtttccatcggacagtatttcggcagtgattccgagactagaggagttgacaagcctggccagcttgtccagcacatccagattggtttcgtcggaattgatattatattgaaattcatatgcagcaccagacgtattcagatcaaaagaatatgcgccgggacgcatcgacagtgtattgtcttttaaaaaacgtccctgattgatctggggtgtggcaagccgctgcacttcaatgtcaaagttattggttttactttcttcacttccgtcgccgatataggtcacactgactttttcgtcatcggaagacatggcaactttcttcttaaaagaatcctcaaatgaaccgtactggtcggaaagagatgccacaacgttctgaatggagcgcgcgttttccttgatgtctatggcatattttttcgcatcggtgagattcggaattttataaagaggcgaatctttatttattttgacaattttattataaactttgcgcagttcacttttcttgtgtgaatcataacgtgaaaccgttttctgggcatacgtcgagatataataagcgtaggcattatcaatctttgccattgagattcccctcctttcttccctgaattgaggattgagagcaggacagtaacagacctgttctcctgtgaggtgcatatcctttgcaccaaaaagattctacttaaatagtatatcggcatcataccgcattttccatacccttgtatatggtaaaattttactaaaaattcacaatttggcgtaaaagctgcgaaaaatcataaaaaccattgtaaaagatgttgacggacatggaaaatcatgatatagtatgaaagcttggaagtaggtcttttttttatgcctttttttaggcgggacaaaacacgaaaattaataacggaggtggaagttgtgcgtacaaagattacattagcctgcacagaatgtcagcgtcgtaattacaacatgacaaaggacaagaagactcatccggacagaatggaaaccaagaagtactgtagattctgcaagactcatacagttcataaggaaaccaaatagtccgtacagagcaaaggagttatgaaatgggacagacagaaaacgttgaaaaggctccaaagacaagctggtttgacggtgtaaaggcagagttcaaaaagatcatctggccggaacagaaatcagttgtcagacagaccattgcagtgattgttacatccgttgtagtcggtcttattattgcactgctggattgggcaattcagcacggtgtgaatttccttgttggtttgaaattttaacggaggcatagtgatttatggcagaggcgaactggtatgtagttcatacctattcaggttatgagaacaaagtcaaagcgaatattgacaagacaattgagaacagacatctggaagaccagattttggaggtccgtgttcctcttgaggaagtgacggaagttaaaaacggagtgaaaaaacaggtttccaagaaaatgttcccgggctatgtgctgattcatatgattatgaatgacgatacatggtatgttgtccgcaatacccgcggtgtgacagggttcgttggaccgggaagcaaaccggtgccactcacagatgctgaaatgagaccgctcggaatcaaagctgaaaacgttgtggtggatttcgcggaaggcgacatgatcgttgttatcggcggtgtctggaaagatacctgcggtgtgattacagcgatgaaccataacaaacagacggttacgatcaatgtggatctgttcggtcgcgaaacaccggtagaagtaagtttcgcagatgtaaagaagatgaattaaggaggcaattccaatggcaaagaaagttgaaggatacattaagctgcagattcctgctggaaaggcaacacctgctcctccagtcggaccggcacttggacagcacggtgtaaacatcgttgagtttacaaagcagtttaatgcaaagacagccgatcagggcgacttaattatccctgtagttattacagtatatgcagacagaagctttagctttattactaaaactcctcctgcaccagtactgatcaagaaagcctgcaagatcaagtctggttccggtgaaccaaacaagacaaaggttgcaaagattacaaaggcacaggttcaggaaatcgctgagctgaagatgcctgacttaaacgctgcaaatatcgaagctgccatgagcatgatcgctggtacagcaagatctatgggtgttgaagtagtagactaatctaagtttaagaagaaatgtgggagggtaattgatttcccacccgatattaccaccaggaggtttatatttcatgaaaagaggaaagaaatatcaggacgctgtaaaggcatacgatagaagtgctcagtacgatgttgctgaagcaatcgacctcgtaaagaaaaatgccacagcgaaatttgatgagacaatcgaacttcatcttagaacgggctgtgatggacgtcacgcagagcagcagatccgtggtgcggttgtactgccacacggaacaggtaagaccgttaaggtattggttttcgcaaagggaaccaaggtagacgaggcacaggcagcaggagctgacttcgttggaggagaggaattaattccgaagatccagaacgagggatggttagacttcgatgttgtagttgctacaccggatatgatgggtgttgtaggacgtctgggacgtgtccttggaccgaagggcttaatgccaaacccaaaagctggtacagttaccatggatgttaccaaagctgttaatgacatcaaagccggtaagattgagtatcgtttggacaagacaaatattatccacgtgccagttggaaaagcttcatttacaagtgagcagttgaacgacaacttccagtctcttatgggcgcaatcaacaaggctaagccttcaagcttaaagggtcagtacattaagagtgctgtattaacttctacaatgggacctggcgtaaagcttaacgttgtaaagattgctcagtaatagaaaaatcagaagtcgggaaccggaaacggttcctgatgaaatgatgaaatgtatgatcagacttacacaagcaaaatgcggaaaacacttgacatccgcataagaacatattataatagcaaagcatattgccgaagacagtaaggtgctatcgcatattgcgacagcgtaaagggaaatccacctaccgagggaatttttgatgataatcgtcataaagaatgatacccctctgctgtaaggcggagggtttttattatacctcacgctatatgcaagaaataaaataaggaggtaaatgaatcgtggcaaaggtagaattaaagcagccgatcgttcaggagatttctgaaacaattaaggacgcacagtcacttgtggtagttgactaccgtggacttacagttgctgaggatacacagcttcgtaaaaatttaagagaagctggcgtaacttacaaagtatacaaaaatactttagtaaaccgcgcaatcgagggaacagagttcgagagcttaaaggatgtcctggaaggacctaacgcatttgcagtatctacagaagatgctacagctccagccagagttctggcagagttcgcaaagaaggctccaagccttgagatcaaggccggcgttgtagaaggaacatactatgacgcagagggaatgaagcagatcgcaagtgtaccaagcagagaagtacttctttccaaattacttggaagcttacagtcacctatcacaaatcttgctcgcgttcttaatcagatcgcagagaagggtggcgcagcagatgcagcagcagacgcagcaccggctgaggaagcaccagcagcagaataattattaaaaataaaattataacggaggaaataatcatggcaaagttaacaacagcagagtttatcgatgctatcaaagagttaagcgtattagagttaaatgaccttgtaaaggcatgtgaagaagagttcggcgtatctgcagcagcaggcgttgtagtagcagcagcaggcggagacgcagcagcagctgaagagaagactgagttcgacgtagagttaacagaagttggaccgaacaaggttaaggttatcaaggttgttcgtgagatcacaggtcttggactgaaggaagctaaggacgctgttgatggcgcacctaaggtaatcaaggagcaggctgacaaggcatctgctgaagacgctaaggctaaacttgaggctgaaggagcaaaggttacattaaagtagtctgtgcgtaagcgacgagaaaccaataataacccggcagagatgcttgcatttctgttgggttattttatttagctgtatcccctctctctatctgaaaaagttctcgaaaataattcttgcatttcccttgattttgttgtatagtataagttgcactattgtggtgcactaggcatttccatgctcttttttaggaaaaactagattgaaataaaaacgagaggtgaaacgtcaatggagaaaaacagaatacgtccagtcaaggctggaaaaggcttgcgtatgagttactcaagacagaaagaggttttgcagatgccaaacctgatcgaagtccagaagaattcttatcagtggttcctggatgaaggtttaaaagaagcatttgcagatatctccccgatcacggattacagtggtcatctgagcttggatttcgtcgattttacactgtgcgaagacgatgtgaaatatacaatcccggaatgcaaagagagagatgcgacatatgcagcacctttgaaagtcaaggttagacttcataacaaagagacagatgagattaacgaacatgaaattttcatgggtgatcttcctcttatgacagagacaggtacgttcgttatcaacggtgcagaacgtgtaatcgtcagccagttggttcgttcccctggtatctattacggaattgctcatgataaagtgggtaaaactctttattcatgtactgttatcccgaaccgtggtgcatggctcgagtatgagactgactccaatgacgttttcagtgtaagagtagatagaacccgtaaagtgccgattaccgtattgcttcgtgcacttggtgtaggtaccaaccagcagatcattgacatgttcggcgaggagccaaagattctggcatccctgcagaaggacccggcgatcacagagcgtgagccacagggaagttttgaggctggtttattagagttatataaaaagatccgtccgggtgagccgctttccgtagaaagtgcggagagtctgatcactgccatgttcttcgatccgagaagatatgacctggcaaaagtaggacgttacaaatttaataagaagcttgctttaaagaaccgtatcaacggacaggttctggcagaggatgtactggatccttctaccggagaagtaattgcagaggcaggcacaactgttgaccgtgatctggcagatcagattcagaatgctgcagttccggcgctctggattcagacagagacacgtaacgtaaaagttctttcttctatgatggtagatatcagaagctggattcctgaaattgaggacccgaaggctattggtgttacagaactggtatattatccggctctgcagcagattatggaagaaaacgagacattggaagagcgtatcgctgcaattaagagagatattgcagacctgattccaaagcatattacaaaagaggatatcttcgcatccatcaactataatatgcatctggagtggggcatcggaacagatgacgatattgaccacttaggaaaccgtcgtatccgtgctgtcggtgaattgttacagaaccagtatcgtatcggtctttcccgtctggaaagagtggttcgtgagcgcatgacaactcaggatcttgagggaatttccccacagagtctgatcaacatcaaaccggttacggctgcggtaaaagagttcttcggatcttcccagctgtcacagtttatggatcagaacaacccactgggtgagctgacacataagagacgtctttctgcattgggacctggcggtttgtccagagaccgtgccggattcgaagtacgagatgtccattattcccattatggacgtatgtgcccgattgagacgcctgaaggaccaaacatcggtctgatcaactctctggcatgctacgcaagaattaacgagtacggatttgttgaggctccgtaccgtaagattgataaatcagataaagacaatcctcgtgttacagacgaagttgtatacatgactgcggatgaggaagataattaccatgtagcgcaggcgaacgaaaaactggatgaggatggacattttgttcgtaattccgtatccggtcgttaccgtgaagaaacgcaggagtacgataagactgcattcgattacatggacgtatctccaaagatggtgttctccgttgctacagcactgattccgttcctgcagaacgatgatgcaaaccgagcactgatgggatctaacatgcagcgtcaggcagtgccgcttcttaccaccgaggcacctgtagtaggaaccggtatggagacaaagacagcggtcgattccggtgtctgtgtacttgcaaaagaagcaggtatcgtggagagttctgagtctaatcgtatcgtagtacgtgaggaggacggaaatcgcagagaatatattctgacaaagtttgcacgaagcaaccagtccaactgctacaaccagagaccaatcgtgttcaagggacagaaagtagcaaagggtgaggtgatcgctgatggaccatctacatccaatggtgagctggcacttggaaagaacccgctgatcggcttcatgacatgggaaggttataactacgaggatgccgttcttttgagtgagcgtctggtagagtatgatgtatatacttctgtccatattgaggaatacgaagtagagtctcgtgatacaaagctcggaccggaagagattacaagagatgtaccgggtgtcggtgatgatgcattaaaggaccttgacgagcgcggaatcatccgtgtcggtgccgaagtccgtgccggagacattctggtaggaaaggttacaccaaagggagagacagagcttaccgcagaagagagactgcttcgcgcaatcttcggtgaaaaagcgcgtgaggttcgtgacacttccctgaaagtgccgcacggtgcatatggtattgttgtagatgccaaagtatttaccagagaagatggcgatgagttatctcctggtgtaaatgagtctgttcgtatttacattgcccagaaacgtaagatttctgttggtgataagatggccggacgtcatggtaacaagggtgtcgtttcccgtgtatt

SEQ ID NO: 187 - DNA, 28387 bp, unidentified
  source 1..28387: mol_type = unassigned DNA
tcattcgttaacccctcacccaaattcagcaggatgtggcttttcccttttgggaaagtaaaccgggcaataccgctacgcggagtagccgaaacttctgtttttacattatatttagtcagataattagaataatagcccggtgaggcctgttcatccttatacttactaccatattctttataatccacattcagttctccggtagtaggcatcaataataaagaacctaattccggacaaccgactccactcaaattcacatgagcatatccggtaaagaaacaatttgtatattcataaggcgtagaccaccatcgggcatctttatcgtatgtgttttcggaagatcccatcacattgaaaggaaccacagacatcataccattggggcaaatcgctcccggattggtcgttccgaaatttgtagttccgataaaaggatccacataatctatcaaaagacttttatccgtatttttaaggggagggctccccccttcccccgcataggcggaaagaagggaaaaagcaagtgtgtaagttaatataatacgtttcatatctttattaaatgatactcgttcgtttcgtaaaatcaataatctcttttatatatccgaaggccatacctaccacagtatctgccgcaccataataaacagcaacacgttcaccatcttgcaaagcagcacaggggaatacgacattaggaacgtcaccttgaagttcgtaaggagcagccggaccaagcagatattcacgtgtacggtaaagaactttttccggatgatctttatccaatatggcagctcccatagcgtaacggaaaccattacaagtagtgattacaccatgatagaacagcaaccagccttcatctgtaaggaaaggaactgaacctgcaccaatcttcgtacactgccaagcgctttccgggaaaggagtcactttcattacacaacggtgttcaccccaatatttcatatccggactatagctgatgtatatatcgccaaacggagtatgtccattatcactgggacgactcaacatcgcatacttgccatcgatcttctgcgggaaaagtacaccattacgattgaaaggcaagaaagcattttcgcactggaaaaactccttaaagtcaaaagtataggcaataccaatcgtagggccatgatagccattacaccaagtcacccaataacggtcttcaatccatgtaacacgagggtcgtatttatattccgactcaatcatttccgtgttacctgctttaaactgaataggttcatgattgatatcccaatgaattccgtccttactaaaacctgcaaagatattcatctgtacagctttgttatcacaacggaatacgcctgcaaaaccatcctcaaaaggaacaacagcactattgaaaatactattagatgaaggaatatgataacgtccgataactggattttgtgagtaacgccacataacgtccgtacatccgacaggacgatcttcccaaggaatttgaattttattcataatcgttgattttatattatttattttttgagtcatcatacgtgaaaggtatgaaataagtaatcagaaaagctggaatagttgcaattaacacatagataaagaaattacgatatcctaataagtcactaagataaccactaaccattcccggaagcatcactcccagattcatgattcctgaagcaaatgcgtaatgtgacatttgatgtttgcctggagcaatctgttgcatcataaacaacgtcagtccgacaaaaccaaagccataaccaaaatattccattgttatacaagttccgatcagatatacattagtaggctgtgcaactgccaaaaaagtataggctacaaacggaagattaaaaatacagcagagagtaaatagtgtctttttcaatccgaacttagaaacataaatacctgccaacaatgagcctaaaacgaaagcagcggaaccaaagataccatttagcgtgccgatctctgttaacgacagtcctaagccgcctacatcccttgaagcacgtaaaaacagcggagctattttcatgataaagccttctgccaaacgatataaaataataaaacagatgtaataaagaatatgctttttagtaaagaagttagcaatgactgctaccaattcgtgcccaacctccgatgcagttttctttgttgttgacggaacctgtgtagaaggtaacatttttatatgataaataccgatcagtaccattattgccgcaattacgccgaaaataatcatccatgcagatgaatatgctcctttgttagcatctatcgaagcaccttctattgctccgaagtgctctgccaatgctcctgccatagcaactaatcctccattagcaaccaatttggctacattataaaaagcaccctgcactccgatatattttgcctgatcttctttgttcaattcagccatatatacaccatcacaagcaatatcgtgcgttgctccactaaaagcaatcactgccatcgtagagatacttatggcgaaaaagtaatcgaaaaacaaagaaaaggctactactccaaacaatacaccactcaataattctgtaatcaatacgaagaattttttcgtccgatacatttcaagaaaagggctccacaaaaatttcagtgtccaaggcatcataatcagagaagtccagaatgcaatttgcgtatccgaaattccaagatccttaaacatgaaaacagaaaccagattaatagcaataaagggaagtcccattgcaaaataagcagtaggtacccagcaagccgggttaatagtttttcgttgagaagcagttttattctgttgcataaatcatagtatatagatgaaaaaaaacatttttctgactcatctatatataatacaactaaaagggggaaactactaacgtctcccccctactttttttattttattatcacttcgtctataaagaaccacgaaggatggcctacaccataatgccaagtcggacattctttcgttccggtgacttctactttcacataacgagtttttatcggttcggctgattcagccttgactccacggaattttacctcaccggtacgttcttccggtaaatcaatcgttttccaatgtgtataatgctcaccgtcttcagcatatgaataaaccacctttagaggaaaaagaatccaggcccctatttgatgaagaaaatctgtttccacactttgtatctcttttgtttcgcccaaatctataacaaatgcaccatcggttccttcccaaccaatccagctatcaacaaaggttgctccaccaaacaaaccgtcaaccaatgcgttctttcctaatgccgcatattttccggtaggaggaattagataagtaacttttgcacccaaagctaaacttctttctttctgcggcatgtaacgttcgcgatacaatttgcaatagtctaccggtgaattggaacgctcattcaatgtaggaacttgaaactctttcacgcgttcctcaaaaaggtctaacttcttattaatatctaccaaatctttttctgtctctgttcgtgcaatctccagttctgaatactgaattggcagacgtgcccgttgaactcgttttaagaaatcgggttctgctgcaacagccttttcagccaaatcaaataaatgattataacgacgcatcaaagcaggctttaacatgccatatttatgtgatacaggtgaatcatatatccacaacctctgtccactaccaattaatgcgccttccattatctttatgtactgataaagatatggcgctgcttccccataatatccatgcagaaaatattgcatcaatgagtctacattaacttctggattccacattaactttgacactaaataagcgcgaagttctgcaaaatctcctcccctgctccctgctatttgagagaaatgcatggtggcatgattctttttgaaaagacggatattgtcctgtaaaatatggaaattaggaaatggagccagataattatcaaagttaataccgtaatcccacacgaaaatattattggtaatcttagaccatccttccatggctttcacaaacttttttcccgaagcattctccgtcaaagttacttcacggtcacagtcaatatcacataacataatattcacattcggcaaaggtttcacatgtttcggaggattcatcgtatatagataagccaatgtggaaaattctttatccggaaaacgggcagccaacttattcagaaaagtgatgatacttcctgataatgctccttcataatcatcaattgccttacaagcatcacacgtacaatttgtataattaccatcattctgacttacagacatgatatgtttatctggatttgctttgaaaatagaatcaacacgttgagcaacaatctcaaaaacctccggattactcaaacaccactgactggcctttcccgggtggcgttttcctttgaagtaagaataatattccggatgttctttcccataaatggatgaaggcagaagcttatcaaaagtatgcacccaatgaccggcagcaaacacttcattcggttcctctaaacgattccaccacttataaatagagtctgtatggatagcataacattgtgtctgacgataacgaaagcccgggttttcgactttattaatgaagggtaagttcaccgtttttgaaggggtaagagaatattcattctctccccaataatcgatacccaaatattgctccaataaagtaacaaccccatatacaacaccgttttctttaccagatatttttagaataccatcttgagtagaaatagagaatccatcctctgttacttccgctggagattgaccaccaatgagaatatctccttttcgaggagtttgacttataacaacaggcagcttacaactggttactttttgaataaatgtttgtaacaaatttgcagctgtccacgatatttgattattctctttcaaaatgatcctagaacttgtattcccattagttactaacatagtttgagagagagacggaaacgccatactaattcccataaaccataaacagaaccgtagaataatagataatttcatgtttttcttgctattaaaagttattatataatagtaatacaatcaatatgatactattaaacaatcaatctttttctttttttatttattaacttatataataagtcccactttatccgaaaatacgaaaaagtgggacttaaaaattttcaataacctattaattatttcgcatataggtcaaattccgtaaggctgaccgtattgggaccttgtttcacataatactttaaattcttatcaatttaatggattaatttgaaagacaaacgcttatggaagttctgaaaagtctaaggtaacgatttagagattgtgctaatttcaacattttacagcctcatactcatgagtataactcttctttgaacaaaggtaagaatattttttggattaaagaaaaatcccgaagggaaaaataaaaaatatttgggagagaggattggaaaaattcaagagagggaggttgagggattaagtgagggaaatcgcataatcgatttgtagttatcgaaaaagtcatattcgaaatccctgtatattgcttctaccggcgattacacgaccggaaattatataaaaaatgaccccaatcaagaagtattttatgtttctcggttggggtataaaggttatttgaattgtagccatacctcatatattcaagctgccttcctttaaaggaatatgcagtgacgatttcatttccatgtctgcgaaacttggtaacaacatcttttaaaggtgcctggaattgctggcagttatgtacatatccgaattctgattttatgcgtgtttactcataaaattagactctatatctgcttgcacaggttatcattatactatttcctgtaaataacatttgggaatataattggtggcgaccaatatcagcaagccttcaaaaggaataaccagccgcttgttctttttgatacgtctgtaatatcccactactccggcatattccccacctgtcacccggtatttttcggcgttcttcacgagattgtcatcatacggtatctgttcgaaaccgtcctccatggaagaagtgagcatgataaacatgtccatctcttcatccggaatggaagctggaatctgggtactgggatgatgatacaccatggttttctcatcgagaatcgaattcaaggaagagatatagtcatcatcgcaacgcaggaacatcaacatggcgacaagcggaacccgcctgatcacgacttccccgttcggttgcggatagcttctggttttcatcgggatataactctcaatcccgtcacgtgacaatgtggccttgatttccgaaaaacggttatagaaaaccttcagggcataccattttttcatcatgatctattgattccttttttttatgatttccagttccaatcgaacctttcgacatcctcctccacgagcagatctcctgactgtacctcaataaagagcagatcggtcatggccttgacggcatgtctcatgcccttcctgatacagacggtgtctccacggccgattctagtcattttcccatcaagagccagcataccctcgccatcaatgaatgtccagacttcatcgcgatagcggtgagcctgatagcttatgctcttaccggcttttatctttaactgcctggtaagagtctcatatccgtcaggaaaactcaccgtatcgataaccttatattctccccagagacgctcctcatacatcgggcggcattgcaagcggtccgcatatgttttgatgtgctcgctcctgcctttctctgaaaccaggatgccatcgcatgaagcggctattaccatgtctttggcaccgatgcacatgacaggtatttccaattcgttgatcacatgggtgttttcagatttctcgtccatcaccacgttaccgatgcaacgctctttcagttcatcggtaagcacgttccatgtgccgagatctttccatttcccgtcgtatggaacgacagccacagacttcgctttctccaccacctcatagtcaaagctgatctttggcagttcctcatatcggaggcgtacctcctcaaaagtatcgtatgcgagataactctttacgatgtcaatcatatatccgagacagaaagcgaacacgccgccattccaaaatgcgccatctgcgataaatctttcagcagtggcgacatccggcttttctataaaacgctccacttcatatattccgtctgttttgcgatgcttttgaagtatcacataaccgtatttggcggacggataggtgggctttatgcccatcagtacaagatcagccacattattctgcactgcttccgccatttccgctatagtttgaaaataacgctcttccgtatacgggtcgcatggcataacaatgactgtttcattcttgtcgcatttcgctgttttctccaaataggcggaagcgagacagattgcagggaaggtatccctacggctaggttcggtgacgacagtcacatcctcaccgagctgattggtgatggcatccttttgaaatacacttgtagcgattgtaaccgggcaggaaagtcccgattccttgatctgtcgtatgacacgctgtaccatagattccctgcctccgtccggggaaggaagcagtctgaggaattgtttggagcgggattcgtttgaaagcggccacagccttttacctgaaccgccggataagagtatgatttgcatgattatgttgtgaaagttatctttccgccctcatcgggttgtttaagaaatcctcgtaggaaagacggatgccttcctccagttccgtcttgtatgtccatccgagcgaagtcgctttcgaaacgtcaagcagcttgcggggggtaccgttcggccgtgaggtgtcccagcgtatctcgccggtgtagccgattatctttgccactaattctgtcagtgcctttatggtcagttcctttcctgttccggcgtttactgtctcgtaccccgaatagttgttcatcaagaatacgcagagattggccaaatcatccacatagagaaactctcgcaacgggctaccgtcaccccagcaggtcacctctttcaagcccgcttccttcgcctcatgaaagcggcggataagcgccggtaacacgtggctgtgctcggggtggtagttgtcattcggcccatagagattggtgggcatcacgctgatatagtccgtgccgtactggcggttgagaaactcgcagtatttcaatccagagatttttgccaatgcgtatgcctcgttggtcttttccagttcggaggttagcaggcagctttcaggcatcggctggggtgccatacgcgggtatatgcacgatgaaccgagaaactccagcttcctgcaaccattgcgccatgccgagtggatgacattcatctccagtatcatgttctcgtacatgaagtccgccaatgccgattggttggcgatgataccgcccacctttgctgcggcgaggaatacatattcgggcttttcttcggcgaagaagcgttctacggcttcctggcgagtcaagtccaattctttgtgcgtgcgtgtgatgatattcgtatatccctggcgttgcagttcccgtacaatggcagagcctaccattccacggtgtcctgccacatagatttttgcgttcttctccattgttttctcgattattttacgattcctttttcgagatattcggcaaggttggttcttacctgttgcgatgcacgttcaacggccacttttgccatatcggcatccaccatgatttttacaagttgctcaaacgatgtcttctgcggattccaacccagttcacgtttcgctttcgacgggtctcccaaaagatttaccacatcggttgggcggtagaagtcgggagaaacctcgacaagtactttaccgctcttgcagtcgatgcctttttcgttttcaccttcaccctcgaaacgcagttcgattccggcatatcggaaagccgattggcagaactcacgtaccgaatgctgctcgccggtggcaatgacaaaatcttctggcttgtcattttggaggatcagccacatacactccacgtaatccttggcatagccccagtcacggagcgatgacaagttacctaaatacaatttatcctgcttgccttgggcaatacgtgcagcggcaagggttatcttgcgggtaacgaacgtttctccgcggcgttccgactcgtggttgaacagaatacctgaacagcagaacatgttgtacgcttcgcggtattctttggtaatccagaacccatactgtttcgctacggcatagggagaatagggatggaaaggagtattctcattctggggtacttcttccaccttgccgtatagctctgacgtggaagcctgatagatacggcaggtatcagtcagatcacattggcgcacagcttccaaaatgcgtagcacaccggttgcatcgacatctgcggtaaattctggcgaatcaaacgaaacctgtacatggctctgtgcagcaaggttgtatatttcgtttggctttacttttttcaccacttgtaagatactcatcgaatcgccgagatcggcataatgaaggtggaagttaggatgtccttccaaatgagcgatacgttcacgaaaatcgaccgatgagcggcgtatagtaccatgcacgtcatatcctttttctaaaagcaattcagcaagatacgatccatcctgtccggtgataccggtaattaaagctgtcttcatataaatatcaaatttgtgatgtgttattttcgtgaaactttagtttcaatgatctcatatattttgtaaatgtatctcaacgattcaagcaaaatattactgtaaactccattatccttgaatgctcgctggtgatctcgtaaaatttgtctatggctggataatccgctggtcgatgcacctcctgtacgcattgttacaaaatccattgggatgtatcggagtcgtattctatggacgaatattaatcgtaacagacattcaaaatcggcagcaattttgtatgacaaattgaagccgccgtatctctcatatatttctttgtggcaataaaaactcggatgggcgggcataaagccgagacgcatccaacggcgatgaaaaagcttcgaggagtaataacgggtacatttttgcaagtcattgtcttgtacataatgtatatcgccataaacagcatctatgttaccgtcttcaaatgcagatgccactgttgaaagcacaatatcgctggtataaaaatcatcgctattaagtattcctatgatatcgcctgtcgccattgcgatacctttattcatggcatcgtatattcctttgtcttttccgctgatataacgtaatttaccttgatattcaggttctaattcatgtacgatttccattgtgctatctgttgaaccaccatccacgataatatgctctatatttggataggattgtgacaacacactttgcattgtgtaacgcaaagttgcactgctattccatgtagcagtgattattgatattttcatcagattaaattaaattgatagtttgattacgattcaaacattacccgttctgcgactttaaccgcaggattcccacgatatatcgaatatggcattaagtctttagaggctatggaaccgacagcaagaacactatgtaaatgcattgttactccgggacaaacagtggattgagcaccaacccatgcaccatcttcaataacaataggttttaccatgaggtcaaatgtcgggcgtttataatcatggttaccacataataacatagctccttgacttacacatacgttgttgcctatttttactttggcgagattgtctatccatacattttcaccaatccaagaataatcaccgattgataaattccatggatatttaatattgaccccgggctttattacaactcctttccctatttttgctccaaaaaggcgcagcaggcgtaccttaattaccgataaaggctgtaaactacattttacaaataagatgttacaaaaataccatagaatatttttgaaatttccagctcctatatgataccacgaattatcgtataaactaagatcagtcttcatacacaaaatcaggtttggatgcttgacctaaaacccattcataaagtgacttcattttagcaccaagcacatctacggaatagttattacacattagcgattttccattcattcccatattgaaacgaatgtcttttcctacgttataagcttttagtatggtttgcgttattgtgtcttgatcattgttaatccaccaaccacaattgtaagattccaattccttccaaggcgttcctttagatgcgataactggtactccacgaactaatgcttccgatacgatattcccgaaattctcaaaatcactgggaacgaccaatactgatagttccgtaattgccttatctttttcctctccaacaagaaatcctgtgaatctcacattggaaagttttaatctcttggcttcatcatataaaaatttttcgtaagacttatctccggaaccaataattactaattccatttcatcaatattatgacgtaatgtgtttatggcataaataagtctttctatacgctttcgagaatgtattcgtcccaagtaaccaattctgaaagtaggctttggcggtatttctttttggacaaatttggtaatgtcaataggattggggattatagctaccggattagaaaaacctaatgcacgataatggttcatttcttctacgcatgtcgcttgtatgcatgccgcttgttgtaaatcatttcgttgataaagagcaagagaaagtttttttataacagacgacgcagctaaagcctgaggatataacattcctcggagcgtaacgatgtagggaattttatatttccgtgcgtgacttgctgtagcatggcttagatagagccataagccttgaatatgaaataaatcagcattcagatttcgcaagacttttcttatattcggaacgtacccccaacggcgatttaaaatttgttccgtatagtggatatcaatatcgtcagcgagcagtcgcttatgattatccaatggagccattaatagcgatgtgtttacattatttcgctctaatcctttgatagttagataggtactaagggctggtcctccgtattcaatatccaatgttccagagtgaattattttcatatttatagttgattatatagcgatttgtattgtcttgcgatattttgaggagaaaaacgcatgatgtttttcctgccatttgatattaaactcgcccttaatttattattatccaatagttcgataaccccatgacgtatatcttcaatcgaataggggtttataaaatatgcggcattaccagcaacttcatgtagaacatctatatcgcttgcgagaacaggaattccgattaaattcgcttctaagataggcataccgaaaccttcataaaaagatggaaatgtgaccacatcagctagggtatacagttctaaaactttggaatatggaagattgtaatagttctcatactctacgcccgatgaatctgctaatagttgttgttctttagtcatagctccgataacaacaagttgtataggaagattcgtaatagctctgaaaacaccttccagatttttatttgcttttgtgcctatatgtaaaatcgtcttttttgtcgaagccattctacggggaacggtaggtgatatgatctgcaagtcattaatgggattattcacaacagagattttcttttccgcaaaaggacacaacaggacaagttcgttttttgtaaatgaactgatgactgataccttgcgagctattaacagtggaagattaaaccataaccatttttttattgttttcgcaattcttccacctcttataatagactgaacatcatggattgtaatcaacgttctacatcctgtacccaatgcgatataatggacttctcccgttatatgattgatgtctccacgatgttttcgggcaaaatgtatgtttttgacaatagctgaaatactagctccggaacacggtaattctaacaattcaacatcatctcccaagtatttgattaatgaattgaatatttcctcgatactattagcttccggacgtttttttctaataaatatcacagtctttctcttgcgcatctatctggtttatagtaatatttaatccaatcatagtgaaatacatcatataagcaaaccaattgtacaggcataactgtacatagaaggtcatgggaagaattataattgtcgtagcccaagaaagaaccgctaagtattgatttcctatggaacgactaatcctaaacatgtatatcaatgtgtgaagtcttattgctgtaattattaaaaaaccaaaaaaaccaaattcaatcataactcgacctatctcttcttcccaatcaactaatgatggttggattaaaaaagattgaacagacatatttgcgattccgactccattaccgaatgctcctgcataattaaacattcgcgaaatatcaaaagtgcgagttatacgtgtatctacgtcataggatgaagatgtggcgcgaagtataaaattatctatagcggcaattccatatatgtcatagtatatatatgcacaacacactattaatatgattccgagaattaattttgtattccttcgaaaaatccattcatatacagatgttcctatgacaaccaagctgcctaaaagaactacgctacgcgatcccgtcatgaaacaacccaacaaagcaataataaataacgttgttataatccactttgtagtagaatcccatttcaaagaaagcaataatgtcgtaaagaccaatgttattatacagaaatcacctaatggagtcatataagagaacacgctacacacacgtactgccccacccaccatggcaataccatttttcatctccattgcatatttgttgatgtatgcataaggagggcttgcatattgaataatggcaagaatcagaacgataaaggcaataacagcccctcctataacaaatcggtttaatcgctgcttgctgtcaatacatgcaggtatggcatatattagaattatgggacttaaatattgtactatagtgattcctccgacaatgcaaccgttaattaaaaaagttatacctattgccgaaaaaataaccataaaaccatatattgtatatgtcctgtcaaaaggagtaggaatcttttctaatccattatgtctttgaagtaaatagaaaaaggctattgtaattaatagtaagtactttattgaatacaataaggtgcccggcgcaccaggaataatccactttctaagcactccctccaaaaatagatatagaaaaaaaacaatgaggcattttttcatttatttgtagtgactttaagtaggaattcattatatcgttgtccgtatgcctgccatgaaatgttggatactgcatcttctgtcaggtagctgcgaacacagtttcgcggttgctgttcagctttttttaaggctttaagcagggtttctgacaatgattctacggtatactctggcatctcaaataaaaattcatgatcattaactaatttttttaagtcaggaccgcctgtgtaatgtgaatagaccaacggcagtccacaaatcatagcttgaaacaaaactaaaccgaatccatcttgacgagatggcaaacaaaatatttttgctttcgaataaaaataaaccaactctggctgattgacaggatctacatgacaaaattgtttgctttgttttggaaatgcataatcaataatcgctcccacatgtaataaagacaatcctcttttcttgcatgcctccactaaaatatccacacctttttggagagaccaattcccgacgaatataatgtcgtatccatcagactcaaggggtaacggatgaaacatttttaaattaacgccatagggatttacaaatagtttgtcgattttttctccttcttcaataaaactttctttggcatgtagggatggtaatattacataatctgctattccatattgttcaagttcgattgttatatcttttttatatacttgcctagcggatggaatactgctcaaaatgttattttgcgacaaaatgtgccgacatccacggtcgcaaaaaaacaatgcatgatatcgattttttgctttttttgcactcaataatgcacagccactcaaaccaattaatatgtcacattttctcaaatatagagacgataaaaaatcgaccaaccttacgatccaataatataaatgtcgattaccatctttggggagtttgaattttcggaaaatgaacattagtggtgcacatatataaaagaaggatactaccctctctgctggaaatccgaactgtttacaacgttttttggataccattgtgtaaaaagtcacatcgtgcccattctttatatgcataatcgacatatcaagcaagtgggaacgtcctggactaacgactgcaattttcattttgtcatatatgtttttatgtaagtcaataaatcaccacctaaaagagattcaatgcaaatatcggagtgtacgacttttctatcacgaatttttttcgctggatttcctccaactacagtcataggaagaatatcttttgtcactacactccctgctcctataacagcaccataaccaatgcgtcggacattgggcaatattattgaattcggacatatccaaacataaggttctatctccaatcctttactaggctgaatatgattccattcggaagagtctatgtcatgagtacttgatatgaaacttacattgttcccaataattacatgatgtccaatatgcataggatataacatggaggtaaagtcgacatgatatccaatcgaaacattgctgtcgacaattacaccgtggttgaatttttttgctactgcaacggggattgttacagatctatcaacaattgctcctttagcacgagcaacgagtcttgaatatgaaaacttcagaaatgaaggaattctcacaaacaatccaataagaaaatgtatatatcctctttttctgatacgtgattgatatatggtttccattgtatgattaataaatttttttaaataaaaaagccataaataagagtgtcgtatgacttagtattataggtagagacaatatattcaatatgatttttcgcttagttgataatggataatattctttcttcatctgacggatatattttttttctctacgtagtatccttataccctctttgtttaacatatgagaatgaaaatatagattgtatatcgccaagatacgttgactataccctgtacgagtcaacacttctgctttatatttttcatccgatatttggaacttttcgaatagttttgggatgattgacaaaaaacggtcagaagcatcgaacagtttctgtacttgtaacttccctattcttgaaagggaattgtttgaatcttttccatagtacatataatagtatccacaaaaattagaaagaataatattctcaataaggaaataatatgagtacacaaatatgtgatcttcatgatatgatagatctgtatggaaacgtaaacattttttcttgatttcctgcaaatcaaataatttattagttgggcctccgtcacgaaaaagattataccgaacaattaagtcacgtgcagtcacttcattcaacgtactttcatcagcatattgaaatgaaacatattcctccgagggtgtcttggttatcaatccgctaactactattgattttctttgtgggttacatcttacaaagtctgcaatatattgagaactaatccaatcatcactatcaataaaagttataaaatcgccggatgcttgttctatacctacattccgggcgctaccgactcctccattccgtttgtggaaagtccttattctatcatctttctttgaatagccatcacaaattctaccactatcatctgatgaaccatcatcgattaatagcaattcccaatttgcatacgactggcttaatacactatcaatgcacttgtttatatatctttcagcattgtaaacaggaattactatcgaaattaaaggttgcattgttctgtttccgcacataaatctatatttaatccactgatttcacaccccatgttgtaaattgtaacattcaatcgaattttaactacaatattcgtatatgccccctcaattcccacatttgcatatacaattacgtaacctgaggaagttttcaaaccctataatactgcaaattctatcagcttttgaacctttgtgaggatgagaaggctctaagcctaattttgttatttcattctttgcttccctgtaaatctgggaattgaattgtgccttgcacattaccaaagcaaaatttctagcaacccctttataagcctctgccgatgttgtctgtgcgaacaatatttttgcttgctctttatatgattctaataaggaagtcaatttggcatcgctaaaaatatcataggtacttaaagacgcatgtcccctacggtagtatactttcgcctctggacagaatataactttggaagctaaagctagaacttttgaaaaataaacgccatcgtcgttaattgtaaaacgacagtcccagtatccggcaccctttatcaattctcgcgatatcatccagcaggaaatcaacatcatttcacccttgttcaacatttctataagcatgtcaatcggagtatggtaatttttataaacgcaccgtttgggaaatgtactttcttcaatgttcaaataaaatgtatcccatttacatgacactatagtgtacggatcgttctctcgcaatatttctatttgacgttgaaccttatggtgagaaataaaatcatcacagtccataaacattatatattcgcctgtagattcttttaaagctctgtttctcgccgaaaatgcgccctcatttggttgagaaaatacttttaccccccctccgtttagatttgttaacatattgtttcgcaatattatacgagtcatcgatagagccgtcatctacaattatcagctcaatattccgatatgattgtgccaaaatattatcaatggtatagggtaaaaatctggctccattataaaccggcatgcatatagagactaagggatattccgattcttgcattgctttattctattagttataaacattatgatttgttggcgttcgatggaatttattccaagcgaaaagcaaatagttatacacagcaattcacttaaacataatccacagaatatttcccagttagtatttgaaaggaatgattttataaaaagatggatagcaacaagaacaattgtgacttttcctatcgggtataaaatctctttggaatattcccgatatgaaaattctatatatggtaacactatccatatacgagctatttgggcaatatactcgatacacaagtaggaaaccattaccgtaaacagggaaaattgaaaatacctcaatccgatataggccacaggtacagccatcagtaaaattgttccttctattatctggaatcgtttgatttttccggttgcgtttatggattgtatcaatggctggcgtaatggagttatgaaacataccaataaaataatccgtactaaaaacacagtatcttccggaatacgtactagccataggttcaatataaattcagtataattcaatatcggaaatgcgaccatcagcataagataaaatccatatttagaacatataattaccagtcgtctcatatatgacagattgccacccgcataagattttattatttgcggttgtaatgccatttgataactttggataaaggtattagtaatattttgaatttgtacggatatgcctcgggcagcattgacaacaggaccaaagaacatatttaaaacaatattcaaaccttgcccacaaccaacaaatgcaaggtctccattaatcttccaccctataaaaaccgccatctgttttgtcagatgcttatcaaagcccatatgagaatgggtgactgagaaatttttacgacaaaaccatccataaataatacgcactgttatttgtaagacacacatgaggatcgcatatactattaacctgtcagcattacccaaaagtagtaacgaataaacaattcctaatttggctattgactcaaatacagaaatatacgcaaaagcatccattcgttcatttgcaataataagcgaattatagggtacacttatcaatgaaatagtactagtaagcacagaacattgtaaaacccaaaatgctgcccccatgcgatctgccggaatattcattttattatataaaaaccatactccaacaatttcaattatgactgccaaaaacaaagctacgcttctgtggataatcaacagagtggaaaatgtatgtctttctttatctttatctcctgctcctattgcatacgtgagaaatcttgtagaagcaccggctaaagacccatttacaaatcccaatacgattacgattccacctactacattataaataccaaaatctataacacctaaaatctccagtactgctcgagaagtgaataccgatatacctgtagtaatcagcattcgtatgtaaagcataatggaattcttggctatactggttctcaacgtaagcatggcataaaaaattctactttgtagaaaggtgtatttaaatacgatagctagtctctccgaaatatatcccttgtataaactttctctttcacatcatccaaacaaatatcataacggttagcgatgatggcttgacattgctttttgaaagcatttagattatttagcaccttgcttccgaagaatgtgcttccatcttccaatgtcggctcataaacaattatttccgctcccttggctttaatacgcttcattactccttgaatggatgactggcggaagttgtccgaattcgatttcattgtcagacggtagacaccgattacgcattttctttcctcattgggattgaaatctccacgattgtagtagtcgtagtaaccggctttattcaatactctatcggcaatgaaatctttacgagtacggttgctctccacaatagcctgtatcaagttttcaggtatatccgcataattggcaagcaactgtttcgtgtctttgggcagacaatagcctccataaccgaatgacggattgttgtaatgtgtaccgatacgagggtctaggctcacgccgttgatgatagcctgtgtatccaaacctttcatctcagcgtaggtatccaattcattgaaataacttacacgcaaagctaaataggtgttggcaaaaagtttcaccgcttctgcttcggtcagccccataaaaagcgtatcaatattttcctttatcgctccttcttgtaggagagttgcaaaggtatgtgctgcttcgtccaaacgaatatcccctttcggcctgcctacaatgatacggctggggtagaggttatcatacaaagctttgctttctcgcagaaactccggcgaaaagataacattttctgtatcaagtttctttcgtacactttcggtataaccaaccggaatggtactcttaatgaccatgatggtattagggttaacgctctttactaactcgatgacttcctccacatgtgaggtatcgaaatagttctttaccggatcgtagttggtgggagcggcaataaccacaaagtctgcatcccgataagctgtcgcaccgtcaagggtggctgtcaagttcaatggcttttccgccaaatacttctcaatatattcatcctgtatgggggatacccgatggtttatcttctccactttttcgggaatgacatccacggctatcacctgatgatgttgtgccaaaagcgtggcaatactcattcctacatagccagttccggctacggcaattttatacgttttcattgtaatatcgtaataataagtttagtcaaacaataatttccgttgtgcaatacgagtcatgagtggtgtagaatttctgaagattatacttgcaaagcagaatattttccaaaataaagtcaaagcggtgatgccgcccaatactaaataaatatttgaaatgtaaataattccattataagtctggctggcaaagaatgaacagatgcttcctacgattgtggcaaagatgaataaccaaattgtcgttggcaaatgctttttctccaaaaagcctattgcggacaaataaatgcttattccgtataagacactgagtacaatcatgcaaaagccaataattaatagcatctccatcgtttatacaggttacaatttataaacttcaggtattttgcctttcagtgtttttacccaggctctatacgcatccatagctgttttctctgacattctgattctgacatgagaatctatctgttcggttatgtcggtcatattttgcaataatagcgtaaacgtattctttgtgattatcagacatggcatttgcatttctttggagaaactttgcaaggtatcgtgtccgtttgacttgcagaatatccataatctgtatgccgaaaaaccgtatgcacaccattcacctattgattcattataatacaaattgataaatgaaccgtcgttatgatattcgtttattgttatagcttgggtatccataaccgtattcaataaaataaaagggtaataatctgattagaaatcaagtagtttttgtacactccttgtaatactcgtacaaatgaacttttgaaatatattgtaattgtgaatgtccgttcctatatgagtaatagccttttcttttaatagcagcatggcttttttcttaatccggtcgtcatacatacccgctattgacggaagattgaactgaaacttcactcccatgtcttttaattgttgataatccgactcacccatataaacataccgttccggatgggcaagaatgggataatagcctttagccttgatgcggagcagaatgttgttcaatcccatcggagggttaaagtaggaggtttccaccagtagatggtcaccgctttcacccaagggcagcagatcgttcttttccaaccgttcctcgaagaggttgtcaagcatgttctcagaggccagatgcagttttatcggaccgctataggtggcttgaagttcagcgtaacgctcccggaggtgcagtgtggtgttgggcatatcttccatgatatgcggtgtaagccatacggattttatgcccaactcttcatacaggcgcagtatttccaatgcttcttccatcgtctgcacaccgtcatccacacccggcagaatgtgcgagtgacagtcggtaaaattcttgaatatgccgctatctttcagcgatatgcgtttcctaaacggccacacaatgatacgagtatttttatataaaatattttatttttaattaattgataatcaattatttaccaccaaccccgttttccatcagaaccatagtgatatcctgagccgtaaccatatcgatagccataacagtatccatagcgaccgccacttccctcggtcccgttcaggatcagggacatatttttgtattttttttcatcgtagatcttctccaattccgagagcatgctccgttcgagcaaccctgcgcggactacgaaaatggtacggtcagccagtttctcgataatttgcgtgtcggctaccagttcaacgggcggacagtcgatcagcacatagtcatattgctcccttacagtatcgattgtctgctttaaccgctcgtcgaacaataattccgttgggttaggaggtatcgttcccacgggtagtatatccatagatttatgtttcggatcgggtacgatgatctcatccagattatcgatacgacctcccagatagtcgctcaatcccttgtcgggagagtcgatataggatgatgcagaggcgtggcgcaggtctccgtcgattaccagcactttttttcctttgatggcaaggctcatggcaatgttcatggtcagaaacgatttgccgctgcccggattgaatgaggtcatgatgatgacattcgaagtcttgtccttgccggtcataaattccaggttggtacgcaatacgcggaacgcctcattgatgatgtcacggttgccctccttgacgacaacggccttgacttcctgcggtttctttcctaatatcccttttttctttcttgtgaacagcggaatttcaccgatgaacggtatagtcaggttttccaggtctttccttccccgtacacgggtattcatattctcgcgcataaagatgatgactaccggaatgagcagccctagagcgaacgcaaccataaagatatttttatgcacaggggatgtcggcaacatgctgccgtgtggcggggtgacaatgcgggtattataagccgtgaacgcctgtgagagttcgttctcttcacgcttttgcaacaggaacaggtaaagagcttcctttaccttctgttggcgctccaccgaaagcaggtacttggcctgtgttgggttggccgctatacgtgatgtcgtctgttgctccgtctgccgcaaactttttatctgcgaattcaaggtcactatctgattgtcgatagatctgattatcgccccacgcatggatgccagagcctgatccatatccacgaccagcggattttccgtgctgctgttcgcaaccagactgttgcgttgcaacagttgtttgttgtattcggcaatctgcgattcaatattggcactttcaatgccggagttggccggaagcagttgggtacggttggcatcgttggctaaatagttccggatgtaacgggtcatataaagctggttgttcagggacaggatctgtgcgttggcctcactgctttgagccatatacatgctcgatgccgcctgcacgtcgggcaacagatgttctgacttgtaagaggagatatcctcgtccacgtttcccagttcccgttcgattacgcccagacgctcgttgatgaacattgaggtgctgacagcgatctggttcttgtccttcacccagttctcgttataaacggaaatcaacatgctcaatacatcttctgcccgctgtgtggagttatccttgaatgacaagtctatgactgacgctttctcgctgttcaatgaaacggacagattggacgagcaggagttgacggcgttatacagactggatttgcctacatataatgtatatgcctcgcctttcacgtaattgggtgttgtatggataatgatttttcccaatggcgtagtaatggagtcgagcaagcttccctttacgtccttttcatcaagatctgtcccgttacgtataaagtcagataggtataacgtaccgtccggctgtattttcaacgtaaaaccggctgattcattttcaggcaagtcatttatcgttacatccactggtaatgtcagcccataggccacctgacggtggaattttcccggaacgaagtaattcatatccaaacgcaaccgtttaactacctcggtcattaaagccggtgactgaaaggtgatgagctcattattcacatttgtaccggactggaacaacccgaactccgagaaggattccaaatccgaggaaaccgacttgcctttggaatcctccttgatcaataccgaagcggtgcgtgtatatacagcaggagtacgcaacagatagacggtagcgacaccgatcgttaccattaaagacaagacgaaccacttccaccttgcgagacacagatacaacagatcctgtatccgcaggaaatcatcctgctgtcccggttttatattcttttgatttatggccatatctgattttatatttatttcacaattaacacggtaatggtagtcagcagcgaggccaacgacatccagaaagaagcagaacggacgttattgccgttgacagtcgcctgccgtgctttcattgagttaggttccacataaactatatcgttctgctgtaaataatacacgggagaggcataaaggtcgtatcctgaattcaggttaacctgatacaaggtctgtttaccgttttcctcccgttgtaccagcacattctcccgtttcccgtagacggtaaggtctccggccatgcttaaagcatccaaaagcgtcagcttgtccttatcgatattgaagcgtccggggctagcaacctcacccaacacggaaacggtcaggttcatgaactcaactgtaacgacagggtctttcacgagattcttcgaaaccagttcctcttttatatacgaggcgatttcctcgcgtgtcattcccgccacatggatatgccccaacactggaaaatcgatatctccatccttgttgatcgtatatcctgatatcccctggctattggatgttcccgatgtcgtaccgatctgtctggatatgatcggaaggttgaaaaggttcatcaacaaggggtccttgctgttgactagtattgagatcttgtcttcgggacgcacccggatttccagcgggttcaagacttgttctgcggtaccccgtttcaggtccgtgaaataagcgactttcggcgtggcacatgatcccagcaggaaagccacggtcaataagaataaaatgtatctgattttcatatttcattgatttttatttgttggttttctgttccgattgaagttgtccgatagatttcgtcagcctgatgttggcaagagtccatatcaggatatcgcccagcacgatccagttcacattgagataaagggacagaagaatattgagcagtatgaatattgttgatacggaaacaatgataatcatggcattgcgctgctttattccgagagcaagcagcttatggtggatgtggttcttgtccggcaggaacgggttcttcccgttgcgtacccgatgcaggtagacccggaccacatcgcagcatggaaccagcaagggtgagaaggccagcaccatcggatgtacatttcctgtattatcgtctagaccgcacatggtcagtttgagactgaggaaacagagcatcatgccaacggtcaaactacctgtgtcacccatgaagatcttccttccgtgctcggcgttcccgaaaacattgtaatagaagaacggtaccaacactcccaatgtggcgaacgccagtatggcatagacatgctggtggagcatgaaaaaagtcagaccgtaaaacaggcaggcgacactgcatagcccggaagccaacccgtcaatgccgtcgatcaggttgatggcattgatgatgaagaccacgattaaaatggtcaaaggataccccagccataacggaaccgcatgaatacctaggatgccgtgcaggttattgatatatattccaccggcgataagcatcacgccacacaggatctggatgacaaacttggcacgataacggataccaattaggtcatcggccatgccgaccagatacagtaccatgatggagcagaaagcaaaagccaaaggccgtacattgtttccgatttcagacaacatttccgaatgccccagtgccatattgattcccagtaacaaagctatggtgaaaaacacgaccggtttgaacgcgataccacccaatcgtggcaccgcacaatgatgtatcttccgttcatcgggaaggtcgaacagctgtttgcgaaaagcgattagcagaatctggggaatgacgatacccgcacagagaacacaaagcaaaaatgccagtgaacaatttacaatccaaaaatacatatattcagatattgttttttatttgcgtaaaaccgtgaataaggattccagacttttccatatcaggaaatgacttcaatcaaatcgggatgaacctcagccgatatccccataatcccctcaagcatcacgaccacccggcggttgcgtttcccttttacccgcataaacacacccttaactccatcaagcttgccgccgtggatacatacacgggtacctttccgtacgtcgatttcatccggcttataataggccgtatcctcctcatgcagggaagctatttggatgaaactgtccatctggtcgtctggcacggtgatatattccatacccgtgctttttttccacatggcgaattgcaggaagttgtaccgtttcttgaattcggtgatctgcgagtggctggcgtggacgaaaaccagactcggtatgaccggcaccagccttgtcgacttcatcccgtgataggtctttacggcgtaatgtttcggaatgaaatattccagaccgtattctttgtccttcagcctgtcctccgccattttctcattcttgtaggcgcgcatgacgaaccagcggacctgctttttttcttccaccgtagaaaaactcatacccatattgccgggattattttataggtgaggatatacccctagttcatgccaattcgtatattggtatgtattacaacggattacatttcctttattcataatatccactatcagtcccatacttttgacaaagtgtacagacctcatttccgaggcttctgccgctacttctcttggcaagagaaatatccggggatcatattttacgtaactggttgacggacagatagaaatacggaacggcattatggtacttatccaacatatgttaagcaaatacactctgtatgaatgttttggttaattttatcacccgttttctattgttttttcaatattttacgtaattttgcgcattgtaatatttctcttgccaagaaaacgagccatatgctcaacaatttttattgtattacaaaacgccttcaaaaatccttttttaaaaacatccggttttaaattgtcaataagaatatctccaacggtatcctgccgctatattgacagttcatggatcttttctggt

SEQ ID NO: 188 - DNA, 6617 bp, unidentified
  source 1..6617: mol_type = unassigned DNA
atgcggaggattaacatgaaaaaactgaaagtaaaaaaaggaagtacctgtatggcttgtcttgcatgcgtagaagcatgttctgaggctttttataaggagtttcatccggacaagtcctgtatccagatcgtagagaagaagagtgtacgcccgatggcctgtccacagtgtggcaaatgtgcagaagcctgtccggaaggtgcgatcactcagaatgcaaaaggcgtttacatgatcaacaaaaagaaatgtaccggttgcggagcctgtgcaaaagcctgtccgtttggactgatcgtcaagacagagggcaatccggcatccaaatgtatcgcatgcggtatctgtgcaaaagcctgtccgatggatgtactggaagtagtagaagagtaaagagcactcaaaaataatacataaaaataaaaaaagtcattgctgaacatgtgaaatgtctgcgatggctttttttattgtgccgctgtctctaattcaaaaatgcctctgacattcttctgtatacatctgatgtatcataaaaaacagaccttgtcgatagtgaccggcaagatctgtttttgactgatagatattttgttatctttagattaaacaataccctgagcgttcatagcatctacaactttttcgaagcctgcgatgtttgcaccggctacatagttacctttcatgccgtaacgttcagcagcatcaaccatgttgtggcagatattaaccatgataccctgcagttttgcgtctacttcttcaaatgtccagctcagacgttcgctgttctgggtcatttccagagcagatgtagcaacaccgccggcgtttgcagctttaccaggagcaaagatcacgccgtttttctgcagatattctgttgcatccatagtggtaggcatattagcaccttcgcaaacagccaggcatccgtttgctgccagctgttttgcatcgtcgatcagcagttcattctgagttgcacatggaagagcaacatcacattttacgctccatacgccgcgtccttcatggtattcagcgtttggtctgtagtttttgtattcggtcagtcttgcacgttttacttctttgatctctttaagtgctgctacatcgattccgtccggatcgtatacccagccggtagaatcacttgcagtaaccacttttgcacccagctgctgagctttttcgatcgcatagatagcaacgttgccggcaccggatacacaaacagtcttgccagccagttcgataccgttcagtttcagcagttcctgtgtcaggtagagcagaccataaccggtagcttctgttcttgcaagggatccaccgtagcttaagcctttacctgtcagaacaccttcatacaggccacggattctcttgtactgaccgaacatatagccgatctctcttgcacctgttccgatatcacctgccggtacatctgtatcagcaccgatgtatttgcacagctctgtcataaagctctggcagaatgccataacttcgcggtctgatttgcccttaggatcgaagtcagaaccacctttgccgccaccgatcggcagaccagtcagagagtttttgaaaacctgttcaaaaccaaggaatttgatgataccaatgtttacagacggatgcagacggataccgcccttgtaaggtccgattgcactgttgaactgtacacggtaaccggtatttacctgaacctgacctttatcgtcaacccatggtacacggaatttgaactgtctttccggatttaccattctttccagaagagcatcctttctgtatttttcttcatttgcctcgataacgactctcagagactccagaacctcttttactgcctgatgaaattcaggttcagatggattctgctctacaactttggcaataacctcatctacgtatgacatgattgtgtcctccttatcttcatacattgatttctgtaaccattcagagctatgcaaaaaacagttacgttttttttcattgcagattatagcaaatcagcgtggcaaagtaaagaaaaaaatagtgcttttttgcaaaaaaattacggaatttttgtaaaaatgttggaagtgcgtagtttttgcaggaaaagcctcaaaagggaaaagtaaaacttccatataaagcaaaagaaaacgaaaagaatgaccatttacaaaaagaagcagattcgctatactgagaggaaaagactggatgaaaaccggcctgaatacaaaggaggatctgccaatggaaaagcaagtgggacttaccgggcaggaggtggaggagcgtatccgaagcggtcaggtaaacaggatggaaaatcatatggtgaaaacgaataaggagatcgtaaaagcacatttgcttacttatttcaattttctgaacctttttctggccattctggttctgatcaccggacagttcaagaacatgacttttatgggagtcgtgatcgtcaatgcggtgatcgggattgtgcaggaactgaaagttaaaaaagtagtagacaagctgacggttctgacggcttcaaaagctcatgtggtaagagaaggtgaaaaatatgagatagatatagaagaagtggtgaaagatgacattctgattgtgataaacggcgatcagatctgtgcagactgtacggttcttgaatgtgacggtttggaggttaatgaatccatgctgaccggagaatcaaaacctgtaaagaaaaaagcaggagatgagctgatgtccggcagttttgtagttgcgggcggcggtgtcggccgtgtggttcatgtcggtgatgagaattatgccgcagagctgacaaggaaggccaagacgaaaaaacgtgccacttcggaaatgcagaatacgatcaagcggatcatagcggtgatcagtattctgatcattccgatcggcattctgctgttccgttctcagatcagtgctcaggggatgacaaggaacgaagctatcgtggcaaccgttgccggaatcatcggtatgattccggagggactggtgctgctgaccagcatctcgtttatcctgggcgtcggaagacttgcaaaaaagcgggcactcgtgcaggagatggaagcaatcgaagcactggcacgcgtcaacgtgctctgccttgacaaaaccggaacgatcacgaccggggaactggaagttacagaggtgcttggccttggagaggtgaaaaaagaagaaataagcgagatcatgaatgagcttacgtttgcttttgaagacagcaacaacacgcaggaagcattaaaacgttattttcaccggatggaccgttttacggtcgttcagaaaattccgttttcttccgaacgaaagtaccgtgcaatcgagttcgaagaaaagggctgttatgtccttggtgcaccggagtttttattgcaggatgacgaagaaggggcggaaatccttcgaaaagtcaatcagtattccgaggagggctatcgtgtcctgttgcttggaaaatgcggttctgttcaggcggaagatggaagtgtcagtgaggtgtcaccgatgggactgatcgtgatcctggactgcatccggaaagaagcaccggacgtctttcagtacttccgtgggcagaaggtagagatcaaggtgatctccggtgacaatccggtgacggtatcgaagattgccggaaaagcaggacttctgggggcagaaaaatacgtggatgcctccacactcggagatgatccgcaaagttaccgggaagccgtgcagaaatataatgtctttggacgcgtgaagccggaacagaagcagaagcttgtccatgcttatcagtcggaaaagaaagtggtcggtatggttggtgatggtgtcaacgacgtgcttgcactgaaggatgcagactgcggtattgcgatggcagccggaagtgatgcggcaaaacagtcggcacatattgtcctgctggattcggattttgcctgccttcggaatattgtaagcgaaggaaggacgatcattgccaacatcgagcgggtcagcgcactgtatctgaccaagacactgtattccatcctgctgtgtgtcatttttattcttctcggacgggcgtatccgtttatcccggtgcagctgtctctgatcagtgcagcctgcatcggtttcccgagttttgtgctgacactggagcataccgaagaggtgacaagtactggatttttgcgtcatgtgatgcagacggcacttccggcggcgattactatggttgtcaccctgcttgtggttcaggttttgtcaccgttctggaaagaaacagaagtgtttacctatacctttgatctcctggtcggaggagcagtcgggatcatggtcgtatttcgtgtgtgcaggccgttgaactggctgagaggcattctctgtgtctgcgtgatcgcagttttttcggtgggtgtgctgctgttcccgggatttcttggaatccacagcatcttctgctggcagatggtactggcgatcccgcttgtgtgcatggtcattcttctgtatcatgagctgatacgtctgatcctgtgctgttaccgaatccgagatcgcatacacgaaaaactggagattttatttccgaagagaaaaaagaaaagaagccggtaaggaaaggaattataaatgaaaaagaaaatagcagtgataggcggaggggcggcaggcatgtttgcagcactgaatgcggcagaacgcgggtgcgaagtccatctgtttgaaaaaaatgaaaaactgggcaaaaagatctatattacaggaaaaggcagatgtaatctgaccaacgcctgtgatacggaagaactgtttcaggcagttgtcagcaatccgaaattcctgtacagtgctttctatggctacacgaatcatgatgtgatcgatttttttgaaaacgccggtacaaagaccaaaattgaacgtggggaccgtgtttttccggtatcagatcattctacagatgttattgatgcacttcgcaggaaaatgcgggaatataaagtgcaggtgcatttaaataccgaagtttccaaggtggaagccaaagatggaaaagtaaccggtgttttgtcggatggagaaaagaaactttttccggcagatgccgtacttgtggcaaccggagggatttcttataaaacgacaggttctaccggagacggttaccgtttcgcagaagaactcggacataaagtgacggaattatatccatcgctggttccgtttaatacaaaagaagcgtgggcaaaaagccttcagggtctttcgctgaaaaatgtggatgtcaaagtgatggacggtaaaaagaaactctatgatggttttggcgagatgatgttcacccactttggcgtgactggtcctctgatcttaagtgccagcagttacactgcgaaaacggcacgaaaaaaagaactttctatgtttatcgacctgaagccggcattgtcaaaagaacaactagatcaccgaatcctgcgtgattttgaggaagcaaaaaacagacagtttaaaaacgcactgggcggacttttcccggcaaaactgactccggtcatgatcgagttgtccggcatcaatccggagaaaaaggtaaatgaggtatcaagagaagaacgcctcggatttgtggagctgattaaaaatttgccattgaccgtaacagggcttcgcgattataatgaagctattatcacaaaaggtggtgtcagtgtaaaagaagtcaatccgtccacgatggagtccaaactggtgcagggactgtattttgcaggtgaggtactggatctggatgctgtgaccggaggattcaatctgcagatcgcctggtccactgcctatgcggcagcactggcgatgagcgaagcatagataccatgcaggaggaaaatatgagttttaatattgcaattgacggaccggcaggagccggaaaaagcacgatcgcaaaacgtgtgtcaaaagagcttggatttatttatgtcgataccggggcaatgtatcgtgcgatcgcagtttatatgatgcagaatcagatcgatatccacgacgatgcggcagtgcagaaagcctgcagcaagatttccatatcgatcgcctacagtgatgacggcgaacagcaggtgatcttaaacggggagaacgtgaccggactgatccgcacagaagaagtgagcaagatggcatccgtgacttccgcaaacccggccgtgcgagccacactgcttgacctgcaaagagatctggcggcaaaagaagatgtcctgatggacggaagagacatcggcaccaatatcctgccacatgcacagctgaaaatttatctgaccgcaagcgtggaaacgcgtgcaaagagacgtttcctggaacagcaggaaaagggagatacgcacacactggaagagatcgaagaggagatccgggaccgcgatcagcgtgacatgtcaagagagatcgcaccgcttcgccaggcagaggatgccattctggtagattcttcggatctgtcgatcgatgaggtggttgagcgtattaaagaatgttacagggaagtgaagcaatga

SEQ ID NO: 189 - DNA, 17417 bp, unidentified
  source 1..17417: mol_type = unassigned DNA
gaaaaaagtggaaaaaacttcttgcaatttattatctttactgctatactcagttaaaacataatattcctatatgacaagtaggaaatgaaaggagcgataccgtgaaatttaatacatctttgctgcacggtgcttttcggggtgaaccgcagacaggagcaacattaacaccaatttaccagtcgagtgcatttgagcaggaatcggcggaacgtctggaaaagatatttcataatcaggctccgggattttcctatacgaggatcaataatccgacggtggaagcatttgagaaaaggatgaccgtgttagagggcggtaaatcgagcgttgcatgcgcatccggaatggcagcgatgtttaatgcatttgcaaacatcttacaggcgggagatgagatcgtatcgagtgcgagcctctatggtggaagcattgatctcttccgggatcttgaagcattcggaatcacgactcattatgtcgaaaacaacgatctcgatgcattctgcaaagcgaccaacgcacacacaagactctattttgcagagacacttggaaatccgagactggatgtgacaggtatcaaagcgctggcaaagctggcacatgagaatggcgtaccgctcattatcgacaacacagcagccaccgcatatctggtaaaaccgctttcactgggcgcagacattgtagtcaattccacttcgaaatacatcaatggaaacagcaactcgatcagcggagttatcacagacggcggaacatttaagtgggataccgaaaaatatccgggtatgcgtgattttgtaaaatttggaccgtttgcctacactgcaaaattgagaaacggactgttccgcaacaccggagcctgtctctcgccgcaaaatgcatttttaaacagcattgggcttgaaacgttaggactccgcatggagcgtatctgcgacaatgcaatgcagcttgcggcttatatcgaagaaaactataaagacattacggtaaattatgcagggttagagacgagcaactggcatgagattgcaaagagccagtttgacggtcattacggcggcatctttaccttaaggcttggcagtaaggagcgggcatttgcatttatcaatgcattaaaatatccgcttaaggtatctaatatcggcgataccaaaacacttgtcatccatccggaatcgaccatcagtgtacacagcacggaggaagaaaagaaagcgggcggtgtatttgatgatctggtgcgcgtcagcgtcggaatcgaggatattgatgatctgatctgggattttaagcaggcgatcgagagcctttcttaaaaaacgaaaaaatataccaaagtgttacagtaatactttaaaacgggcactttaaagtgttacaatagaaaagcacagtagaataccaggatattgaaaaatcagaaaagataaggagtgtaaagatggcgggagttgattatgcagcattaaaaaaaggcggattcatgaggcagaaacagaaaggatttttctcactcagaatccaggtggtcggaggtaatctgaccgcagaaaatattaagaccgtggcagaggttgcggaaaagtacggcaaaggctatgtacatatgacatccagacagggaatcgagataccgtttgtcaattttgaggatatcgaggaagtaaaagcagagcttgcaaaaggcggcgtgaaaccgggtgtctgcggaccgagagtccgtaccgttacagcttgtcagggttcggagatctgtccaagcggatgtattgatacctattcactggcacaggagttagatgaacattattttggacgtgaacttcctcacaagttcaagtttggtgtgaccggatgccagaataactgcttaaaggcagaggaaaatgatatcggaatcaaaggcggcatggaagtttcctgggttgaggataaatgtatcggctgcggtgtctgcgaaaaggcgtgccgtcagggtgcaatcaaatgtgaaggaaacaaagtgacgatcaaccgcgatcagtgtaactactgcggccgctgcgtgaagtcctgtccgacggatgcgtgggaaggaaacagcggatatctggtttccttcggtggattgttcggaaatcagatctacaaaggggagcagcttctcccaatcgtacatgacaaagagacactgttccgtgtcaccgatgcagcgatcgactttttcagagatcatgcaaacccgggcgagcgtttccgcctgacgttacagcgcgtcggcgaggaagagttccgtaagaagatcaaagaagcctacgagggaaagtaaggatttcgggcagaaaaaacatgcatgcaggaaaaaattgtatataaaaacaaatagatatgtcacaaaaaaatatgcatgcaagaacaaataagcatgtaaacaaatagatgcagcaaaagcatgcatacagaaaacaatctggagcaatcaaaaatgcagcatatataataagaagaaacaggagggaagaaatggaaatcgcaggaattgcaatcgacgaaacagtagatattaccgataaagtatgcccgctcactttcgtaaaagcaaaggtagcgctggaggaattagatgatggcgaagtcattgccatccgcatgaacgatggtgagccggtacagaacgtaccgcgcagtgtcaaggaagagggacatcagatcttaaaactggtggacaatgaagatggaacttataacctgatcgtccgcaaggtagagggataggaggaatcatggcacagcgaatcaataaagacaattttgaagaaaaagtcctgaaaagtccgctgccggttctggtagatttttattcggacagttgtattccatgcaagcagttatcaccggtgcttggggatatcgaggacgaacgcgaagacacactttctgtatataaagtaaatgtcaactatgacatggaacttgctgaaaaatatgacgtcatgggtgtaccggcactgcggttgtttgtacagggcgaggtcaaagcagagagagccggtgcagcaggaaaagctgatattgaggcgtggatcgatgaaaatttaaaatagcgggcagacaaaaaaaggttccgcggaaaagaggagaaacatgcagatcacagtagcaggaaacaaaaaagaagtaaaagatgacttaaagttaacagaactgttcgagttagagcaggtggaaaccccggagtatgtgaccgtttccatcaatgaggaattcgttccatccgagcaggtggaatcaacggtattaaaagatggcgacaacgtagaatttttatatttcatgggaggaggcagctatggcgttaacagatgagcagattgagcgttattcaagacatatcatattaaaagaagtcggcgcaaagggacagaaaaaacttttaaatgcaaaagtgctgatcatcggagccggcggacttggcgcaccggcagccatgtatcttggtgcagcaggcgtgggaaccatcggtatcgtagatgcagatgaggtcgatctttccaatttacagcgtcagatcatccacggcacagccgacatcggaaaagcaaaagtaaaatccgcaaaagagacgatcaatgcgatgaacccggatgtaacggtaaaaacctaccgccagtttgtgacaagcgaaaacatcatggatctgattgccgattatgattttatcattgacggaacggacaatttcccggcaaagtttttaatcaatgatgcctgtgtcatggcaaaaaaaccattttcccatgcaggaatcatccgttttaagggacagcttatgacctatgttccgggagaaggaccatgctaccgctgtgtattcaaaaacccgccaccaaaggatgcagtgccgacctgtaaacaggcaggtgtcatcggtgccatgggcggtgtgatcggaagtttacaggcaatggaagcaatcaagtacattctcggtgtaggaaaacttttaaccggttatcttttaacctacgatgcaatcaatcaggagttccacaaagttaaactgccgtctaatactgatggctgcgcagtatgtggaaaacatccgacaatcacagaactgatcgactacgagcaggttgtctgcacagacggtatttaacttaggaggcgcatatgctgattttaaaacaggaagattacaataaaatcgtggatcatgcaaaaaaaggactcccgaacgaggcatgcggactgcttggcggctatgtggaaggtgacaaacgtgtggtgacagacgtgtatctgcttcgcaacgtagacgagagcagggaacatttttccatggatccggcagagcagcttgcggcgatcaaagatatccgccagaaaaaaggcgtacttctcggcaattttcactcgcacccggaatcgccgtcacgcccttcacaggaagatatccgcttagcgtatgatccgaagatgaattacctgatcctctccctgatgaacccggatgagctggtgctcaattccttccatatcgaaaaaggagaggtcacaaaagaagagcttgtgatcgaagcgtaaaaataaaatcatagacgaaaaaagtgtaaaaggagaaaaaaattcttttacacttttttgatttcttttaacggaaattccagttctttaaacaataaaatctgttgcagccgttcttttcaggtcatatccgaagaaccattaaaatataggtatcttcacggatcggagtgaatttgttttttatccagaaagaatagctctgtgggtttcccttgtcaacgccaagttggatttcttgatatccatatgatttcagacaagggatcatgtcactgatgatttgcgaaccaacccctctgttctgatagcgagtgtctgtcataaataatcctatgaaggcaatttctttattaggataatcaaggattaaatccatgagtccaaccagtgaatcattttcgaaaaatccgacatagaatttatcatcatagtcttttcccggtggtaaggcttccatatcatctaagatactttcccttgtgacaaagggcggatgatattgataaaagatatcgtttttgcagctcatatcatagatgatatctacatcattttcgtcgagtttttgtacagagtatttttgtgataacgaatttatatttatattcatgttcatagatcctccattataatattgtggttcaatagttttatacaacatgatgactgtcaaagtgtatctgacatcataagatattgaaacatcgcagattgggcatatagcaaagaaattgcagctgtatacccacaagaacccctgattttcccgtgttttgggtatataatgaaagaaactgatctgctatgcccattatcagtgaaaaatcactcaaaatccccatatttttgggtataaacagcagattttttctgtatatacccaatcgacaaaaatccatgatcgatttttactcaaacaatgaccgctggacatatttttccggaaaatgatgcagataagcaaaacattcatccggcgaacaaaggatgccagccttttggcattgttccacgatcattggaatgagcattttttcattcgggcttggcaggttgtaggcattaccgtaagtgcggatatatttttccttcatccccggaaaatctttatcgagggcatggtagaaatactccctgtcgccatcccggagggttacgccaatgccccagaatataatcccctttacgccggcgtccacgcaggcatccagcagattttttatgttatcagcagtgtcattgataaacggcaggatcggtgtaagccacaccacagtgggaataccggcttctttacatttcatcaggacgtcgatgcgctctttggtggtggaaacatctggttctatctttttacataaatcttcatcgtaagtggtgagtgtgatctgcacgatggcttttgccttttcattgatggacgttaacaggtcaaaatctcttaaaatccgggctgactttgtctgtaccgcaacaccaaattcgtaccggtcgatcagctctaaacaccgcctggtcagcaaaaggcgctcctccacatgaagataaggatcgcacatggcaccggttccgatcatacatttctgacgcttcgatcgcaaagccttttctaacaattccggggcattttcctttacctcaatatcttcaaatgcatgtgtaaaaccatagcacctgctccggctgtcgcagtaaatgcatccatgggaacatccccggtaaatatttattccgttatccttcgataaaagccccttcgcctgaacaaaatgcatgagaaatctcctgtagttaaaattaaaaatccgattaatcccattaaaacataagtaaagaaaaatcacaatcaagatcagaacaaaaaaataatgaggaaacagtcgtaacctacagagcatagatttcccttttttcggtatcgagggcatgtagaatgcagttttccgggtgccgccggcagatttgagactttggaagaaaattagaaaatcttagtatgcctgttcactcacagtgttgtgctgccatggacggcagcacaagtcctgatgtgccagggaaggcacattcaggacgtacacgtcactccgaaaccaactcaaacaggcatacttagcttttcttattttcgcacaacggaaccaaacctgccagcggcacccggaaaactgcgccttacactgtcccttaatacctaagtaccattttgcaaaactttaccaaattaccttgacaaatatttccatcagtcatatactttgaaaagctaattatttgactatcaaactatttgaaaggcaaatgattacatgaatcagaaaataagaaaagaaaatcagcccacaatagaaataagggcagggcgctggaaaaatgataaggcatgcgcagaaaaggagaaaaaatatgttagagaaaatgatcccgattattgcagagcagttaaatgtgaatgagtctgaaatcaaggcagagtccaatttcaaagatgacttaggagcagattccttagatttatttgaacttgtcatggctcttgaggaagagtttggcgtggagatcccatctgaggatttaccttctatcgtaactgtcaatgatgttgttgagtacttaaaaggaaaaggtgtggcttaagtatggaaacaagggtaagtaaactgctgggaacgaaatatccggtcattcagggtggtatggcatgggttgcggaatatcatcttgcagcggcagtttcaaatgccggaggtttaggtatcattggagcggcaagtgcaccgcctgaggtggtcagagagcagatcagggaggcaaagaagctgactgacaaaccgtttggcgtgaacgtcatgctgttaaatccaaatgcagccgaggttgcacagatcgtcattgaagagggcgttaaggttgtgaccacaggtgccggaaatcccggaaaattcatggatgcatggaaacaggcaggcgttgttgtgattccggtcgttgcgagtgttgcaatggcaagaatgatggagcgtggcggagcagatgcagtcattgcagagggaatggagtctggcggacatatcggtgcacagacgaccatgacactcgttccgcaggtggcagatgcagtacagataccggtcattgccgcagggggaattgcagacggcagaggcatggcagcagcatttatgctcggcgccgaaggtgtacagatgggaaccagatttgtggtcgcgaaagaatccatcgtgcatccgaactataaagagcgtgtcatcaaggcaaaagacattgactcagaagtgacaggcatgagcaccggacatccgatccgggttcttcgcaaccagatgagccgcgaatacttaaaaatggaaaaagagggcgcttcatttgaagagttagagcaccttacacttgggtccctgcgcaaggcagtcattgacggtgacgtggtcaacggaagcctgatggcaggacagagcgccggcatggtaaaaaaagaagaaagctgtaaagagatcatcgaggacgttgtgacacaggcggagtcactgcttggaagatagtgcaaaaataagcgcaagaatggagattaacatgggaaagacggtttttatgtttccgggacagggagcacagtacataggaatggcaaaggatttttacgatgccatcccggaatgcagagaagtatttgaggaggcatccgaggcgtcaggacttgatatcgctgcgttatgctttgaggaaaacgacaagatcaatatcacggagtatacacagatctgtatgctgactgctgaggctgcgatcctgcgtgcattggaggtaaaaggctataaagcagatgtgactgcaggcttaagcctgggagaatatggagcactgatcgcctgcggagcactgagcagaaaagatgcatttgcactggtgcgcaaaagagggatctacatgcaggaggcggtgccggagggcggagccatggcagcagtcctggcactggataccgcgcagatcgaggaagcctgtaaaaaaacagagggcattgtatcgatcgcaaactataactgcccgggacagatcgtcattaccggagaagaaaaagccgtagcggcagccggagagctctgcaaagaagccggagcaaaacgtgttgttccgttaaaggtcagcggaccgttccactcagcaatgttaaagggtgccggagaaaaacttggcgaggaattaaaacatgtaacagtccatacaccggcaatcccgtatgtcgcaaacgtgacagcagactatgtgacaaaagaagaggagatcaaaccattactggaaaaacaggtgtcctcatctgtccgctggcagcagacgattgagcgtctgatcgcagacggagcagacaaatttgtagagatcggaccggggaaaaccttgacaggattcatgcgcaagatcaaccgtgatgtagctgcagtcaatattgataaatatgaagactttgagaaatttgttgctgagagcaaaaataaataagatatgccacatattttgatgtgaaaaaagtttggcagctatcagaaaaaaggagaagttatgttaactaataaaacagcactggttaccggtgcaagccgtggcatcggagctgcaatcgcaaaaagccttgcaaaagaaggtgcatttgtcatcatcaattacaacggttctaaagagcgtgcaaatgctgttgcggcagaaatcacagcggatggcggcaaagcggcagtttacggctgcaatgtatctgattatagtgcctgtgaaaaaatggcaaaagacatcatggagacatacggtcatctggatattctggtcaacaatgccggtatcacacgggatgatcttttgatgaaaatgagcgaggaagcatttgacgcggtcattgcgacaaacctcaagggaacttttaacacgatccgtcatttttcacgctatctgttaaagcagcgttccggaacgatcatcaatctatcatccgtatccggtattcttggaaatgcaggacaggcaaattacagcgcgagcaaggcgggcgtgatcggactgaccaaaagtgtggcaagggaactttcttcccgtgggattacctgcaatgcggttgcgccgggattcattgatacggaaatgacagcgcagatgacagacaaggcaaaggaagcagtgaaaacgcagatcccgctcggcagagtcggaaaagtggatgatattgcggaggtagtgacatttttagcctcggagaaagcatcctacatcacaggacaggtaatttccgtggacggcggtatgagcatataagcagtaaaaacattttgaccgcatggtattgtgtcggatcaaaaaggaaaagcctgaatttggggcttgaaaatggaaaggaaaagttatgagcagacgagtagtggtaacaggaatgggcgcgatcactccgatcggacttagtgtagaggagttctggcagtccataaaagaaggaaaaatcggtttcggggagatcacgaaatttgatacggaaggatacaaatgccatcttgcagcggaagtcaaagatttcgatgcaaaacagtatatggatgcgaaagcggcaagacgtatggaattattctgccagtatgcagtggcagcggcaaaagaggcgatcacggatgcagcgcttgacatggaaaaagaagatccttaccgtgtcggtgtatctgtcggaaacggaatcggaagtcttgggggaattgagcgtgagcataaaagactgttggaaaaaggaccgtccaaagtaaatccgctgttcgtaccgcttgtcatttccaatatggcagccggaaatgtctcgatcgcattcggtttaaaaggaaagagcatcaacgtggtaacggcatgcgcaaccggaacaaacagtatcggtgaggcattccgcagcatccagtacggagaggcagatgtgatggttgccggtggaacggaaggtgcgatctgcccgcttggaatcgccggattcacttcactgacggcactttcctccgagagtgacccgacaaaatgttccattccatttgataaaaaccgcagcggttttgtgatgggagaaggtgcagcgatcgttgtgttagaggaattagagcatgcaaaagcgcgtggggcaaaaatttatgcggaggtagccggatacggaacttcatctgatgcatatcacattacctcccctgctgaggatggtgccggtgcagcccgcgccatgacgaatgcggtggaagatgcaggcatccgtccggaagaagttacctacatcaatgcacatggaacatccacgcatcacaacgacttgtttgaaacgcgtgcgatcaaactcgcttttggcggtcacgcatatgatatgaaagtcaattccacaaaatctatggttggacatctgctcggggccgccggtgctattgaatttgtaacctgtgtcaaagaaattcaggacagttttgtacatgcgaccgtcggttacacgacaccggatgaagaactggatcttgattactgtaaagaggcggtacagatggatgtgccgtatgcactgagcaactcacttggtttcggcggacacaatgcaagtatcctgctgaaaaaatacagtgaataattgggaggaaatgcctctgctcaccagtgggcaaattttattttggaaaacagggaggcaattatgtccgttttaacaacgaaacagatcatggagatcattccgcatcgtcagccgtttttgctgatcgacacggtggaagaattagaatccggcatgcgtgccgttgcaaaaaaatgtgtcagctacaatgagccattctttggcggacattttccaaatgagccggtcatgccgggcgtactgatcattgaagcactggcacagaccggagcggttgcaattctctcggtggaagaaaaccgcggaaaaactgcatattttgcgggaattaattctgcaaaattcaaacggaaagtagtgccgggagatgtgttgatattggaaacagagatcataaagcaaaaaggcccgatcggtgtcggccgtgccacagcgaaggtgggggatgacattgcatgtatcgcggagctgacatttgcgatcagttgaagttaagagagtctggaacagcgcaggtttgataaataactgtaaacaggcaaaaaggggaaagtatggcagcattttttttgaagaagaaaaaagaagtaacagagacggtagaagaaccacagaaaacggtagaggcagcaaaaaaagaggcagagacagttaatacagagccgccggcaacgatcgtctgtccggcttgtggcagagagatcaataagaaaaccgcggaaaaaaataaatatgtctgttatgagtgcggcaattatttccgcgtccgtaccaaaaacaggatccgcatggttgcggataaggatacctttgagccgtggtttgaggaattggagtcaaaaaatccgcttgattttcctggatatccggagaagatcaaagccgcacaggaaaagacaggactgcatgaggcagtcacagtcggaaaatgcaggatctatggacttgagacggtgatcggcgtgtgtgatgcccggtttatgatgagcagtatggggcatgttgtgggagaaaaaatcgcacttgcggtggagcgtgcgacagaactttctcttccggttattttattctgttgttccggtggtgcaagaatgcaggagggaatcgtttccctgatgcagatggcaaagacagcagctgctttaaagaaacattccgaggcaggacttttatatgtgccggtgttaaccgatcctacgaccggaggtgtgacggcaagttttgcgatgttaggagatattatccttgcagagcctggggcactgatcggatttgcagggccgcgtgtcatcgagcagacgatcggagagaaactgccggagggattccagagagcgcagttccagttagagcatggttttgtggatgcgatcgtggagcgtaaagatttaaaaatgacactttaccgcattttaaagatgcatcagaaaacggaaggatatgcaaactttgatccgctgcgcagcgatgactgttacgagccgacagaggtcatgaaagagcgcgccacaaaggcacagcctctttccgcatgggaaaaagtgcgtgcggcaagacgtgcagaccggcttgcatcggtggattatatcgacaatatttttgacgacttcatggaatttcacggagacagacagttcgcggatgatcctgcgattgtgggcggtgttgcctaccttgacggccagccggtcactgtgatcggtattcataaaggaaaagatttaaaagactgcatgcgtcacaattacggaatgccgtcaccggaaggttacagaaaagcactgcgtctgatgaaacaggcagaaaaattcaaccgtccgatcatcacatttgtgaacacatccggtgcattctgcggaaaagaagcggaagaacgcggacagggtgaagcaatcgcaagaaatctctatgagatgtcagccatcaaagttccgatcctctgtctgatgatcggagaaggcggaagcggcggtgcgcttgcactgtcggtcggcaatgaagtctggatgcttgaaaatgcaacgtattcggtactttcgccggaaggatttgcatcgatcctctggaaagatggaaaacgtgcaaaagaagccagcgaggtcatgaagatcacggcgcatgatctgtatgcgttaaatattgtggagcaggtaatcccggagtatggcacggcagacgaaaaagcatgtgagtcaatctcaagatatatgaaaggccatatgaaagaatttttagagcgtcagaatggcaagacaggagagcagcttgccgaggagcgctatgcgagattccgtgcgttctgataaaaaggttactggattattttacagagggcagatggaaataaaataaactctggaatgaggaaaaagtatgaaaatcaaaatcaagggaaccggaagtgcggttccaaaacttcgggtgacaaacgatgatttaagtaaactgatggacacctctgacgagtggatcagaagccgtaccggaatcggtgcaagacatcttgcggtggaggagacgacgacagggcttgctgtcgcagcagcaaaggaagcgttaaaagatgcggaaatgactgcggaagaacttgatcttatcattgcagcaacggttacggcggataagtttctgccgaacttatcctgtgaagtgcagagtgcgcttggagcaaaaaatgcagttgcatttgatttaaacgctgcctgctccggatttttgtttgcattaaatacggttcagatgtatctggaaaatggtgtatacaaaaaggcactggtcattggagcggaaactctttcaaagatcatggactggaatgacagaagcacctgtgtattgtttggggacggtgcaggggcggcggtcgttgaggtggattccgaaacaaattgtaaagcaaagcagccgggtgcagcaaacaaaagcggcattctaagcatggtacagggttccgacggcgcgcggggggaagtcctccgctgtgataaccgtccggtcaataatccgtttgcggtcaacgatacgaaactttcctatgtgtcgatgaatggtcaggaagtatataaatttgcagtcaaaacggtgccaaaggtgatagaagaggcagtgaaaaaagcgggacttgaagtggaggatattgatctgttcgtacttcatcaggcaaatctgcgcattattgagtctgttgcaaaaagactgcatcagccgatggaaaagtttcctaccaatctggaagagtgcggcaatatttctgcggcgagtgtaccgattttacttgataatatcaataaacatggtatgatatgtgaaggtaaaaaaatagttttggcaggatttggagccgggctgacatggggggcgacggttttggtatggtaagggcagcagtaaacagactggctgcagtttacatatgtgtgaaaggcaatcagtactgccatgaataggagtatatttgaatgacggcagatgaaacattaaatgagttattggtaaaattgtttaaaaacattatggagattgagggaaaatctctgatcacggatgaatttaaggatcttacctataatgattttcatgtaatagaagcgattggaatgtcagagccaaagagcatgagcacggtggcaaagctgatgaacgttacgaccggaacgctgacaaaggcgatggacggtctgaccgataagggatatgttgtcagggagcgcagcaagcaggataagcgtgttgtctgggtatgcctgaccgaaaaaggaaaggcagcttatctgcatcatgaagagtttcatcaccgtatgatcgaccacattaaggaagaacttaacgcacaggagacaacggtactgatctattcactggcaaaactggtggattttttccagcaggtatacggggagaatgaagaatcgtagagggtttggacaaagttatggatattatatagatatttgtggatgtttttcggaaacgggaggcatcctttttctttatagaagaatgccagggcagatagtgcttttcaattttctgataacacagtcatgatatattttctcaaataaatgttgtaattacaacatacaatctgaccgaaataaattaatatgataccagagacaaggacatcagtgtgaaaaataagatttttcacacgcaggatttgtgcttgcgcacaaacttaagatgcgcaaaagcagcgcaagaatggaggttttcatgaaacagttagaattaaacaacagaaaagtggcagtgatcggatgcggatttgtaggagcgacatcagcgtttggactgatgcagagcggattgttttctgagatggttttgattgatgcaaatacagagaaagcggaaggggaggcgatggatatttcccatggaatcccgtttgcaagaccgatgaaaatttatgcgggcggttatgacgatatcatggatgcggcgatcatcgtggtgacagccggtgcaaaccagaaaccgggcgagacgaggctggatctggtacagaaaaacgtcggcatttttaagagcatcatcccggaaatcgcaaagagagattatcagggaatcctgcttatcgtatcaaacccggtcgacattcttacatacaccgcacacaagttgagcggaatgccggaaaaccgcgtgatcggttccggtacggtgcttgacacggcacgcttaaaatatgagctgggagagcatcttggtgtggacagccggagcgtgcatgcatttatcatcggggagcacggtgacagtgagatcgcggcatggagcagtgcaaatgtatcgggaatcccgctaaatacattctgcgagatgcgcggacatttcaatcatgatgactcgatggaacgcattgctgcaaatgtgcgcaacagtgcctatgagatcattgcaaagaaaaatgcgacctattatggaattgcgatgtctgtaaagaggatctgcgaggcaatcgtgcgcgatgaaaaatcaatccttccggtttccggtatgatccatggaatgtatggtgtggaggatgttgtcttgagcatgccggcgatcgttggaaaaaacggaattgagagacaggttccgatttctttagatgaggatgagcagaaacagcttcagaaatcagcacagatcttaaaggagatggcagagcaggttttgtaatttttgaactccctttttacaaaagtgtgtctgatgcatattaactcataattatacgaaacaccacacttttattcattttctattcatttcttactaatgggtattcatttttactctaggttgtcgtgcaatttattagaatggaatttttgaaagagccagcaccttgaatgggctgactctttcaatgtcacctgtaattaacaaactggaatttctcacttcttcattttaggtgcaataagcaacactactgtcacaagaaaatatacaccatacatcaaccatgtaatagtattgttccatggaaaactcatttctggatgattcaatgcaaacattataaatacaatggctataatcagcatgatcaaaccgataatccttgatatactctttttcatgtaaatcaccttctcgtcaaattatagttatctacgtattccatcatcattaaaatgtttttttaaagctttctctgtcggataaattgatacaatcataataaagcattgaattgtcacaagaatcaaccctgcaaatccaatcgtattcttatcactatgatataacggaatatgtatcaaagcagatggtataatcattatccatccaattttccaccaaagtcttccgcagtagtcattcgcaaatttccatgtatccatatttttcattgagcgagttgttctgtagcctgacatactattcatatgttttggacaatgtttccacatcattcttccacaaatgaccatagcaataggaattatcagatcacatattaacataaaccaccaaaaccacataaaccgcacctctcttcacgcatcaatttgtataacagtagtctaacacatgttgataaaaagtactatatacaaactaatgtccgtgatttgctttccataaaaagttcctttcaaaaataaattatattttctagagagatgagcaaaacgaattgatttaaaagttggatttggcagttagcttttgtaaa

SEQ ID NO: 190 - DNA, 12849 bp, unidentified
  source 1..12849: mol_type = unassigned DNA
ttaagccttatccgccatcagctgcaccatgaccgccttctgggcgtggagacgattttccgcctcctcaaaaatttcagccgcatgggcctcgaatacctcggcggtgatttcctctcccctgtgggccggtaagcaatgctgcaccatagcatccttgtgggccgccgccatcagctcttcattaatttgatagccggcaaaagcctttttccgtttttctgcttccccctcctggcccatggaagcccaaacatcagtgataatcacatccgcttccttggccgcctccagaggagctctgcaaagctcaaagcagtcgtactccttggcgaaatccagcacccggggatcgggatcatatccctcggggcaggccgcagagacggacatgccggttttcagccctccaacgatcagagaattcatcatattgttgccgtccccgataaaacacattttcaagccttccagcttgcccttaaactcgcggatggtcatcagatcagccagcacctggcaaggatggcagaaatcggtcaggccgttgataatgggaatactgccgtactccgccagagcttccacttcgctctgctcaaaggtgcggatcataatgccgttcaaatagcgggaaagcactcgggcggtatcctgaacgggctcgcctctgccaatctgcatatccttggccgagaggaaaatgggcatgccgcccagctgatacattcccacctcaaaggaaaccctggtgcgggtagaggatttctggaaaatcatacccaaggtttttcccgccaggcgcttgtgctcgattccatgcttcagctcatacttcagctgatccgccaaatttaaggtatccatgatttcctggctgctccagtctaaaagctttaataaatgtttcattggcttagccctccaaaattgatttttctaaaatttccaggccctggtcgatctcctcataggtgatattcagcggcggcagcagacgcagtacggttttcgctgtcagcaccagaagtccgtttttcacacagcggccggctacttccttagcgttatcctttgccagtacgatgccgatcatcatacccagcccccgaagctcctgaacgcccgtcattttactcagcttctcccggaggtaacggcctttttcttctacagaacgtaaaaaactatcttttgctactctttgtaaaacttccaaaccgccggcacaggagacaggatttcctccaaaagtagtgccgtgcattccggcgcccagcacttctcccaaacgagaagcgcacaggcaggcaccgatgggaagccctccgcccaatcccttggccgaggtgatcacatccggttcaatcccatactgttcatagcagtaaagggacccggtcctgccgacgccggtctgcacctcgtcgatcatcagcaggatatccttttccttgcagagggcggcggttttccgcacgaactccttttccagaggcatgactccgccctcgccttgaatcagttcgatcagcacggcgcaggtattttcagtaacacaggaaagcaagctctcaaagtcgttggccctggcgtaggaaaagccttcggtgaagggccagaaatgctcatgaaacacgtcctggccggtagccgccagggtcgtcaccgttcttccatgaaaggagttcaccagcgtgacgatctctgtcctctgtttgccgtatttatcggcactgtattttctggccagcttaatagcacattcattggcctcggctccggaattgcagaaaaacaccctgccaaagcctgtcaggcggcacagctcggctgccaggctggtctgcaccggggaatagtacaggttgctcatgtgctgaatcgcgcctgcttgtttagcgaccgcgctcacccagccgtcgtcgcagtagcccaggctgttaacgccgataccgctggtaaagtcaatatattcctttccctcggtgtccaccgcgacagctccctttccgtaaaccagcgccacgggaaaccgcccgtaggtaggcatcaggttttcctgctcctgccgcttgacttcctcaaaattcatgctgcttcctcttttcttaccgtaatctaaacgaccagagaatggaccggagcatacgcggatccgtccctcaaagggaatcgaattcctgatttgccccccatgcttcatcctccggaaacaggctggcagcgccggcagtgctttcatccctgccagcaaggttcctgccagtgttttaccttccggcctgcctgccgcaaaattcttctgatcctccgccatctgataggcaccagaactctatttacaagaaagcccagaccggcgggctggcgaaactctgccggctgagtagaaaatcatctgaaaagcccttatgctttccttaatagaacatggtgccgatgccctcgtcggaaaacagttcgatgagaatggaatggctgatcctaccgtcgatgatatgggcccggcccacgccctggcgcaccgcatccacacagcagtcgattttaggaatcattcccccgctgatgatgccttccttcttcagcatgggcacctcgctgacgttgaccaccggaattaaggtgccttcgtcatccttatcccgcagcaaccccttgacgtcggtcatcaaaattaatttcattgcccccagcttagccgcaatgctggcggccgccacatcggcgttgacgttataggtttccccgtgatagcctccggcgatagtggaaatcaccgggatatagcccttttccaccgcgtcgttgatcacagccgtattgacgctggtgatctctcccacaaagcccagatcctcggcggcggctttcttttccgccatcagcatccggttgtccaggccgcacaagcccagcgcccggcctcccagctgctccagcagcttcaccaggtctttgttcacctttccggccagcaccatctggacgatatccatggtttccgcgtccgtatagcgcataccgttgataaatttgctttccttgccgattttcttcagcatcgcgctgatctccggaccgccgccgtgaactaagaccacattgatgccgaccagctgcatcagcacgatatcccgcatcatagcgtccttaagctcctcgttgatcatggcattgccgccgtattttaccacgatggttttacccgcccatttttgaatatagggcaatgcctttaccagcacgtctgcccggtcctgaatcggaatttccataactcgtcacgcccattctatctaaaaatatcatacgaaagatctatgtctttttaattctttcactccagcgcccataaaacagtcagccgtcgtatattttatttaggtgcggtaatccccgttaattttcacataatcataggtcaagtcacagccgtaggcctccgcgtcaaaggaaccgtccttcaggtccaccaaaatatcgatttccttttccagcaggatctcctttgccttttcctcgctgaactcgatgcccgcgccatccacgcataccgtgacagcgccctttgccgagcggaacgccacatccaccttgctgatatccacatcacagccggaatagccgatggcgcacagcacccgtccccagttggcgtcggcgccgaacatggcggccttcagcaggctggagcagatcaccgatttcgccacgcctttagcgtccgccagcgttttcgccccgctgaccttacagatcagcagcttggtcgctccttctccgtcgccggccagcagtttggagatttccctgcatacaaataccaggccttccagaaacgcttggtaatcctctgatttttccgtaatctcctgatttccggctttccccgaggccaaaaccgccaaagtatcgttggtcgaggtgtctccgtcaacgctgaccatattaaagctgacatccgcggcctccttgaccgcgcactgaagcatttccggagaaacggcggcgtcagtggtgaggaagcccagcatggtggccatgttggggtgaatcataccgctgcccttggcgatgcccccgatggtcactgttttgccgcctacttcaatttggacggcgatttcttttttaacggtatctgtagtcatgatggcctccgcggcgtcggtgcctccctccttggagagagccgacgttaggaccgccacggaattttcgatgggctcgatgggcagcacctggccgataaccccggtagacgccactaaaacatcctcctggggaatgcccagctctttagccgccagcaggcacatcctctccgccttttccacgccgtcggcgttgcaggtgttggcgttgccggagttggcgataaccgcctgagccttgccgtttttcaggtgctgctgggtcaccagaatacaggcgccctttaccaggttctgagtatagaccgctgccgcagagcaaagagtatcagcataaatcagcgccagatcccgcttggatttatttttacggatgccgcagtgaaccccggaggcggtaaagccctgagccgcggtcacgccgcctggaatttgtttgattggcataattgttctctccttttcgccctgattaaaatgccgggggcaccaatgccagccccgaggcttcctccaagccaaaaatcaggttcatattctgaatcgcctggcctgcggctcccttcaccatgttgtcaatggcggaaatagcgatcaaattgccgcaccgggtatcgatatgcagggaaatatcacagaagttggaatacttgatattatggatgtccgcgttcatgccgtctggcagcaggcggacaaaatactcgtcctgataaaaatcttcataagccttccgcacctgcgccttggtgacatccggcttcagccttccgtagcaggtggataagattccccggttcaccggcagcagatgaggcacaaaagtgacatgcaccttttgcccagaaagccgggacagcgtctgctcaatctctggagtgtgccggtggctggccaccttgtaggcgtgcaggccctcgtttaaatccgggtaatgggtgccctgggaaaggccgcggcccgccccggtcacaccagatttggagtcgatgatgattcccgtcagctcaatcaagccatttgctaccgccggcgccagagccagcggagccccagtcgtatagcagcccggattggcaatgaccctttttccgagaatatccttacggaacagctccggcaggccgtaaaccgccttttcatggagctccttgtcctgataggttccgccgtaccatttctgatattcttcctcgctgtccagccggaaatccgcgcccaggtcaataaacgccttgcctttctcgtcacaggctttggccagctcctgggaaagcccatgaggcagagcggcgaataccacgtcgcatttgtccaccacctggccggcggtttcacaaaccatatcgcacagattgaagtaggcgggatatacctcactgattgcctttccctcaaagctgacggagctgatggccgtaacctccgcctccggatggctcagcagcagccgcaccagctcagagccggcgtagccggtggctccgacaattcccgcatgtatcataaataaatccctcttatctatcgtttgaattttgtgtagtgggagcagacagaagcagcacgcagcgcctgtcccgcggccgccagtcagaagggctgtcggcatggttcaagcgcccggcttgggttcatgccaggcggcgcatagggcggccgccctttatggttttcgtccgcgcgccttttatcagctttcagaggcggcatcctcccgaagcaggcctcgcacccgctttacctgagccagcacgctttccctcgcaggtcctcccagcacgcttctgccgttgacgcagttttctaaagaaatggcctcatagacgccctggtcaaaggcctcgcataccgtttgatattcctccatcggcagagtttccagggtttcccccagttcaatgcaccgggcgaccagagttccggtggctttatacgcatcccggaagggtaagcccttttttaccagatagtcggcgcagtcggtggcgttgatgaaccctccggccgctgccttccgcatattctcaggaagcaccttcatggtggccagcatcggggtaaaggcggtcaggcacatcttcaccgtttccacgctgtcaaaaatagcctccttgtcttcctgcatatccttattataggccaaaggcaagcccttcatgaccgtcagcaaagcagtcaggttgccaaacaccctgccggatttcccccggaccagttcggcgatatcagggtttttcttttggggcatgatgctggagccggtggaaaaggcgtcatccagctctacaaatttaaattcccacgagcaccagaggatgatttcctcagagaaccgggacagatgcaccattacgatggataaggccgcagccagctccatgcagaaatcccggtcggaaaccccatctagactgttgcgcatagtatcagaaaatcctagaagccgggtggtgacagtccggtcaatgggataggtggtagaagccaaagcgcctgaccccagcggattgacattcatacgctttaccgcgtcctgaaacctgctcaaatcccgaaggaacatctcggcgtaagccatcagatggtggccaaaggtgatgggctgggcgcgctgcaggtgggtatagccaggcattaccgtgccggcgcaggcttcggcctggacgcagatagtctcagtcagttctttgatctgttccagcaggccctgggcctcctctctcagatagagccggatatccagcgccacctggtcgttccggcttctggcggtatgcagccgtttaccagtatctcccagccggcgggtcaattcaccttccatgaaagtgtgaatatcttcctgggtcatgtcgatttccagcgtcccggactgtagatcctttaaaatcccttccagcccttggcagattgcgtcagcctcgcttttgtcaatgactccgcactgtcccagcatggtggcgtgggcgatagagccctcgatatcctgccgcgccattttacagtcaaaagagatagaggaattaaaatcattggttttttgatccagttccttttggaaccgtcctgtccataacggcaaattgattcaccctttccccaggctgagcctggactcatttcgcgctcggagggggcggtatccattggccttctcccacgcgccgctgtctgttcgcttccttcagctgtttccactaggctgagcctggacccgcttcgcgctcgggagttggcggtatccattggccttctcccatgcgccgctgtctgttcgcttccttcagctgtttccccaggctgaacctggactcatttcgcgcctagggcttggagatagctccctgttttctaccgcggacgcatcaagaagcaagctcgctttccgcacccaaaagccagggcttacctaataatcacgaatagggcggacagcgtccgccctgaatcctggataaatttattgctgctgatttttggccttcttcatcgcctgaaccttgattggcaagccaaacagattgatgaagccggcggaatccgcctgattataaacctcatcctcgtcgaaggtagcaatctcctcatcgtacaaggaataaggggaagtaacgcccgcgtcgatgatatttcccttgtaaagcttcagcttaacatcgccggttacggtctcctgagtggaatccacaaaagccgaaagggcttcccttaaaggagtaaaccactggccgtagtaaaccagctccgcgaaccggagggctacgccttgcttataatggtaggtgtccctgtcgaggcagatttcctccagcttgttgtgggcgtgatacaaaatggttccgccgggagtttcataaacgccgcggctcttcatgcctaccagccggttttccaccatatcggcgatgccgatgccattggcgccgcccaactcattgagctttttcacgatggaaacgccatccattttctcgccgtcgatggcggttggaacgcccttttcaaagtgcagggtcacgtaggtagccttgtcgggagccttcatgggagaaacgcccaattccaggatctcgtcatatttcggctcgttggccggatcctccagatccaggccctcatgggaaaggtgccagatgttcttatccttagagtagttggtttctctggtaatatttaagggaatgttgtgggcttcagcgtattcaatttcttcctcacggctcttcagattccagattctccagggagcgatgatcttcatttccggagcgaaagccttgatagccagctcaaaccgcacctggtcgtttccttttccggtacagccgtggcagattgcgtcggcgccttccgctttggcgatttctacaattcttttggcgataatcggacgggcgaaggaggtgcccagcaaatatttgttttcataaacagcgccagccttgacggtgggaaaaatgaaatcctccacaaacacctggttcaaatcctcgatgtacagcttggaggctcctgtctttttcgctttttcctccagcccggaaagctccttaccctggccgacatcggcggcaacggcgatgacctcgcagttgttgtaattctccttcagccacggaataataatcgaggtgtccaatccgccggaatacgctagcactacttttttgatctctgccattttaaccaactcccaaaatatttttattatggctgatgttttcattcaacgattcctattatacaccctttatgcaaaaaatcaagagttttatgcataaatattcacacaattggaatttggtgacatttccacaaaatcgaaagaaaaatcggctccgttcttattttttatgatattaaaatgatgcctctttcatatccgccgcaaaagctacatgcatataaataaatttaaatgttataaaacactttttcccgtccaaaatcagcagaaaacgcgaagcttttgtggtaccataatcttctaatttatggtatcataaaattgtaaggagaaaaagcccagcaggctattattttataaaggagagattgctatgtcttttcaagaaatcaatgtccgtgagttttccatgaagccctttaagatgatcggcgaccagtggatgctggtcactgccggcgatcaaattaagtacaacacaatgaccgccagctggggcggcataggcgtcatgtggggcaaaaacgtggcggtaacggtaatccgtccccagcgctacaccaaggaatttgtagaatcccacgactgctttaccctgagcttttaccctgaagaatacaaaaaggcgctttccctctgcggcagcaaatccggccgggagatcgataaggcggaggagacaggcctgattcctgttttcgaccaggctgctccgtactttgaacaggccagcctggtgctggtatgcaaaaagctgtacgcccagccgatggacccggccgggtttgtagacaaagccctggacagccggtggtatccggataaggattatcacaaaatgttcgtaggagaagtcatcaaggtgctggtgaaggaatgagccgcgccgtcatcgtcaccggggcttctcatgggatcggccgggccgccgctgttctgtttgccagaaaaggctattccacggtgatcaattaccatcgttcggaatcagaggccctctctctagcccattccctcacgctggagggctgctctgttctcgcagtgcaggcggacgtttccgaccctgtccaggtaaaggagctgtttcaaaggacagaggcggctttcggcgggctggaaattctagtaaacaacgccgggatttctcagacgggcctgttcaccgactgcacgccccggcagtgggaccgggtcttcggcgttaacgtcaaaggggcttttctgtgcagccagcaggcggcgtccctgttcctcagggagcaccggggaaaaatcgtcaatgtcagttcgatttggggaatcaccggcgcctcctgcgaggcggtgtattccgccagcaaggcggctctcatcggcctgaccaaatctctggctaaggagctggggccctccggcattcaggtaaactgtgtggctccgggcgtggtggatactaaaatgaacgccggcctcactccagaggagcttcaggcactccgggacgaaacccctctgggcgtcatcggcacctcggaggacatcgcccaggccatctggtttttagcttctccggaaagcgattttattaccggccaggtgctcagtcccaacggcggtttcctgatttgaccgcctgcgccgtgtttagtccggccgcttgaaacagcctttgagattccttgaaaatcccggctgtaaaaaagccgccgtcagaacaggtgccgggaggctgcgaatcctattattttttgtttcgccgcaatgttttttatggaaccgcgccgtatctgtaatcgttagaatgacggcacggcgcggttcattttttactgtgccttacgaaaaatttttgatggcaaaaattcgtaacgggctgcttaattttggagaaaaccgtttcttttcctaaaccacttaaaaatcatcctgttgtaaaaacctccggctgggccggaggtttttctaaatcgcttaaaaagcggctccacgccgcacgtttaaaatattgctttttaattcgctgccagatcccttgattttgcccgccgctctccgtcccagtcttttccggcagttttatgacagtgaaaccttcagatgcatatgctcccgggcctgatgccatttgaccggatagcccgcgccatgggagcagaaaaccgaatccggggtgtattccaagtccgcctccgggtcataggaaaaccgggctgccagctcctcctggttctggcacggctcataaccgtcgaaccggaagctgaacatcccttttcctttggtaaatgccgccagctcccggctgtaatttataaaacccgccgccggccctcgtccatttaccgtcactcggttttcctgctgccgcggaggctcaaagactccctgtagccgctggatatcggataaaattcttcccaactgcctgctgtccgcctgaatccggaaagcgtaccagggctccagcaaaatactttccgcctgcatcagcccctggcgcagagcccggtagacggcttcccgaaagtctccgccctcggtgtgtttttcatgcgctttccccgccaaaagagttacccttacatcggtgagaggggcgccgaccagcacgcccctcaattcccgctcaaagacatgggttcggatcaggttctgatagctgcggtcaagctggtcgaaaggacatttgctttcaaaggtgatcccggagcctctttttccgggagaaagagccagatgcacctccgcgtaatggcggagcggctcgaaatggccgcagccaagcactgtgtttccaatggtttcccggtaagaaacctgacattccccgaaccgtattttccgccggaatctctccgccatcagctcctgaaggatttccagctgtaccgtccccaaaatatgcacccggatttcctccagccgttcctcccaggaaacattcagcagcggctcctccgcctccaatagtttaaattcttccagcacggttttcgccggcactccttcgccgtattccacctttgccgttaaagccggagtggtttccagcctcggacggcagggagcttccccgatctgctcgcccggcttgaccgtcaggccggttactccgcacagagacccggccgccgccgtttttccagtctggaatttcaaaccctgataatgccgcagctcgtcgattttctgcggcccatccagagtagcgacctcgtcctttaccgttaacgcaccggacagaacctttaaaaagctgacccggtttcccttttcgtcgtgacgcacctggtacactcttccgcaaaagggctcgtccctttttgcctcatattccgttttcgtcagccggtccatctgctctaagaactctatcacgccctggtcattcagcgcgctgccggaaaaacagggaaacacccggcggctccgaatcagctccgccgtcctgccgtaccacagcttttcgtcatagccggtctccaagtagcgttccagcaaattctcatccagggccgccaggtcctccgccgcagcctccagcccttccgccggaaaccagtaaatatccggcgaaagctgttcccggagctccgccagagatttttctccgtccgcccccggctgatccattttattcaggaagaaaaataccgggatctgatttttttccaacagccgccagagggtcgccgtatgcccctgaaccccatcggcggcgctcaccaccaaaacggcatagtccagcacccccagagtccgttccatttccccggcgaagtctgcgtgtcccggcgtgtctaccaggtaatattggttttctcccagagaaaaggccgcctgcccggaaaacacagtgatgccccgctgcttctcaacggcgtcggcgtctaaaaaggaatcccggtggtctacccgtccctttgcgcggattgcctttccatggtacagaaccgcctcggacaaagtggttttccccgcgtctacatgcgctaaaattccaattgtttttctcat

SEQ ID NO: 191 - DNA, 29863 bp, unidentified
  source 1..29863: mol_type = unassigned DNA
cgctacattgaaaaggtcgcgatcgcctgggcggaagccgggatcacgacacctgcccaggcagaaggtcatatttcccgttatgacaagaacgtctattccattatgaacgccctcggcaagaccaatacccccgcacgcaatgagctcgcctatatccgccgctggacagaggaattttgctttgagctcgacgttattttagaagcctgcggacgcaccgtcctggctaccgacagacaccgcttcgcctatgcagacagcatcctcgccgcctggtacaaggcaggcgtccaccatgtcgcggacatcgccagactcgacagctcctatcagaaagagcgtgcatctcgcccggcgcgcagcggttctacagcagaatataacagtttcatgcattccagctatgatttcgatgcgcttgaagaggcgcttttgaagcagtaaggaggtttgatgtggcactgactgtttcccaatacaattccatcctgcggcaatacgaagagcatcagacccgcaaccgccatctgcacgatcagcggctgcaccatatttatgagacagtccccggctatcaggccctcgacgaagccgttgcatccacctctgtcgcacagggaaaaaagatgctcgcaggggatacaaatgcgcttgcacagctcaaagaccagctcaaagaccttgcacagaaacgtgccgcccttttgctggaaaacggctacccggcagattttctcgatccgatctacgactgtcctgactgtcaggacaccggctatgtgaacggtcaaaaatgccactgcttccgtcaggcggagatcgcgcttctttacgaacagtccaacctgaaacgaatgctcgaaaaggaaaacttcggcacgctctcctattccttttttcagggagacgaactgacttcctatctccaggctgtcgaaaaatgtaaaaatttttgcacaaattttaaaacgtcctaccaaaaccttttcttttatggtacagtaggtacgggcaagacattcctgaccaattgcattgcaaaggaatgtatcgagcagggctgttctgtgctttatttcagcgcagcatcccttttcgacttactcgccaggaacacgtttgactatagggcacgggaagagctttccgcactctgtgcggatctctatggctgcgatctgctcgttatcgacgatctcggcaccgaaactgccacggcagtgacgctctcccatttctttacctgtttgaacgaacgtctgctccggcagaaatccgttatcatttctaccaatctttctctggaagattgcagaaaccgttatcaggaccgaattttttccagaattgccagcaattttgaattctgtaaactcaccggccctgatattcgtatgtgtaaaaaggtatccgcagtctcgggcccggtccgctgacacagatatccaaaatattaacttttaccttcagaaagtgaggaacttccatgatggaacgtgaagaaaccagaaatctcgaaaccattccggttggctccctggggattatcccgttaaggggctgcgaatcccttgcacagagagttgaccagtatcttgtaagatggcgcacccagcgcgagagcgagcacaaagacagccttgcctttgcaggctaccagcgtgactcctacattttaaaaagcaaggtgccgcgttttggttctggcgaagccaagggcgttattctggaatctgtccgcggtacggatctgtatctgctggttgacgtaaccaactacagccagacctattccctctgcggtcatgaaaaccatatgtctcctgacgatcattatcaggatctgaagcgtatcatcgctgctgtcggcggtaaagcaagaagaattaccgttatcatgcctttcctttatgaaagccgccagcacaagcgcaccgcacgggaatccttggactgcgcactcgctctgcaggagctggtaaagatgggcgttgacaacatcatcacctttgatgcccatgacccgagagtccagaactccatcccgttaaacggtttcgaaaccgttcaggcttcttatcagttcatcaaaaacctgctgcgcaccgagcccgacctgcagatcgattccaaccacatgatggttatcagcccggatgaaggcggtatgggacgtgcaatttacattgcaaacgtactcggtttggatatgggtatgttctataagagaagagactacaccagagttgttaacggacgaaatccgattgttgctcacgaattcctgggtaccagcgtagaaggcaaggatatgatcatcatcgatgacatgatttcctccggcgaaagcgtactcgaagttgcatccgcattaaagcagcgcggtgcccgtaagatcttcatctgcaccaccttcggtctgttcacaagcggtatggagaaattcgacaaggcttatgcatgcggcaatatcaatcgtgtcctgaccaccaacctgatttatcagcctgaagagctgttaaaacgggaatggtatgtcaactgtgacatgagcaagtacgttgcttatctgattgataccttgaaccatgatacttccatcagcgatctgctcgatcccaacgataagatccaggctgctgtcgcaaagtataaaaaaggactggctttagataacgacgactgagccagataaaaaattgagctgaacaatattgttcagctcctattttttctatgcaaaatgtctctaaatggaggatttatgaaaatcgtagtaattgacggtcagggcggcagaatcggcagtcttgtgactgcccgcctctgtaaagagcagctgcccgactgtgaactgtatgccatcggcaccaatgcaaccgcaaccgctgccatgctcaaagccggggctgacttcggcgcaaccggagaaaatcccgtgcttgttgcctgccgggatgcggattttatcatcggtcccctcggcattttgtccgcagactccctgcttggggaagtgacgcccgccatggcggtcgccgtcggacagagccatgcccagaagcttttgcttccggtcaaccgctgcaacaaccacatcatcggaaccgccgatctgtccgtatcccagctgatcgacgaaacgatcacgtttcttaaaaacagtctttaaagcaataaaatgcgcgttttacagacatttcattatcgcaaaaactccggggcaagataccgagggtatcctgttcccggagttttaattttttcttttatcctacaattctccgaattgtcagaatcggcttataattcgcatatccgtacttaattcctgttctcgctgtgctggcatgcacgattcgtccgccgcccagatacagcgccacatggcctgcatagcagacgatgtcgcctgcctgagcagcttcataggaaacctcgcgtcctgcacttctcatagcagcagagtttctcggcaggccgtatccgtattgcctgtacactgcccagataaatccggagcagtccgcaccgtttgtcaggctcgttccgcccgctacatacgggtttccgacgaactggcaggcatacgccgcaatatcgcttccacttgatccgctcgcaggaggaacggtctttaagccgccgcccgaagaactgccggagctgctgcctgaggaagaggagctgtcggagctgcttgatcgattggagctactgtcagaagagccggaatcgctgctctttgcagctttttcttccgcctttgctttttcttccgccgcttttttcgcagcctcctcggctttccggcgctcttcctcggccttgatgatggcgttttcttcctcatccagccttgccagctcggaattctgctgtttgattaacgctttatatgccgctgcttcctgcttcgctttcgcaatctgcgcatcgaaatcattcgcctgggactttttctcatcgatcatctgctgcatggaagcctgttcctcttccagctcatatttctgcgtttccaggtcgctctttttatcttccaaatcgttctttttctgtgcaacctcttctttaatcaggatgtagcggttgagcatctgtttatcgtactcatacagcttctccacataattcgcctgattgagcatgccgctccagttggaggcgttgctcaggatctcgatatagctggtatcgcccttttcatacagataacggagacgcttcttcattgcaagatactgtgcatcctcctgcgcctttgctacatcatagtcctcctgcgcctttacgatctgcttttcggtatcactgatctgatcctgcatcaggcttacgctggcaatgacctctaccagctgggaatccagctcctgtatttcttcctccaaagcgtcctgctgcccttccagactgctgaccttgctctggctctgcttatactgactctgggtgccctgctgctcgctctttttctgctcccgttcttgctgaatttcttcccgtgtctttgcctgcacacagacaggctgtattccgatcgctgccacaagcataactgctgctatttttttccagtgatgatttcccatccgtatcttccttttttgcattctagtacatcgttttcactttatacagtatacaacaaaaaaagagcgggataaacccaaaagttcatcccgctcaaatcttttatcataattcgcagttctttaccgttctcgggaaaggaatgacgtcgcggatgttgcccataccggtcaggtacataacgcagcgctcaaatccaagaccaaagcccgcatggcttgcggagccgtattttctcagatccagatagaagccgtaatcctctttgttcagcccaagctcgtccatgcgctgttccagaagctcgaggctatcctctctctggctgccgccgatgatctcgccgatgccgggaaccagacagtccatagcggcaaccgtcttgccgtcctcatttaacttcatataaaatgccttgatttccttcggatagtctgttacaaataccggacgcttgaacaccttctccgtcagataacgctcgtgttcggtctgcaggtcacagccccagtatactttataatcgaattcgtcgttgtgctcttccaaaatcttgatcgcttcggtataggtcacatgtccgaaatcggagttcaatacatgattcagtctttccagaagtcccttatccacaaagctgttgaagaagttcatctcttccggagcatgctccagcacatagcggataatgtatttgagcatggactctgccagtaccatgtcgtcctttaagtctgcaaatgcgatttccggctcgatcatccagaactcagccgcatggcgggtggtattggagttttctgcgcggaaggtcggtccgaacgtataaatgttcttaaacgccatcgcataggtttcgccgtttaactgtccgcttacagtcaggttggttggcttgcagaagaagtcctgggaataatccacagtaccgtcttcgtttttcggaacgttgttcagatccagggttgtaacctggaacatctcgcctgcgccctcgcagtcgcttccggtaatcagaggagtgtgcacatagacgaaatctctctcctggaagaattgatgaatcgcataggcgatcagggaacgaactctgaacactgcctggaatgtattggttctgggacgcagatgcgcgatagtacgcagatattcaaagctgtgacgcttcttctgcagcgggtaatccggtccgcatgcgccttccactacaacctcgtctgcctgcatctcaaagggttgttttgcaccgggcgtctctacaatcgtacctgttacaatgacagctgctccgacgccgattttggcaatatcggcataattatccagcttgtccgctgcgtatacaacctgcagcggttcaaaaaaggtaccatcatttacaaccaggaatccaaaatttttagaatcccggttgcttcttacccagccgcctactgtcaccttctggccggcaaactgttctttttctctgaataactgtcttacacttgtcagttccatgctctctctcctcactcgcctcgtgcgtcagctgtgcctcggcttattctgcttcggtcgctgtctctgttgttgtctcggtttcagcttctgttgtctcttcggtcgtttcctctgtggacgcctctgtttcggttacgttcgcattctcaaccagatacttggttaccttttcagacatcagatattctttgtagccgcgcaggtcaccaaccgcttcctgataagcgtctacggaatcataaccatattcggatgcgctgctttccagatctgcctgcagctcttcatcggttaaggtcagaccttctttttctgcgatcgcctgcataaccagaatctgctctgctgcgctttgtgcagatttctgaagctcgtcttcatattcatccgcagccaggccgtagctgtatgccataaaggtctccagatcgattccatacatgcttgcagtagtggtcaggttcttaaccagacggtcataatagcggcttaccatctcttcgggagtttccttgaaggttgcatttgccgttaccgcctccagaacatttctttccagctctgtttcctgctggctcttggcagagctcatcaggttatcgtaaacgtactgacgatattcttctactgtgcttacgccgtcaatattgcgggctgctacaaaagcatcgtccagaaccgcgtcagtttcttcataaacatgatttaccgttaccgtgaatacaacgtctgcaccggcaaggtctgtattgttgtaatcctccgggaaggtaaggtttaaatcctttgtctcatccttcttcatgccgatcacgccgtcttcaaaaccgtcgataaaggtattggagccgatggtcagctcgtagctgtcggaagaaccgttgtcaaactctacaccgtcctttttgccgacatatttgatatcaacaacatcgccatcctttacggcacgatctacttcttctttatttttgttgctgtccaaaacactctgaatgtactgatccaccatctcgtcggttacttctgccctggtaaccgtaacatcaacgcccttgtaatcgcccagctctacaaagtcgccaaggttgatgccatccagataagcttcgtccgggtataccttggtttcgctttcggtttcagttgctgcttctgtctcagctgttgtgctttcctgtacagttgtctcctgcacatctgtcttgccgcagcctgccagcatcatggcagacagagacactgccgtaacggctgtcataaattttttcataaattgatctcctcatcatcttacggacataaaatccatagtaaatagaattgcaatatcctatatattatcacacttggtgggctgttacaagaccggagacagcagtctgctgatttgctccttaaaccggatccagacagatctgctcttgtacatttcctttgtgatccgcgtacagcactttaagtcttcccggaaaatccgttccatttcccctgcgatattctggtcaaaaatcatggcattgacctcaaagttgagttcgaagctccggatgtccatgttcgctgttccgtagcagcacgcctttccgtcaatagacaatccttttgcatgtaaaaatccattatcataggtgtagcagtttgcccctgccatgatcagctcgccgacataggaaagtgtcgcccaatacacaaatggatggtccggcttgcacgggaacatcagattgacctccacgccggacatcgttgccatcagaagtgccgtctggatcgattcatccggtataaaatatggcgtctggatataaatgctcttttttgccttgtggatcagccgcaggtaattgtcccggatactctggagttcggagtccggtccgctggaaatgatctgcattttgacattgccggctttttcttccggcaggatgaaatacttcggattttcaaacagattctctctcgctgcatagtcccagtcctgaatatagcgcagcaaaagtccaccgactgcgctgccgcagattctcagatgggtatcccgccagtgcccgaacttcggatccagcccgatatactctttgccaatattaaagccgccgacataagccacttttccgtcgatcactgcaatttttctgtgatttctgtagtttacacgcagatgcagtctgccaaacagagccgggaaaaagaccgcaacatggatgccctgcttttccatttctttccaaaagtgctttccaacgctccgacagcccatcgcatcatacaagatccgaatttctacaccctgtgccgctttttccagcagtgcctcccgaatcctctggaagagcacgtcatcttttatgatgtaatattgtaaaaaaatataggattccgcatttttaatgtcctcgatcagagcatcgaatttgtcgttgccgtcggtgaaaatctctaccgcattgtctccggaaatcatgcatccggcactttccaggttaaaaaagaccagatccgaaaaatccttcaaatccgggttttcctgctccagctcgcggcttttgacgctgtattcctggcggcgcaccgcatcgtttatctgctcctcgattcctttgatcttgaacatcttccgcttgtgcatgtccgtcccggcgagaagatacattaaaaatcccagacccggcagcacattcaacgccagtagccacgcccacgctgattttgcttcctttctctggaagaaaataataataatcgcaagaaccagattgatccataccatatgtgcccatgtgtagcggaatacttcctgaaatgtttgccaaaactgcacccacgtcgtcattactgcctgttccttcctgtcagcagcgccgaaggcggcgctgtcctcattcaccaacgctcgcggactcgcgccccgcgcttctttgcctgcttcgcaggccgtccgctcgctatccgcacgagaaaaacgttactgttcacccgcgccattcgcaaaaccgcgtcttcggcgtcgcttgtttttctttcgtgctggatacattataccccaggtggctattaacttcaacaaaactccttgtacaataccgtaaattctgctagaatgttctataagaatgctaagcggacacaccgtacagacagcgccgctgtgcagtacaaagaaagaggaggattcaccactatgaaaacctgggcagtggtattgctggtcatccttgccattctgatcgtcgcagtcgttgttctttattttcttggaagaaagatgcagaaaaaacaggaagaacagcagcagcagattgaagcctataagcagaatgtgaccatgcttgtaattgacaagaaaatcatgaagctcaaagaagccggacttccgcagtcagtcatcgacaatacgccgaagatgatgcgccgttccaagcttccgattgtcaaggcaaaagtcggtccgcagatcgttaccttagtctgcgaccagaagattttcgacctggttcctgtgaaaaaagaagtcaaggcaaccgtcagcggcatctacttaacaagtgttaaggcagtccgcggaacgctggtacagcccgagaatcagaaaaagaagaactggttcaagagaaacatcgaaaaactgcaggaaaaagcaggcgcaaagcctgtaaaataaattcgttacagttcactcgtacctttttgtaagcagatttcatgctcgcatgaaaatctgcttacaaaaaggtacggagggagcgccactttatgagcaaaaatgatctgcgaagcagcggagagcgtcgaagacgcgcttttgcgaatggcgcgagtgaactgtaatataaattccgaacgcaaaacgccgtagcatcctctcaatagagattgatgttacggcgttttttcaccccactccccgcagcttcatcgtccagccgtgcacgcggcgcacggttttgggcgcaattgtcagaagcgtcagataggttctgctctttttatccagcagcggatttttccgcgtatccgaaaaatgcccgcgcagatactgctttaccgatttgtaaaacacatccgtatccaccatccgtcccaccgggatgtgcagcagataatccaggcgctgaacgagtgcgaaacgcaccgcatattcccgaagctccgggtagcgctcccgggtcagctgctccatataatccgcattttctacgatatcctcaaacactctcgaaaaatcgtttttatctttccggcgcgtattgctcccgatccggtaaaaaacatgatacagctgctccggcaagatccgcaccctttcgccctcacataaaagctcaaccagcaggcggaaatcctcatttaactttccctccgggaagcggtgaccttcaaacaggctctttttgatcagcttcgtacagaacgagcaatcgccctgatgcagcagcagcgttttcagaaaatcttctgccgtgcaggtaacttcctgttccggcggcgtacagacgtccggtcttttgtggtaatcctcgtcgatctcatcccgcgaagcctgcgcaattgaagtgcctgcagcggtcgcagcttcatacagcctttcatacatctgcggctcgatccagtcgtcgctgtccacaaacccgatccattttccctttgccatactgattccaaggtttcgcgcactagaagaaccgccgttcggcttatggaaaacccggattctgtcatctttttcggcaagcaggtcgcacagctttccggttccgtccgtcgaaccgtcatccaccagcaggatctcaagatttttccaggtctgggcgcagatgctgttgacgcatcgctccaggcagtccaggatattgtaggccggcacgatcacgctgatcaggcagttttgttctgttttattctccatccaatgttccctcattatagctccagcgtgcggaaagtttcggcgcggcagagagcggtccatcctcccactccggcagctttccggctttccagccttcataaaattccaggcagcgctgcgccgcacattctgcattccatttttctgtaatcgtccggtatgcctcttttccaagcgctgtgatctgctccggctgcgcgcacagctccaataccgtccgctcaaaggcttcataagagccgtccgggtagcttttgccgtttacgccgtcctcaatcaaaaacggaaccgcgccgatctgacggtttgccaccacacaacagccgctgttcatcgcctcactgactactgcaccccagccttccagatagttgcttgtaaacacatgcagctggcagcgtttcatcaggcttcgaacctcctgcggctttaaaaatccatgaaaaacgattttctctgccactccgagcgctgctgcttcctgcttcagcgcctcttccatcggaccgcctcccgcaaagtgcagctcaaacgaatacccctgttcctgtaattttccagccaacttcactgcaaactccgggtgctttaacgaaatcatccgtcccgcccagacgatttgcagtttatccgtattctttttggcaaacaattcctcctgcggacagcgcagcgtctccggaaaatagccgaatttcagctttttcccgggataagccccgatcagtgaaaaatccgacgccacatacgcgccgcagcacaaaagccacaccggctggtttcgaaaccggatatgttctttatattttgcaagcagccccttcggagagatcgctttccactgtccctcgcggtaaatccgctcgctcacccgaaacgtcagctttcccgaggaaagccgcggtaaaaccagatccagccgcttcgtccagcctgcaaacaccagatccgcttcctcgatcagcttccggcagcgttcttcctcccgatccgcccaaacaacatatggcagagtcgctgcatccagtccccagcccatcgcaatccgttcttcttccatcggctcggtctggatgaaatggtaatcgtcccccagttgttcatacagtgcgttggaaaacggaatctgatgatgattgatataattggaaataaaaacagccttcatgttttcctccattcccgctttcctgctccggtcagcagcttcgttcattcgatgctttgataaatttctatgagtttttgataattgttttcaccgttgtaaagcttcgccgcagtctcccgttccgaagccgacaactcctttgccagctgtttatctgtcagaatccggctgacgcacgcggcaagctcgtgaacatttcctttctcaaacaacagaccacttacgccgtcttttacaacatccgggattccgccggttctgctcgccgccacgggcacgccgagaagctgcccttctgccacggaattcggggaattttccaccgcagacggacacacaaatatctgcgcggacaaatattcccgcttcatctcctccgcagaaagatttcccagcacacgcacttttccttcgaggcgattcttcaaaatcagcctgcgcagatattttccatatgccggaatcttgattctgctctttattccgtttacgccgagcacgctgatgcccgccaccttgatatgcgcctcgggacagttttgcaggatttcctgcatcgcctgcaatagatagtgaaagccctttaacgggtaatctccctgactgatgaagatttctccgggcacagttttttcgatctcccagcatccgctgtagaactgcgggcgcattgtctcgttcatggtatgataaacaagggatggatttatctccaaactgatcgttttatcgaatgtcgtccgtcccgtcacatgtccgactgacaacaggagttttttctcgttttccgcgcgctgataaaacttttcctgctgctgccggatgctgtccttttttaaaatatctcgcagtgtcctgctgttctgtacattttccgggagatctgccatgtagttgtccgcacagggaatacaaagtccctgcaagcccacaagcgtccgctccggtctgtgaaatactttcgcacaggcatagccatgcgggaactccgtcccgaagatatgcaccagatccggctgaaagtcctctaaaatctgcaaaaaacgcgcttccatcgcgctgtcatagcgctccgggtgctccaaatcctctgcaaagccatagcaggcgacttcttttttatagctgccaagctgcagacgctgcgatagctcctccctgcccggtgcaaccggaaatgcgatgccgagcgtcagtgcagccacagtttcggctccctgctgccgtccgccgggcgatgcagcgctgtctgtcacgtccgctgcgctcagctctgcgccgttctctgtctccagataccgccccagtatcccggacagccagccctcccgcacgctatactcctgcgaaagcgcctgcgcgattaccgggagcatgatattgcatacccataatactctcatttccgattctcccccggttcgtccttatggccgcaccttccgtaaattttcgccttgatcccgttgtaccactcggaatatttttcgtcctctgcaagctttgtccgaagcggtgccagtgtcagaagcatcagcagcttataacgcagcgccttgtcgcgtccgagatagcgtttcgtgatttcggcatgctctttttcggaaatccgacggttctcccttgtctcggaaaagcccccgccctcgtaatccgcaacaatcatctccacataaactgcttccgctttccgatcataaatacagtacagaaaatgctcataatctgcgcggacacggtattttacgtcataaccacgctctgcaaacagacggacgtcgtaaaagcaaacctgatgacagggcacatttctgtaacaggtaaaatcattgacctccggtgcagaatagatcacgctgccccacgcctcatgatattgatttccataaaaaatccgctctttttccttatgtcccaggccttccccgtcggctcccctgccgcgcttgcgctcaatcacagctgcaagccgttccagcaccatatcgtcgtgtaaaagatctccgcaatttaaaaactggacaaactgaccggtcacataggacatcgcctgattcatcgcgtcataaatcccactgtccggtcttgtataaacccggattctgctatccgccggaagttgttccagggagccgtccgtcgaaccgccgtcctttaccacaatttcataatttccgtatttctggttcaatacgctctgcaccgtcttcaacagcttttcgccggggtttaagcatactaccacaatgctaaaagaaatctgcgccattgatccactccttatccgtaaaaatccaggtcttatagggaagcacgcgcatcccgcttccggatgccgtttttaaaaaccacaaaaaataccccagacatacgatccccacaagtgctgttaaaatatttttccgcttccggttctccacgcagccaagcagtcccggaatgagcagcagctgcggcgtaatcatataataggacattctcgataccagtggcaaaaacgatccgcaggtataaaacagcagtccgaaaaaatttaatttcaggcagaaacagttctgctccttttccattccacacctaccaaccactgccgccagcataaaaacgagcacgcaccggaggattccggacgcattcgctttcagaccgatatcctgtgacagatatacggtgtccctgtatgtaggataccacgtcagcgccagatttaaaagcggacgctggaaaacaaaaccgatccctccgatcacagtcagcgccggcgcgatccattttttccacggaagcacagccaacaaatacaacggaagcaccatcagaacagatttatgaaacagcgccgcaatgccaatccagatcacgaaacagccatactgcctgcgcagtacaaaccggattccatacagcgctgcggcaagtgccagataataacgcaccgtcgtaaatgtccgaaaatatacgcccagcagcatgaacatcgcgaagctctgccagaagcattcactctgctcatacaacgcctttaaaaacaaaaaagctgtaaccgcaccgaacaccgcgaataccagcagataattttcatacccggaaatcgtataaatcagccataccacgaaattgaatccggcttccgtcaccacatacgcctgatcggttcccgcccagatttcgtggaaattttcgacatatttgccgtaatcgttaccgacctccagacgcagcgcactcacgcccgccagaatcaggaaaatagcagcgagacacacgatgtcgaaggcgcggcgtcgggaaacgcccgccggaaacaagccgccgccggatgatgggatgccgcgggcgcgcctgccattcccggatgccgcactctcggcggcttgtccagcgcaccgcactacaccgcctgcctcctgccccgagcgcgtccagaccgcgtccatcagccccgcgagcgcaatcgtaaccgctgtaatcagaaaataaaataccatttacagccctccctttgcgtcgcggattccggacagaagcgcttttttcgcctcatcaaaggtcagcccctccgggcagctctcagaattcatattggatttatttttcagcagaaaccgaaatcccatcaccgccgccagctttccgtacagcacatgatacaaaacgcccctgtcgtgaaaaaatttgcggtcaaagccgaaaaaccatgttgacggtctgggctgttcttctccgatttcgaccggaatactgtagactttcagcccggctttcaggcagtcgtggataaacaagctgtcctctccatttgcatatttcgcgccgcctccgaacaacaacgaataggtcagattcttttcgtgcatcttcgccgtgcgcagcgcaaagctgtatgccggataacgaccgcagttataccacctcacccgcttataaaacgaattccagtaggtaaagcggctctcctgcacgcgcacattgaataacagcatgtccgcctccggatgctgctcaaacccttcgataatccgctcagctgcaccgtcgtcataaacgatatcttcatcagaaaagaggcacaggtcggcgtccgcacgcagaagcgcgttgttgcgcgacagcccgacaccccgctccgccagatgatagcagcggatccgatgaccgtcctgcgtccattcctcgtaacggttttcgttacactgattgatgagaattgcatccgcctgcagattcattttctctgccagcgacttgacctcctgattcagggaggaaaccagaatctgcagtttcatgagccgtctcctttgtttcttgtaatcgtgcgccagttcacccgcgccattcgcaatacaatagaatgcacgctccgcggacattctattgtcatgaatcgcatcttcgatgctttccgctgcttcgcagctcctttttgctcataaaatgggcgctcccttcgtagcagtctgtaggcaaattctcatgcgagcatggaatctgcctacaggctgccacgagtgaactggcagcctacactctgtagtacgcgtgcaaaaaccgtgcgtccgcgtccgtgaggatcacgcccacaaccgcgatctcccgctgagcaagcaaatcaagggcaagtccgagttttttaatacagggtgtgttccagcgaaccaaaaggataagcggaatcttttcttcttccccaagtcccatcgtcccggaaagcaccgtgtccagcgaaatttcctgaaaagcactctgagacgctttggctctcagctgcgcatccagaagcgcaccgaactgttcatcggtctttgccgtgcggtagcccagaaccgggattgcgcagcgtttttccacgtctgagctgagcaaaacagaatcgtccagaacataccagattgccacgcccaggattccgacaagcagtccgagcaccagaccgagcgccgccgcgtttttcactttattttccggaagcaccgcctgtgccgaaacggttttccatacttcaattgccgtcagaccgcgtccctgcatcgtctgtccaaatgccgtcatcgcgcagttataggccgctgcaatccggtcggacagtgctgcgtcccctgtcgtaaagtacgccgtcagaaattccgggtcagacgcaatttccgtgctgatcgaagcctctatcacggaccgttccacatccggcagctgcaaaagcaccgtatccatcacgcggtcggagcgcatcatatccccccaggtataggcgttatattcgttgataaattcttttaaaacctcgtcgtcctcgtcgatatcatagacgatcgaatataaaacctccgaccgatactgcttcggccccatcgtcagctgccgcacaccaagataaatccccgcagcaaaaacagcgccagccaaagctgccgccagacagatccatattttatgaatacaacagagggcaaagcgtttttcgtccatgccctctttccaaaatgcttcatctcttttcagaggcattatttttcttcctcctgcacctgttttttcatggcggtcacctgcttctcgtccacgccctccgtgctgtcgggcgtaaacaggattttcaatgtcagaagcatcagcttcaaatccagccatacagaataattttcaatataaaacagatccagcttcagcttgtcatagggcgttgtattgtactttccgtatacctgcgcatatcccgcaagcccggccttcactctggtacggtatgcgaactccggcatttcttctatatattcgcggatgatctgcggccgctccggtctgggaccgataaaggacatctcgccctttaaaatgttgaacagctgcggcagctcgtcgatacgaaccgcacggataaatttgccgaccggcgtaatccgggaatcgtttttggcggcaagccgcgccacaccgtccttttctgcatccacgcgcatactgcggaatttcaggatataaaattctttcgcatccttcgtgcagcggacctgcttgtacagcacaggacctttatcatacagcttgatcaccaccgccgtaatcagcatgatcggcgatgtcacaacaatcaggatcagcgaacatactacatcgataaaccgttttgcaattctctgttctacgctcagcgcatattccctcgtcagcagaatcggcgtatcaaacaagtgcagctgctcgcttccctttaccagcacatccggaatcttcggcatcatataaacgcggatcgaatggctgtagcaatatttgagcagcacgtttctgtccatcgtatgaatatcccagagaacgaccgcgtcatactttccgacctcgcggatcaccgcatcgtacccctctttgatgttcatgcactttgcaacatgatatttatccttccgtcctgcaaatttcccaaggatatcctctaccgggcgctcaccgtgcaccaaaagcagctcccgcggaggaaacgcgcgacggtaaatcagattgcacagccagccccacagccctgcaaacaccagctgatacagcatcatcgacaccatatgccccccgccgatgataaaccagccatacatcagggacagctgcgcatagctgattacattgacgcacagaagggaaaacagctgagacaggaaaatatccagcggtttcagatagccgattttaagtgctccataagtattggaaaagaaaaagagcaatatgaaatacagagcaacaatcagcaaatgaccgtttacattaaaacggttatgtgttttccatgcaatatgatgataataataggcgaaccagtcgtgcgcataaaaagcagtcagtacgcacagtccaatcagcccaagcgccagaataatcagccgcttgacagaatcgtttttcttcatcttccgttctcccgctatattcttctccacacagcgcgcaccgcccacatacaaaaacatgctgcgcttgcgatcaccgacattttttcctgtttccggtaaagtccccagattcttgtaatcgcccggagcttgttcgaggaaagggatttttccggtcttctgtagatcaccagattttcctttaacccgtaagcgacgtgtccgtttcttaaaatctgccaccacatcgccgtgtcctcgctcggcacgtccggcatctgcaaaagcgccttgtcaattttttcccggtcaaacagcaccgtgcttgtaaaaatgaccgtccggctgagcgctttctgataagtcaactgatcgggaacccgcacgattttgccggttccgaccgcatgctcgtctccaaattcatacgagcaaaatacaaaggctgcgtctttttcccgcaaaaaagccatttctcgttccagcttgtccacccgccagatatcgtccgcatccataaatgcgagataacgtccatttgcatgtgctgtcccgaaatttcttgcatttgctgcgccctttaccccgtccgtctgggaaagaagccgaattcgcacgtcttttctgcagatttctgacacaagacctgcgctcccgtccgtagaatgatcgtctaccaccagcagctcccagtccgtccatgtctggcggcgaaccgattccagcgcttcctccagatacgcctgggcgttaaaaaccggcatcacaatgctgatcaggttctcataattcattacagttcttcctttaccagataaatcggacgctttttcacttccagataggtcttggacagatactgtcccacgattcccaggcagaaaagctgcacgccggaaaccaacagaataatacataccatcgacggccaaccgggcgtcggatcatggtaaatcaggtttttgataatcagggcaatgatcgccacaaatgctataatgcagaacacaacgcccatgatagacgaaattgccagcggcactgttgaaaatgcggtaattccatccagcgaatacaaaaacagcttccagaagctccattttgtctcgccgtgggtgcgttccacgttttcatactccagccacttcgtctcatagccgacccagccgaaaattcctttcgtaaaacggttatattcgcacatcgaaagaatcgaatccacaacctgtctcgtcatcaggcgatagtcgcgtgcgccgtccacgatctccgttttggaaattttattcatgatgcggtaaaacatccttgcaaaaaacgaccggatcggaggttcgccttttcgggtcacacgtcttgtcgccacactgtcgtagccctgcttaatgtaggaaaacatctccggtaaaagggacggaggatcctgcagatcagcgtccatcatcacgacatagtccccctttgctttctggaagcccgcataaattcctgcttccttgccaaagttgcgggaaaaggacaccaaatgcacccgttcatccttttcgtgaagcttccgaacctccgctgcggtattgtccttggaaccatcatcaatataaataatttccagctccagtttttcctgctccaaaaaagcggaatttttcatcatttcctcataaaaaatcggaacgttttcctcttcattatagcaaggtacgattacgctcagtaacatgtttctctcctgtagttgcgtccattcttatcttgtccgcaattctcgctatgtattcgctgtttgtcggcctcggcgcgcccgtctcccggctgaacccgaacaaatcctcaaacacctccggattgccccgttcccaggacacctccaccgcgtttcggatcgcgcgttccacccgctgaagcgttgttttataacgccttgcgatcaccggatataacagcttcgtcacgctgccaaccagttccatatccgagacagccagcaaaaccgcctccctcagataataatatcccctcaaatgcgccggaatcccaagttccagcataaacgccgatatctcccgctccgtttcgagtgtttctttccattctgcagccatttctgattcctcctctgagtcttttttccgcaccaacagtgtgaccgcactgtgaacattctgccgctgctttctactttattctaacactcagattttggaaaccaaacggaaaacggtcgtgatatttcgcgttttttcgccgtttaaagccgttccgtcctgccttctttttccagcgtctcaacgacttccttgacgcgctgtgcctgatcgacagggcagaccagaatcgaatccctgccctctacgatgaccaggttttcaacgccgactgcggcgatcagctttttaccgccgtatacaacgcagtttttcgtatccagaagcagcgtatcgccggagctgatgttaccggcagcatcccgggtgcgcactgcatccagcgtatcccagctgccaacgtcgttccagccgaaatctccttccagcatcagaacaccctttgcgcgctccataatgccataatccacggaaatcttcgggatggtcggataaacctcatgcagaacctcctgctctttttctgtgccgagcgctgccccgatctgtttcagacaggcgtacacatccggcagaagttcttcgaaatagtgaagaatcgtggaggctttccagacaaacatgccgctgttccacgcgtaactgccggatgccagatagcttttcgccgtttccaaatccggtttttccacaaattcttctaccttgcgccatacttttccagcctcttccacgctgcggatataaccatagccggtcgagggaaacgtcggatgaatcccgatcgtcacaagtgcgtccgtctcttccactgcacgaaccgcttccttcatcacgcgggtgtattccgcctcatcgcgaatataagcgtccgccgcaaaaatgcacatcacgccgtcaccgtatttatgcagaatttccatcgccgcataaccgatacacgctgctgtattgcgcgccgcaggctctgccagaatatgatctgccgcaattctgcctgctgtgcgctccttcatcatctttgcctgtgtctcattggtcacaataaaaatgtccttctgatccatcaggtcatgctgtctgtcgatcgtctcattaaccagaatatctttgccggacaggtttaaaaactgtttcggctctgcctttgtactcagcggccagaaacgggttccgcccccgcctgccataattacgccataggttttcatgttgtatttcctttctgaaatgctgcgcttccgtcagcccattccatgcatttttacaaatccttttcggctttttccggatcgcttctattttgccggatcatttcggctttttccggaagccgtcccgaatcgagttgccccgcagctcgatatcctgtacgattggggatgacgggaatttgttatacccgatctgccctctgtccgtcggcacatagatcgtcacaccatccacttcgtacatctctgcagatccatctacataatcctgctgccacagataatacggctcatatgccagctcccgaaccatctgtatcagattataccccttataggtaaaaaatgctaccagcaatcccacaaatgcccaatatccggcatttttcaaccatttacgcccattgtgtccctgttctgaaccagccagcttttctgccgccatacaatacaggcttccaaacaccgtcagcggcaaaaacaacacataaaaatatccgtaccgcaccagcggcgccccgagctgccagaagaaaaaaccgaccactgcacacagctgaagcagggaaaaacacaagggcgtaagatgtgcgactcggcgggcgggcaagggtgcgccgatttctcgttcagacacagcgccgtccacatggggcgcgactgtcacctggcctgctctgactgcgcgcacagctccgagcaccgccagcactgcactcaccgggatcgctgcccagcctgccagcaccagaagcttatcgaatccagcctgcgctgcaaaccagttcggcagccactgcttcaacggctgatccagctgataaacattgtaaatctcccgcgcatatgcctggatttcctttgcgtcgctgtccgcatagcctttggaaattttccagtctaccggaaaccagtccaaaaacgtaaacggataaaacagccagccggaaatcagcacattccgcgccagatacggaaatgcaatcagaagtcccagcgcaatatagcctgcaatctgcagccattttttctgcctaagcagcaacaccgccggatacagaaccagaagcaaaattaccgctgtggacagcttcaccgtcgccgcatacaccagatacagactcagcagcgcgtaaggcacagtttgcttttccccgatgggacagtccctttcctgctcccacagttccacccaggtcattattacccagaataaaatcaacattgcaaaataatcggacgccggggaaaccatctcccggaacactgctatcagataaaagatcccgccgatagataaaaaatccgatattcgcactttttttcgtttccaaaatgctataagccctgccgcgcatttacacgcgcacagcagcgcaaaaaatccagccacgcagtgcatcggccgtccgatcagccacgtctcgctaaagaaggcgctgagtgcaaaggaagcgctgttgtaaccgaaccggctgtgcagattcgcaagacccggcacaacgccgtactcttcgatccatcgaattgcctgtgcatgatacagtcccgtatcgtagtgcatatagcccctcgacgagccgtatgcaaataaaagcgtcagaccggcatacagcagccagacggctttgttttttttgcgccaaaggctttttgagttttcaagcccttcgtcgcttctttccgtttttttctgacatgcctgtgttttcgaaattttgaaaaaatccgccaaatcctgacgcagcagcattccgccgatgaccgcagcaaaaacggcaatcaggcttgcccagaagccaacgccggcaaacaggctgaaatactctgcatacacattcaatacgagcagacccgccatcatataggttactgcgctatgaatctgacaaccgcccttttttcgaaacggtgcaagacacgcaaagcccatcagaaacgacaacgtcgccatatacgcccattccattaaaatcattatcataattttgatacccctgtctgatgcattaaatgtaccattgcccccatttcatgtcaaggaaatggaggtgctccattttccgggtaattttcttgcttttttccctcactgacactaaactaagtccatatacagatccaaatcattcattgctttccaggaggactcccatcttatgacaaatataatttcattccagaagtccggtatcactcggattactgcagcgttttttgcagcctttgcactatgcgatatcggttccatccatccggcagatattttttctgtcctgatctttgcaggcatgctcctccttttttctccaacgctgacgcaaagactgacgaatatcggagcagcttcttctgtgcttccgcgtcatttttatccaatatgcagacttctcgcagttctctacaccttattttatgcagcagcaaagcacgctgaactgtccggcagctttgacagccgcatattcagacttgcattcctggcggctgcggttatcggtctgtattttatattcttccgattctgtgaactgtccatgctgtttcttgcatccagacagcagcggcgttttgcccaaaacactttgcagcagcctgacggtgcatgtcctgtacccccagccatatctgcagtgcatgccctgtcccgcaaacagaagctgctctgttacttcggtctgctcttctgctggctgttctggtttctgtaccagtttcccggtgttctgaccccggacagcatcagccagttttcccaggctaccggcctgatcccgttcagtaaccaccacccgatcctgcacacgcttttgttctccctgttttaccatatcggattttttctgaccggaagcataaacaccggaatcgcctgttatgtattgttccagatgtgcactatggccgctattgaaacctatacgctatccctcctcgcaagatcaggcgcttcacgcctctggctgattctgtctttttgtttctgggggctcgttccatttcacgcaatttttgctgtaaccgtctggaaagatattcttttttccggatttatgctgttatatctttgctttttatatgaactgctctgcaacccggataaccgtccgggcatttgggcagggcttttcctttccggctttttcgtctgcaccctgcgttcaaacgggctttatatcttcctgttcaccctcccgtttgttctgttcgcatttcgccggacatggaaaaaaatatttgccgtgcaggtcggcatactccttttatccctgatcatcaccggccctgtatacactgcctgtcatgttgagcacgcttcctttacagaatccctctccattcctctgcagcagattgcctgtgtcgtttccaacggtcgacagctgagcgcagagcaggaaatgctcatcgatgatgtagtcgatacttccctgattccggagtattacaatccggtgatctccgatcccatcaaggcactcgtctcctacaacaatgccgatgcgatcctccggaatccttcaaaatatttcaccctctggattcagctcggtatttcttacccgggcgactatctccaggccttcatcgatcagacaaaaggatactggttccccgccccggctgctttacgcacgaatgaagggatttctccgaacgaaatcggactttcctggccgcatcttctgcggggtcagtttccggtcaaaatcagtgaaattcttttaaagcttcctgatatgcttccggtttacggtattttgtggagcatcggcgcgtacttctgggctgtcctgtattttgccgcatatcagtttttatacggacagcggcggtttctcgtgctctttgtaccgtttatcggaactgtacttaccctgcttctggcaactcctgttgcctccgatctgcgctacgcttatccgctcatccttgccgcaccgtttttcattgcgctgccgtattgccatcttcaaacctcccgtctgcaaaaatgagatgggaaacgttgtaaaactgacaaaaaaagtgtaaaataaaaaatcaggggatggcattttgcctaatttagtttccaaagagaaagaggtatagtgtgaaaaataagcgtgatcgcttatttttcacacagctatttgtgccgcaggcgtcacaaagtagctaggatcgcagagccgaactggacgttcgcctcgcggttccttcggcgcaaagcgcctgcggaatggagatttttatggacttttttaacgcactgattcacaacacggtttttatgtccgcagttacggggtggttcgctgcacaggtcatcaaaacagtgatttatacctgtatcaccaaaagctttgatccggaacgtttagtcggaagcggcggcatgcccagctcccattccgccactgtctgcgcactcgcaaccgcatccggaatgcaatacggcggcggcagctttgaattcgccattgccgctattgtagcgattatcgttatgtatgatgccagaggggtgcgccgggaaaccggtctccaggcacaggtcatcaatgaaatgatggaattctgggaaaagatggggcagccgatctcctacgaagaaaagctcaaggaattcgtcggccatacccctttacaggtgtttgtcggcgcgctgctcggcatcctgatcgccgtattgtacggcctgttcctcggttaaatctttatctgcttgcgccttcctgcagacaactttcgtgtctgtaggaaggcgcatctgcgttataacgttttttcccgtaaaaatctgccctcctgacacagaattttcacagttattctgtatagtgataactaagaaatttgatggaggacataaaatgagccaacaaaaagtagaccgttataaacaggaaaaagcgcatcgcaaagaacgtctggagaaggaaaagaaacgaaaaaagctccttcgcatctgcagttatttcgtacttgcagtaatcgtacttgcgattgcttttgcaatttaccgccactatactcccaagacagagacgccggcagaaacagaaaccactgtcgaaagcgtaatcgaaacaactacagctgaagaaagtaccgcagctgaaacagaggacacagatacagaaagcaccgccgaggaaaccgctgacacagaaagcgctgcagaagaaacagatgcggctggcacggaaagcactgcagctgatggggaagcagcccaggcggaaagcgctgctgagtaaaacgattatcatgaaaaaactcccatttccggtgacaaatggagaatgattccttcttcatttgccaccggaacgggagtctttttattcctgataatagcatgctcacagagcatgcattactttcttgctatcaaatacaggtcacaatacagcagctctctgatcttttccatcttcacatcaccgcccattccatctgcaacggcctgcagcgcctcctcagtctgctccattctggaaacatatacaagcacctgatccgcctgccggattgtatcatcctccacagtcgaaacatctgcaaggctcgcaaaataaatttcatcatactgcatcagctccagtgaatcgtcccagatcatccaggtcaggttgggattataaaaataaacgaccggtttctctttatgctcctgcgcaaacgcgatgctttctgtatcctcttcataaagaaacagcacctttccatccgccagccctcgaatctgtcctgttgccagcaccagaaataccgtcagaagcacatagccggctgctttatcgtgcacggaccgtttttccggagcagatgtatctctggtatcgctgattttccccgcagcgctttttacagcagtcccttttctcatagtcaatacgaaaagcttctgtccgagcagtacaaatataaccatcatcagcagcaaaatcagcccgtagaccggaatctgatatcggttcgcttcctccgccgtcaggagtgctgttttggtcacgacaagaaaataaccgagtactgctgccgccggaatccagaaaacacgccgtgcttcccagaatgattcgcgggaagcgtcagcctgccggttcgaattttcctgcgcagctgcgtactctgctgtctgctgcccagatttctgcgcagttgcgtgctctgctgcctgctgcccggatttctgcacagtcgcagcgacagctttccgtccggctttcatccgtccaattccccagaccgtcagcgccatcaggacaagcagcagaacaaatccgtacagcatcgacccaaaggcatattcattgagcagtcctgcgaagaaccggcatcttccaagcgtattgccaaggtcgaagaacgcacccatcgcttccgtcccccggtatccccgaaaaatatggctcagacacgccggatagctgactacggcaagtagcatcgctccgatcacagcagtcgcataaatgagacagtctttccatttctgcccccagcttttctgctctgcacgttccaacagcagatacagctccattgccgctgccaggaaaaacagataaacagcaaaatagtaatgcgtcagaaaaccgagataaacaaccgccatcagcggcagataaaaggaaaacccgcgttttctctcctgcaggctttttacatgtagccaggtcacgagcaaaatccacagagccagaagcatatacattcgaaccagcataacgccggaataaaccgccgggttaaaaccatacaggaggcacactccgaaaatcatcactcgcgtgatacgctccggaacgtccgccgccgttacacaggtctgcactttcccaccaggcgcagccgcgctcctcagcgcacccgtcacaatccgccgcgtcagtttcgccagcacactccagctcagaacgaaaagcactatattcagtccaattcctgaccatttgctgaaccttccgggaaacagcgagcataccgtatgcagcagcagatagtaaaacggcggatgcacatcataggtctgcatgcgcgtaaccgtcccatactgaaaccgctgccccggcagaacccggaattcgtccgcaatctcgctgcccggcttccactcccggtcggtcggcaccagaccgatcgacacgttggaggaataataggaataatattcatcataatggaaccctgcttttttacttccaaaatagaaaatcgcaatcagctgcaccaaaagcagcataccaaggatcagataccagtttcgtttcttcacattccctcctgcccgcagacgcagatttacgttctgcagttctatcatgcgttgttttttgataaacatttctttttataatagtaccatgttctattttaatttatttttctgcataactcaaggaagcattcacacagtttcgtaaaacaatagaatgcacgctctgcgagcattctattgtcatgaattcagttcgtccatt

SEQ ID NO: 192 - DNA, 8900 bp, unidentified
  source 1..8900: mol_type = unassigned DNA
ctactgaagtaatgataatacaccctgattgctctggttagcctgagccagcatagactgacctgcctgtgcaagaatattattcttgctgtagttaaccatctcatcagccatgtctgtatcacggatacgagactcagcagaagatgtattctcagatacgttatcaaggtttgaaatagtatgctccagacgattctgtaaagcaccaagtgcggaacgctgtgtagatacaatgtcaatagctgactgaatctttgtcatagcagatcctgcagaactaaatgaagaaacagataatccacttacaccgatagatgaagaatccatgttgctgatggaaattgcaatattctgtccactcagcgcaccaatctgaaggttctttccactgaaagatccatccaataagttctgtgtattgaactgtgttgtagaacggatacgatcaatttcagatgataaagcatccatctcagactgaatagcgtttctgtcgatagtagtattggtatcgttagctgcctgtgtagcaagctcattcatacgctgtaagatagaatgtgtctcatttaatgcaccttcagctacctgaatagcagatacaccatcctgagcgttgtcagatgccttgttcagacctctgatctggcttctcatcttctcagaaatagaaagtcctgctgcatcatctgctgcacggttgatcttgtaaccagaagataacttctctgaagacttagcctgtgcgcttgttgtgattcctaacattctgttcgcatttgctgcggtcatattgtgctgaactaccatattaattttcctccttgaattaagtgcagcttccatgctgcaatttgatttgtttgtgacagttttctatgcggccgtacgctccgcttcgaattccatccgattttgtaagaaacaattgttatcttgtttacttgctatatatatcggacggggttggaaatactttagcattaattttaattttttcaatttttttctgccgcattttataataatgccgaaacttttccttccagtattgcatggatctcatccagatccttgcctgtgatggatgcaatgttttccggcgacattccgctgtggttcattttaagaataatttttgcttctcctacaacttctcccattgctttaccttccgattctcccagttttctggcatcttccaggtcatccttcatcagttctctcaacgcatcacacatattcgcatccctccttatttcacgatacaactcatcatttgccctgacacttacctgtaacacagcctctacattctgccggtcacgtggtgtattcattccttctgcttttctcagaaattcctccacgtcttctttctttgcatgatttgacaaaatcttcaaactccgatgctctcccggctctaattcctgtgtcacaataatctgcgccggaatcggtaaatattctgtcacataataaatgcccggatacctttcttctattttatgtccatacctctgcaatgtcaaaaacattttctccggtcgggcttccctgaaaatagatattgtcagttcattgattggaactgcatctacatattctccatagcctttgtacaggcacgcatacccgatggtcttgtaaaaatcgtcaatggtcaacgcatcttccgggctcttatactcgatcacattataggttctcataatgtgaccgatttcattcttaatttgtccggtacgcccttcttttatgataagaaggtcgatacggattggttccttgctcagattgtattccggctttaactccagccgttcaatgtcttcatggaattccagccccgcagcggcacagaatgccggatgccactggagcttgtctggtgcatttttcaaattgcttcctcctgtttgtgtgaatcacgattccgcaacatcgcaatttgttttcgtgcacaaatgcttagttttcacctctttccttttcgtttttccctctgcaatcttttcctgtctttatgataacctatttatttttctccatcaagcagtttcttgtatcccaaacacccgaaataatctcatcgttactgttcgcatcaaattgctaacggaatcaatgattaaaaaagtgatgatatattgttttttcttatacatcatcacttctttttactttcttatgttgtttttagatgctgcttataatagcgctgaaactttttccggttccatttttctattttttctccagccccggccactcctggtctttctctgaaagtgtcagcaacgttccatccgtcatgcaatacccttccgccgatggggttccctgatactccccctgcacatccggccactggataccgattgccgggtcattccatgccaggccgccctcgtcgttcggatgccagaagtcattgactttgtaacagaactctgcctcgtcagacagaaccaggaagccatgcgcaaagccttccggaatcagaaactgctttttgttttcctcggaaagttccactccgtaccattttccataggttgcggaaccttcgcgaaaatccactgccacatcaaatacgcttccgcgcacggcgcgcacgagtttgcactgcggatagttgatctggaaatgcagtccgcgcagtacgcctttgacggacatggactggttatcctgtacaaactggatatcaaatccggcttctttcatttcccgttcattgtaggtctccataaagtatccgcgggcatccccgtgtacggccggtgtaatcacacacagcccttcgatgccaccgacatttttttcaactgttatctgtcccactgttttttcctctttttcacatcattctcttaatatttcactctgccttctgcgactgcttttaaatgctctccatacgggctctttccgtagcgtatcgcagaatcaagtaatttttcccggtcaatccactgattgatatatgcgatttcttccggtgcggaaatggtcacgccctgacggtgctcgatcatctgcacaaatgctgccgcatccagaaggctgtccatcgttccggtgtccagccatgcaaacccacgtccgagcagctgcacatttaagtttttctgctgcagatacaggtcatttaaggtggtgatctccagttcgccgcgggcggatggctgcacctgttttgccattttgctcacgcctgccggatagaaatacagtccggtcacggcatagttgctctttggctgtgccggtttttcctcgatggaaaccgcttttccgttcgcatcgaaatccacgacaccaaaacgctccggatcgttgacataatagccaaagacggttgcctgtccctcttgtgcatcctttgcggcattgcgcagaatttttccgaatccgtttccgtagaaaatgttatcgccgagtaccatggcgcaggcatcctctccgataaattcctctccaagcaaaaatgcctgtgcgagtccatccggagacggctgcactttgtaggacagatgcagtccgaattgatttccatcccccaaaagtgcttcaaatctcggggtatcttccggcgtggaaataactaaaatatcacggatgcctgccagcatcagtgtagacagcggataataaatcatcggtttgtcatataccggaagcaattgtttactggttaccatcgtcaacggatacagccgtgtccctgcgccgcctgccaatataattcccttcatcttaaagttccccctgtctctttaattcctgcagataccgtcccagcgcgtcctgccaggttggaagcggtgtaaatccattttctttcagtttctttttttccagtctgctgttaaacggacgcgctgcctttgacagaccgtattccgcggttgtcacgggctgcacttcggtagaaatccctgcctgccggtaaatttcttttgtgaaatcgtaccaggagatgtagccaccttcgtttgttacgtggtaataaccatatttttcggtttccatcatgtcaacaagcagtctggccagatcgtaagtataggttggtgtgccgatctggtcatttaccacgcgcacctgcgggtgattttttgccacttttaacatggtcttaataaaattttttccgtttaatccaaacacccatgcgatacgcacgatgaaatacttcccgagtgtctgtgctactgccagttccccgccaagtttcgtctgtccgtatacgttaagcggtgcgtatgctttgcagtccggctcccacggagtctcgccctgtccgtcaaacacatagtctgtgctgatatagaccattttggcatctactttttttgccgcttccgcaatatgtttcgttccatctacgttgatggctctgacttttgcctgattttcttcgtcctctgctgcatccacagcggtccatgccgcacagtgcacgatggcatccggctgtacttgcatgattgtctgttccactgctgccgcatcggtgatgtccagcggcacatacgatgcacaggattccagtgtcggtgcaatatccgaaccgactgcctgatgtccgcgctttgtcagttcgtttaccacgtcatgtcccagctgtccggcaacgcctgtcacgaatactttcatatttataaacctttctttccgtacatttctttgtaataattctggtattccccgtttacgatgttctcccaccattccttatgatccagataccactggatggtcaggcggataccatctttaaacattgtctccggcagccagcccagctcgttgtggatcttggtcggatcaatcgcatagcgcatatcgtgtccttttctgtcctgcacatgctcgatcaggctctccggcttgccaagatattcacaaatcagttttacgatatcaatatttttcatctcattgtgtccgccgatgttgtagacttctccgacggttcctttgcgcaggatcaagtcaatcgccttacagtgatcctcgacatacagccagtcgcgcacattgagtccctctccgtataccggaagcggcttatctgccagcgcatttgcgatcataagcggaatgagtttttccgggaactgatacgggccgtagttgttggaacagcggctgatcgtcaccggcaggccgtacgttctgtgatatgccataacaagcagatccgcagatgccttggaagtgctgtaaggactggaggtgtggatcggcgtatcttcatgaaagaacagatccgggcgatccagcggcagatctccgtacacctcatccgtggatacctgatgataccgtgaaatgccatactttctgcatgcgtccatcagcacagacgtaccgataatattggtctgcaaaaagacttccggattctcaatggaacggtccacatgggactccgctgcaaaattcacgatcacatccggtttttcttcctcaaaaagtttgtatacgcccggtcgatcgcagatatccaatttgacaaaacggaaatttggctgctccatcaccggtgcgagcgtggacaaatttcccgcataggtcagggaatccagacaaacaatgcgatcctgcggatgttcctttaacatatagaaaataaagttgctgccgatgaaaccggcaccgcctgttacaataatggtcatgagtgtttcctcctgtgtgcgtttacgattcctgtatttgtttccattataaaaggtgacgctaggtcaccttcaagtcttttttatagatttttctaattattttctgcacaggaagattccggcatcttttgtgatatgaaatccatctgccacgcgggcagaaacaaattcccgaaactctttgtactggttcaaaagcagctggttctggtttccgtgacaggaaagaatataggaaatcagcggttccgcttctgctatttcaatcgcatcctcgtatcttcgcatctgaatttccgggaaatacggtgctaacaggttttctccgttttcaagcccgaaccgctcatacagcacctccgctgataaaacgatttctttatggaactgctgcaccagatcggtaatttcccacatatgctgctttccgtaggtactgcatagaaaccgtcccccattttttaagactctccgacattctgcaagcacctgtgggatatcttcacagtaaaacagcacatgatccgcgatcacaagatcaaatatttcctcctcgtaaggaattttttcgcagtcaaattttttataggaaaagcggctgtcctctcccagtgcacgccgggcatcctttagcattccttctgatttgtccgagagaacgacccatagatccgcaggcagctgttctctgttttcggtccatagtgctccatttccacagccgagctccagaatccgcatccccggctgcagattacactgctgcataatccacggaaaccacccctgcggattgatggaatactccctgtgcaggcgaatccgggcggaaatatttgccgcattctggtactggtttttcaggcttcgttccactgccgtcagatggatcagatccagcatactgttccagtcaatcgcctgttccgtctggatggcttctatggtgcggtcaattgcctcatccatcgcctgcatttcgtccattttctgccgcagcagcttcttctgtatccgcatggattcaagaagatactgctgatctgccgaggcaagtgtcatctcccggatatcttccagcgaaaatcccagatattttaataaaaggatctgctggagttttgccagatctgcatccgtatacagccgcgctcctgcggcagtccgtgcacttggttttaaaatattctgtttatcataataccggatcgcgcgaagtgtcacatgtgctttttttgcaaattgtccggatgtgtaatacgcatcctttttcatctacagttctttcacctcatctcgcatttcttctgtcatattctgtacataggtcgtctgggaagaaatttcttccgtatttgcggcaatggttgacaccttctgcgtcatggtattcatgctttctaccagatctttgattgaatccatgctctgtgtaatctttggaagaattgcctcggctttctggtcgttctgtgtcagaagatccttcgtggaatcagacagtgtacggatttcctccgctactactgcaaagcctcttccgttctcgccggcacgcgccgcctcaatggaggcattgagcgaaagcagatttgtctgtcctgcaatggcagaaatatcttcattgctctttttatatacactgatgaaatccgacataatgcggatggattcattcagttcatcgcacaggcgggaaatatcctgaatatactgtgccagattggttgcttcatttgcagattcctcgtttgccgtgttcagttctgcaatattgtcacttaaggcaataaaccgttctgtgatcgcagcaatcttctgctgtcggatttcctgtgcattccgttcctgatcacggatttctgcaatcttttttgcctcttcctctgccagaccccgcacatagtgcacacagttttcttttacgttgactccattgtggatggcacgtaccatgttggtgcagcttgaatatccacaggattcacagtccctgtgctgttcctcgtaagtatcttttttcatttctgtaaacaggcggttcttctcctgttcggacggttcctcaatatgtactgcgcgattggtgtagctgcgcataaaatcgttgatgtccagctttccaaaagcgtccatgaagtttttcagacgttcctccggtgtcagtgtatctgcccacggactcctgcttttgctcttcctgccaaagtgtgccttctcctgtttttcactggttttgctgttccgcagttttgcgattgtcagcatgacatcatccgttccccgtttaggatctgtggcagttccgtagagacagcccttcgcacaatttaagatatctaccataaacggaagttctttattctgctgaatacgttttgcataggaacgcagatattcatatgcctcatgctcgccctctacctgacgcactacctgttcttttccaagaaaatgttctacattctcccgcagtccaccaggcatcggatacaaagaacccagtccgtattccagttcatcggtatatggttcacacccttcataatcgtttccgatatacttcatcatcttttcaaaagttacattataagaaacatatccgccgcaattgggatcggtaatctctaattttttggcaatacacgggctgatgaaagcaatttcatctgtgacctgcatgtactttttcatataaatagcagtacacatcatcgggctgtgtaccggcatcagccgcggaatcagctccggtatatatttttccacataggtgactactgccggacacggctgggaaatgcccccgaaaaatttgtgttccgtaatgtatttcagatatccccaggttgtgatatccgcaccgaacgatacactgcagatatggctgactcccttactctttaaatatcccagcacacgctggtattctttgggataattcgccagaaatgccggtgccagtatcacggaaattttctttcccgatgcaaggtcttcaaagaaacggtccgtatcatcataatagtctctcgcttcatgtgggcagacatcaaaacattccccgcatacaatacatttgtccgggtctaccgttacataaccttcctgtgttgcaatatttgccgtaagtacaggacagctgcgcacgcatttgttgcatccggtgcataaatcagttgtgtaaatcagttccat

SEQ ID NO: 193 - DNA, 28148 bp, unidentified
  source 1..28148: mol_type = unassigned DNA
  misc_difference 9494: note = a, c, g, or t
  misc_difference 9495: note = a, c, g, or t
  misc_difference 9496: note = a, c, g, or t
  misc_difference 9497: note = a, c, g, or t
  misc_difference 9498: note = a, c, g, or t
  misc_difference 9499: note = a, c, g, or t
  misc_difference 9500: note = a, c, g, or t
  misc_difference 9501: note = a, c, g, or t
  misc_difference 9502: note = a, c, g, or t
  misc_difference 9503: note = a, c, g, or t
  misc_difference 9504: note = a, c, g, or t
  misc_difference 9505: note = a, c, g, or t
  misc_difference 9506: note = a, c, g, or t
  misc_difference 9507: note = a, c, g, or t
  misc_difference 9508: note = a, c, g, or t
  misc_difference 9509: note = a, c, g, or t
  misc_difference 9510: note = a, c, g, or t
  misc_difference 9511: note = a, c, g, or t
  misc_difference 9512: note = a, c, g, or t
  misc_difference 9513: note = a, c, g, or t
  misc_difference 9514: note = a, c, g, or t
  misc_difference 9515: note = a, c, g, or t
  misc_difference 9516: note = a, c, g, or t
  misc_difference 9517: note = a, c, g, or t
  misc_difference 9518: note = a, c, g, or t
  misc_difference 9519: note = a, c, g, or t
  misc_difference 9520: note = a, c, g, or t
  misc_difference 9521: note = a, c, g, or t
  misc_difference 9522: note = a, c, g, or t
  misc_difference 9523: note = a, c, g, or t
  misc_difference 9524: note = a, c, g, or t
  misc_difference 9525: note = a, c, g, or t
  misc_difference 9526: note = a, c, g, or t
  misc_difference 9527: note = a, c, g, or t
  misc_difference 9528: note = a, c, g, or t
  misc_difference 9529: note = a, c, g, or t
  misc_difference 9530: note = a, c, g, or t
  misc_difference 9531: note = a, c, g, or t
  misc_difference 9532: note = a, c, g, or t
  misc_difference 9533: note = a, c, g, or t
  misc_difference 9534: note = a, c, g, or t
  misc_difference 9535: note = a, c, g, or t
  misc_difference 9536: note = a, c, g, or t
  misc_difference 9537: note = a, c, g, or t
  misc_difference 9538: note = a, c, g, or t
  misc_difference 9539: note = a, c, g, or t
  misc_difference 9540: note = a, c, g, or t
  misc_difference 9541: note = a, c, g, or t
  misc_difference 9542: note = a, c, g, or t
  misc_difference 9543: note = a, c, g, or t
  misc_difference 9544: note = a, c, g, or t
  misc_difference 9545: note = a, c, g, or t
  misc_difference 9546: note = a, c, g, or t
  misc_difference 9547: note = a, c, g, or t
  misc_difference 9548: note = a, c, g, or t
  misc_difference 9549: note = a, c, g, or t
  misc_difference 9550: note = a, c, g, or t
  misc_difference 9551: note = a, c, g, or t
  misc_difference 9552: note = a, c, g, or t
  misc_difference 9553: note = a, c, g, or t
  misc_difference 9554: note = a, c, g, or t
  misc_difference 9555: note = a, c, g, or t
  misc_difference 9556: note = a, c, g, or t
  misc_difference 9557: note = a, c, g, or t
  misc_difference 9558: note = a, c, g, or t
  misc_difference 9559: note = a, c, g, or t
  misc_difference 9560: note = a, c, g, or t
  misc_difference 9561: note = a, c, g, or t
  misc_difference 9562: note = a, c, g, or t
  misc_difference 9563: note = a, c, g, or t
  misc_difference 9564: note = a, c, g, or t
  misc_difference 9565: note = a, c, g, or t
  misc_difference 9566: note = a, c, g, or t
  misc_difference 9567: note = a, c, g, or t
  misc_difference 9568: note = a, c, g, or t
  misc_difference 9569: note = a, c, g, or t
  misc_difference 9570: note = a, c, g, or t
  misc_difference 9571: note = a, c, g, or t
  misc_difference 9572: note = a, c, g, or t
  misc_difference 9573: note = a, c, g, or t
  misc_difference 9574: note = a, c, g, or t
  misc_difference 9575: note = a, c, g, or t
  misc_difference 9576: note = a, c, g, or t
  misc_difference 9577: note = a, c, g, or t
  misc_difference 9578: note = a, c, g, or t
  misc_difference 9579: note = a, c, g, or t
  misc_difference 9580: note = a, c, g, or t
  misc_difference 9581: note = a, c, g, or t
  misc_difference 9582: note = a, c, g, or t
  misc_difference 9583: note = a, c, g, or t
  misc_difference 9584: note = a, c, g, or t
  misc_difference 9585: note = a, c, g, or t
  misc_difference 9586: note = a, c, g, or t
  misc_difference 9587: note = a, c, g, or t
  misc_difference 9588: note = a, c, g, or t
  misc_difference 9589: note = a, c, g, or t
  misc_difference 9590: note = a, c, g, or t
  misc_difference 9591: note = a, c, g, or t
  misc_difference 9592: note = a, c, g, or t
  misc_difference 9593: note = a, c, g, or t
taaaatagaccagatgctctttgtctcagccactccgaataagtatgagaatgagcatgagctgcttcgtgcggagcagattatcagaccgacaggacttttggatcctgagatatcagtgcgccctgttgagggacagattgatgaccttgtgtcagaggtcaataaggagactgcaaaccatcacaaggtgcttatcaccacactcacaaagcgtatggctgaggatctcacaaactatatggcagagcttggcatcagggtaaagtacctgcattcagatatagatacacttgagagagcggagataatacgtgacctgcgtcttgacgtatttgacgtgctcgtcggcatcaatctgctcagggagggccttgatatcccggagattacacttgttgccatactcgatgcggataaggaaggcttccttcgctcagagacctcacttatccagacgataggacgtgccgcacgtaacagtgagggccatgttatcatgtacgctgacaagattacagactccatgcgtgtcgcaattgacgagacaaagcgtcgtagaaaggtacaggaagagtacaatgaggctcacggcatcacgccacagactatacagaaatccgtgcgtgatctcatagctatctcaaagaaggtagcggccgatgagaatgctcttgacaaagatccggagtcaatgagcaaaaaagagcttgagaagcatattgcagatatagagaaaaagatgaaaaaagcagcggcagagctcaatttcgaggctgctgcagagtacagggacaagcttattatgctgaaaaacacactgagggatatacgataaaagcttatgatatttggaagcaatttggaggaacacaaattatggcaaaaaaagaaagaaaatacatcaaaatacgaggtgccagcgaacacaatctaaagtgcgtcagtcttgacatcccgagagatgagtttgttgtttttacagggctttcaggctccggcaagtcatcactggcatttgataccatatatgctgaggggcagcgcaggtacatggagtcactttcatcgtatgcacgtcagtttttaggacagatggagaagccgaatgtggagtctatagagggacttccgcctgccatttccattgaccagaaatccaccaacaagaacccacgttcaactgtcggaacggtcacagagatatatgattacttcagactgctttatgcaagaattggaataccacactgtccgaagtgcgggcgcgccattacaaggcagacgatagaccagatggtggatactgttatggcgttgcctgagcgcacccgtatccagcttcttgcaccggtggtcagaggccgcaagggtgagcaccagaagctgttcgagagagccaaaaagagcggatatgtgcgtgtgattgtagatggcagcatgtatgagctctccgaggatatcccgatggagaaaaatataaagcacaatattgatattgttgtagaccgtctggttgtaaagcctggtatagagaagcgccttactgattcacttgaaaatgtatttgaactgacagagggcaatgccatagttgatattgtagatggcgaacagatgaccttttcccagaattttgcgtgccctgactgtggcataagcatagatgaggttgagccgagaagcttctccttcaacaatccgttcggagcatgtccgacctgctacggacttggctacaagatggagtttgacccgcagcttatggtgccggatgcatcgctttccatatctgagggtgccatacaggtgatgggctggcagtcatgtacagacccaaagagctatacctatgcgacacttcgtgcgctgcatgagggctatgggcttccgctcgacataccgattgatgatttatctgcagatatgaaaaaactgcttttttacggtggagatggcagggtgctcaaggtcagatacaagggtcagagaggcgaaggtgtctatgaccttgtatggaacggccttgtggataatgttgagcgccgatacaaggagaccttttctgatacggcaaaggcagagtatgagcagtttatgcgtattactccgtgtacgagctgtaaggggcagaggcttaagccgtcgtcacttgccgttacggttgcggacaagaacatatatgagatgacctccatgtctgtgaaggagcttgtgaagttccttgctgatatagagcttacagagcagcagcactatataggagatcagatactaaaggaaatccgtgcgagagttggctttttgcagcaggtcggccttgattacctcacccttacccgtggcacggcaagcctttcaggcggggaagcccagcgaatcaggcttgccacgcagataggctcaggacttgtaggtgtggcatatatacttgatgagccaagtatcggattgcatcagagggataacgacaagctgcttggtgcacttatgaatcttaagaatctgggaaatacgctcatagttgtggagcatgatgaggataccatgcgtgcagcggattatatcgtggatgtagggccgggagccggctcgcacggcggggagatagtggcagcaggctcgttaaaggacattataaagtgcaaaaaatcactcacaggagcatatctgagcggtaaaataaagataccggtgccacaggagaggcgcaagccaagcggatatatcacgataagaggagccagggagaataacctgaaaaatattgatgtgcagatacctcttggtatcatgacctgtgttacaggcgtgtcgggctcgggaaagagctcattgaccaatgagatactctacaagcatctggccaaatccttaaacagagccaggtgtatcgcaggtgaccacgacggtatagatggtcttgaacagcttgataaggtcatagacatcgaccagtcaccgataggccgtacaccacgctctaatcctgccacatatacaggcgtgtttgatatgataagagacctgtttgcatcaacacccgatgccaaggcaaagggctataaaaagggccgtttcagtttcaatgtaaagggcggtcggtgtgaggcctgcggcggcgatggaatccttaagatagagatgcatttcctgcctgatgtatatgtgccgtgtgaggtctgtggaggtaaacgatataacagggagacactcgatgtaaagtataagggcaagagtatatacgatgttcttgatatgacagtggaggaggcacttgagtttttcaaaaatgtgccaaagatacagaacaaaatccagtcgctctatgatgtcggactatcctacgtgaagctgggacagccgtccacagagctttcgggtggtgaggcacagcgtatcaagcttgccacagagcttagcagaaagagcaccggaaagaccatatatatacttgatgagcctaccacaggactgcactttgcagatgtacacaagcttgtggagatactgcgcaggctatcagacggaggcaatactgtagttgttatcgagcacaacctcgacgtgataaagacagctgactatatcatagatatgggacctgagggcggagacggcggcggaaccgtcatagcgcagggcacacctgaggagatatgtgaggtaaaacagtcatatacaggacggtttttgaaaccatatctggaaaaagacaaagataaattttaaaattttattaaatatgacctttttcaaaaaaaaagtttgaaaaatgggatttattgtatataataagagagtgtatgtgtaaatttaaagatatggcaggaaaggggctattaaaatggtcggatcagatatcggaatcgatttaggaacagcaagtatacttgtttatataaaaggaaagggtgttgtgttaaaggagccttcagtagtagcctttgacagggacaccaacaagattaaggcaatcggagaggaagcacgcctcatgctcggaaggacaccgggtaatatcgttgcagtcaggccgctgcgtcagggtgttatctcagattatacagttacagagaagatgatcaagcacttcatccagaaggcgcttggtaagaagagcttcagaaagccgctcgtgagcgtatgtgtgccaagtggtgttacagaggttgagaagaaggccgttgaggatgctacatttgcagcaggagccagagatgttaagattatcgaggagccaatcgcagctgcaatcggtgcaggtattgatatttcaaagccatgcggaaatatgatagtagatatcggaggcggtacatcagatatagcagttatctcactcggtggttcggtagtcagcacatctatcaagatagccggagatgattttgatgaggcaattgtcagatacatgagaaagaagcataaccttctcatcggagagagaacagctgaggatatcaaaatcaagattggtacatgctaccctctcgcacagccggagacaattgaggtaagaggaagaaaccttgtaacaggacttccaaggactattacagtcagctcagaggagacagaggaagcacttcgtgaggcaactcttcagatagttgaggcagtgcactcagtgcttgaaaagactccaccggagcttgcagccgatgtcgcagacagaggaatcgtgcttacaggaggcggttcactgctcagaggtcttgaggagcttatcgaggaaaagaccggcatcaatacaatgactgcagagcagcctatgacatgtgttgctatcggtacaggaaagtatgtagagttccttgcaggcaagagagatgaagaattctagaatatacgttttataacaggcagccatgagggcgatgatatgtccctgcattgcaggaatgtattgtcgcttttttgttaatattgttacaaatggggatattacagtcagggggattagtgaacaaaataaaggatattgggagaggcgtaatcaatctggtatttccacctcgctgtccggtatgtgatggtataattggtccggttgagagatatatacacagcagatgctgtgaaaagctctttccggttgagcagccacagtgtatgcgctgcgggaagccggttttgtctgagcgaagagagtattgtgacgactgcgcacgggcactcgagcatcacaggcagatgcgggaagatgacagctacaggcagggcaaggcactttttgcatacaagggcagcataaagcagaccatgtacaggttcaagtattcaaacagacgtgagtatgcggcttattttgcacagacagcaatggaaagatattcggactggatacagagctgtgggatagatgttattattccggtgccgatgcaccgtaaaaagatgcgccagagaggctacaatcaggcagagtgttttgcaaaggcattgtctgaaaaaacaggcataaggatggcaaaagggcttgtgcgtagagtgaaaaataccagtccactcaagacaatggggtatgttgaacgcagaaattgtctcgagggggcttttcaagtggcggatagtattgtacaatatgaccatatactaatagtagatgatatatatactacaggcagtacggcagagtcgattgggcacgagatagcaaagaaatgtcctggccgtgtatatgtgctgtgtatttgcataggacagggaagttaggagggttttatcagatgagaatatctaattgcaagggctgtggcagcaggatgacaaaaaccgtatgagatataacaggtaagaggatgatttatgataaacgaagaaaaagtaagggaactgtttaatattgctctttgtgacagcaaaagcgatgacagccgtgtgcagaaacagtccgcaagctactacggatgggactatatatggaaagagggcttaaaaagcttctttacaggtacattcgcatttgcagggcttgttgtgatgtgggttgctgtcaatgcagcagagcttttggacagaatcaataagcttgattttaaggcaataggtgtcacaataggcatactgtatattgcatttatggcggtttacatttttgtcacaattgtggtgtatactgcaagatataaggccggcagaagagaagtgcgcaaatacgcagatcacctgaaggcagtgggcagaatatattcccgtgaggaaaagattaagcgttagggaggctttatgaacaagttactggaaattaaggataaggcagtcaaattttgcggtgagtatgagcactttatacttccggttgtgagatttgccgttgcatttatcgcatttataacaatagatttgaatatcggctatatggcgaaaatcagctcgatgcttgtggcactgcttttagcgcttgtgtgtgcactgcttccggtgaatgcaatactctgggttgcttcgattatgatacttttagatatgtatgcgctgtccattgaggtttttgctatcacatttgtactttttttagtactgtattttgtctattttcgttttgcaccgaaggatggcatgcttgtgatactcacacctatatgctttcagcttcacataccatctgttatgccggttgcagcaggtcttttaagaagagcttattcggttgttgcaataatatgtggcacactgctgtactatttctttgacggaatcagacagaatgcatcagcgcttgcagaggtggtagataaaaaggggcagagcactacaaagctcaatgtgacaatgggacagcttcttgacaacaaagagatgtttatagttatggcaatctttgttatcaccacactggtggtgtatcaggtcagacgattgaaaatcaataattcatggactgttgctaccatagcaggagggctcatacagttggttgcacttgttgttgcttatctggtgctcggactgccggagaagataatctggcttgtgctcagcactgtagctgctatttttgcaggtgttgtcatacagtttatatttatgaatcttgactatgcacgtacagaaaacgtacagtttgaggatgatgaatattactattacgtcaaggcagttccaaagaagatgattgccaaggaggaaaaggttgtaaagcactttggcaatacaggaagccttggaaagaagattccgagacataatcaggaaaatatcagcaaagaggctattgcaaaagatctcgaaatagacgaaaatatatttgaggatgacaaatagttacatagtataagagaaaggagggcgctatggataatgtgagtggtgtattgatacgcttcaaggatcagttccttacattcacaaatgtgccgggcatcaaaatcggtgtgatagacattatagagatacttattatttcagtgctcttctatcatatacttttgtggataaagaccacgagggcatggaatctgttcaagggccttattatcatattgttgtttgtgcttgttgcagcattgttccagatggatacaatactgtggcttgctgagaaactctttaatataggtctcgtggcacttgttgttatttttcagcctgagcttcgaaatgccttggagaatattggtggaaagacctttttgggtgattttttcaataccggcagaggcgagattgagaaattctccgacaagacaatcgatgagctggtgcgtgcatgctttgcgatgggcagagtaaagacaggagcactaatagtcatggaagatgagataaatctgggagagtatatcagaacaggaatagatgtggatgccatacttacaagtcagctcctcatcaatatttttgagaaaaatacaccgcttcatgacggagcggttatcgtgcgtggcaaccgtgtggtgtcagctacatgttaccttccgctatcagacagcctggcactctcgaaggatttgggaaccagacaccgtgcagcggtcggagtcagtgaggtaagtgattcgcttactatcatagtttcagaggagacaggagcagtttctacagcatacaaggggcagattgagcacgatatagatgccgatcatctacgcacacagcttaagcttctgcagaacagacatagggagccgggtaagtttgaattaattaaaaggaggtttaagaatgggaaagaagcttctaaaaaccttcacaaataatataggctttaaaatactcgcgatagcatttgcatttatactctggcttgtggtctacaatctcaatgacccggtcaagacaaagacatttaccacaacagtcaccgtcacagggcgcgattcggttgttgacaaggggctatggcctaccatcaaggattcggaaaagaccatcagcttttcggtatcaggtaagagaagctatctgaacgagcttgatgattccgatttttacgcaaatgttgaccttgcaaatatcatagtagataaggatgatacgaataaggcaagcgtaaaggtcgatattggatgcactaagtacagacattcgattaccttcaacggtggagaccatatgctcccgctttcagttgaaaaatatatgcagaagcagtttgaggtaaaggtatcagtggttggaagtctctcaggtgcgaaagcactgggaaacaagccacaggcaaatccaaaggtagtaaagatcggaggtcctgagtcagttgtttcaactatagcatcggctaatgtaaatataaaggtcgatgacaataccataatatcagataatcagataactgatcgcggtgatctcactctgattgatgataatggcgatgagatagatatatcaaagcttgatgtggacagccagtatcagtctatagcagtgacagttgatgtcttaagtaccaaggaggtacctatcaagtgtactacgacaggctcaccggcaggaggaaagagcgtgctcggagtagaactatcagaggagtctgtaatgctcaagggtaatgcagaagcattgaacaatatcacatctatagatgtgggcccaatcgatatatcgggcgcaacagacgatataagtacatctgttgacctgacaggatatctgccggatggagtttttatagtgaactcatacaagacaaagctcagtatagatataaaggttgaaacaaatgcgacttcaaccatgacgctgaacagctccaatatcacatatgacggactggaagatggatatacgcttacatttgtaacagataagagcagtgtcgtagtaagcggcacccagtctgatatagatacgctttcgggaactacactgaagggtaaaattgatgtgacaggccttgatgcaggtacacatacagtgacggtaaagccaaatctggatgagaccaagtacacatggggcgagataaaggttcagatagttatcggaaggaaaggtgacggaggcggcacaacgggaactgatggtacaggaacagcctcgggctcaannnnnnnnnnnnnnnnnnnnnnnnnnnnnnnnnnnnnnnnnnnnnnnnnnnnnnnnnnnnnnnnnnnnnnnnnnnnnnnnnnnnnnnnnnnnnnnnnnnntcagctggtacgtcatcgggcagcacatcgtcaggaaacaccggaaataacggctctgacagttcatcacattgatagatatataaccgaaaagaggtaataaaagtggtagcacaaaaaataataatcaagaatcctaccggattacatttacgtccggccggcaatctctgcaaagaggcaatgaaatttaaatcaaaggtaacatttatatatgacgagaaaaatgtagctaatgcaaagagtgtactttcagtgcttggagcatgcataaagtcaggcgatgagatagagcttatctgcaatggcgaggatgagagtgaggcgcttgaatatcttatacagtacatcaaggatggactcggagagtagtacacaaggaaacaggtatacatggagaaacatatatggagaagcttttaaccatagtcgttccggcttacaatgttgaaaagtatataaagaactgtcttgactcgtttatagatttgtctgtgctcagaagtctggagatactcatagtggatgatggttccacagattccacagccggcctggcacatacctacgagcagaaatatccatacagcttcaaggtgctctctaaggagaacggaggccatggatctaccatcaactatgcgataccgcgtgcaacaggaaagtatttcaaggtggtggatggtgatgactggctggacaagagccttctgccacaatttgtacagcttttgaagcacacgcactcggatgtcatatccaatgacttcaacctggtggatgataggacaaagaaggtcacaaagcgcagaaaggcagtgtccaactcttatcactacaacagggagtggggctttgctgaggcagtcatggacccgctgatcactatacattccatgaccatccgtactgatgtattgcagaagaatgatattcgtgtggatgagcactgcttctacgaggaccaggagtatatactctaccctataccatactgcacaagcatcacgttttcacctctgccgctgtatcagtacagacttggaaggagtggtcagagcgtggacataaagatgatgatcaagcgtcatgaccagcatcttaaggtgcttgatgcactgtttgagtacaacaacgtgcacggtaatctgcagacctacaagaagcagtaccttgagcgcggcatagccgaggcagtcgatgatgagtaccagatatttctggcaaagggcaatgatacaagaaacgttgagcagatgaagaagtttgacgagatgctgcgtgaggagcacccgggagtgtaccaggcgtgcagcaggaagagcgtctggatgcttagaaaaacaggttttaagatatttccgatggcagcatgggtctatagcagactacgtggtaattaatttcatgaataggcgttaatgagtatgcaatactctttttaataatagtaatcaggacggatagaacagttaatgagtaaaatattatcaatcataataccaacatataatgcagaaaagtttctgaataaggggctgtcgtcatttctggtatgcagggatacagatgcacagacagcacagcacaactgtaaaatggcaacggagggctgctttgaggaaatagatattgacaaggctatactcgataagcttgaggtgatagtcgtaaatgacggcacacctgacagaagtgttgaagtggcgcagaaatttgtggactggtatccggatacctttgtcatagtaaataaaacaaatggtggacacggttctgcaatcaacacaggagtggagcatgtgagaggaaagtatttaaaggtggtcgatgcggatgactgggtagatacgcttgcgctaaagcacctggttgaatatctcgagcatgtagattcggatgcggtgatacaaagcttcaggtattatgacatatcaaaggatgagtacagaccggcagatgtgagtgtgcctgattttacacgagagtacaatttaaaggatatagtaaacatgtgggatgatgtatttgatggactatcatttcacggagtgatatataacacagggttctataaagcacttggatataagctcacagagcatgtattttacgaagaccaggagtatgcaaccgttccgttttcgtatgcaaaaactgtcagatttattcaggaagagttgtatgtatacagagttggagatgtaaatcaaagtgtttcagcagcgagtcaggtgaagcgtcttccggatctggagcaggttatatttaatgtacttgaggcagagaagagctttgcaaaaatgccacaaggtggaaaggaacactttatcagaaagacgtcgggcataatcacaagctattatcaaatagctttgataaaaaataccgacagacaatccggcagagcgatagtagagcagtttaacatgaaactcgctcaaaaaagtgcacttatgtatgaggcagtacagcgtaaatataaagtatttcgtatgtttaataagctgcatgtgagcaacagcttttacgagaatcaatttgcaaagctgcttgagtttgcaaaaagggttggcagagcagacagactatacagaaaataatactgactaccattgtcaaatatggtgacagacagcgatataagtggaaattaacatatagaaacaggaattagataggatatggaaacagaaaataaaaagatactatcaataataataccgacatataatgcggcaaagtttttggataaagggttatcatcatttattattgatgataactctcttttaaatatgctggacattgttgttgtaaatgacggctctaccgataatagtgtggagattgcacaaaaatatgtaaataaatatcctgacgtgtaccggatactgaataaagaaaacggtggtcatggctcggcaattaatgaaggcgtaaaaataataaaaggaagctattttaaggtagtagacgctgatgactgggtaaacactgatgtgttgaaagaaactatctgttatcttagagataatgaaaataaacatgagaatttcgcagatgcagtgctgatgagctatagatcatatgtgctgcagagagaaaatactgatgagtatccatacgacgataaatatataacaaaaaatggtggaccatataatgcaggatatgtggatgagcatctgtatgatttctggtgggggctgagcctgcatggggtgatatataatacgcagttttatagaaatacaggactgacactctctgagggggtattctacgaggatcaggagttctcaataatcccaatggcatatgccgaaagtatctatgcatatgataaggcactttatgagtatagagtcggtgacgtaaatcagagcgtttcgatagaaagctcactgaagaggcttgaccattatgagaaggttatcatgaggctgattgaggcaggccgggatgcggagcactttagtataggcggaaagcagctgtggtttgataaaacaagcaaatttatcaacgactatttgcagctttgcctgattaggaacactgataaaaaacagcttagaaaaaggatgaagctgtttgtcagtcaaatcgaaaaaaagaatacagatatgtataaatgtgtaaataagaattataaagtattttgtgcgttgaataaaatgcatatgagcgataaggtttatcagaactattttatacgcctgttacatattgtgcgtcattaggaagcttttttgttatcataatgatgaataatgtgtctaaataaccggaaaatatgtgacaaatctcacttgaggcatatataagaaagtgataaaatatggtgctgtgagaataatataaaattaagataaagaggacaaagatgaagaagaaaagtataaaactcctggtagttttggcctgtgtgcttatggcattgggaatggcaggctgtggaaagaaagcatacaagacattccctgaaaagtacaagcttgcatcagttgatgtaggtggaatgactgctgacgaggcaaagaaagccataaagactgcagtaggcaagtataagatatcagtgaagcttgacgatgcatcatttgatatgacagctaaggatttgggactcaagtacaatgacaaagcagatcttcaggaactgataaatgcggccaataaggataagaaaccggaaaagcaggtgaagctttttaaaatggataagtctgatgagctggagactgctcttgtagactcttatatcactgcaaaaacacagtcacagtctgatgctacggcacagagtgatacagatgcagaggcaaatgatgacgaacaaaagaaggctgaggcagacacacagacctttgatataagatcaattgtgccatatcgtgctacaatagcatacaatgcagaggcaggacagtttgagggtgttgacggtgtatcgggagatgcacctgtatatgacaatgcagctacaaatctgacaagcgctgtaaaggagctgaaggataaggtagagcttacatctgcaacaggatatgttgatggagaaaaggctgcggacagcgagctggtaaagaaggcattaaaagaagccaatgcatatcttgatgtgacggtgacatgtaatttcacaccggcaacaggtgaagcagctacagaggctgtaggaaaggatcagatagcccagtggcttatagtgggcaatgacggattgtcagtttcacttgatggtgagaatatggctacatactgtacagagcttgcaaaaaagcatgatgtgtcaaagaagaaaacaggtcagtttaagactacaggcggaagtataataaatgtgcctgttacatcatcaggacagactgtagatggaaacaagctgtatgaggcgattgctgaggcaataaacaataaaaagtctgcaacagtggaagcagtttacagtgaggcaaaggaagaagaaacaggtgaatatgtcacatatggtggcaattactgtgaagtggatcttaccaaccagatggtatatgtatacaagaatggagagcttgttgtatcaagtcagtgtgttacaggatgtatttcaaaaggtcatggaacacctaccggagtgtattctatcttctcaagagataaggacagatacttaaggggagacggatataagtcatgggttaatttctttataccattcaatggtggaattggattccatgatgcttcgtggagaagtaccttcggtggaaatatctacatgtacagcggcagccatggctgcataaatatgccttattcagctgcgaagaagctatatgagaatgtgacattagatgaaaaagtaattgtatatggtggtgttgacaaggtggccggcaaagcgcagagttttggcggagctggctcttataatgtgacagagggtgacggagcattcaatctcggtgtgacagcagaggataatgcaaagctcacatactcaagtgataatgagggtgtagtgagagtggatgagaacggtaatgtgacgatagtaggtgtcggaactgcaacaatcactgtcaagtctgaggctactacaagctataaggccggcagcaagacaattacaatcactgtaaatgcaaagccacagccaaatcagacaccatctgtgacaataggttgcggtaataaaactgtaacagagggagatgcaccattttctttaggagcaagtgcttcaaacggagcagggctttcttaccagtcaagtgatacatcgattgcatcggtggatgctgccggaaatgtgactatccacagggctggtagcgtacagattacagctatagcaggtgaaatggcaggctggaatagcgcaagcagttcaataaccgtaacagtaaatccaaaaccacagccacagccggtggcaccgactgaaccatcagaacagccacagcagaactagaacagcaacaatagaacaggaacaaataaaatatagcaaatgaaaatacaataaagaaaagtgccggaaacggcacttttctattatatggcataattatttacaaaatatgacatattcttaatactttttttgtgacttctaaaaatagacaaaagaaatgaagtgtagtaatatagcataggattaaaccgaaaaataatgttacaatatgtaaagggtaggaaaatggaaaacaacgaaccaataagagatcaggaaattgaaatcgatttagtagcgctgtttcacgaattagtgaagcactggaaggcacttgtggcatcaatggtgcttcttgcagcagtatttggattatactccaagattacttttgtaccggagtatgaggcatctgcagagatgtatgtactgagcaagtcaacatctatcaccagtcttgctgatattcaggtaggctcgagtctgacaaacgactatgagtacgttatcacaggcaggacagttttatcacaggtaattgacaatctggatatggacgagacatacgagcagcttagcaggagggtttcaatagagaatccgacagatacacgtgtgctcaagattgtggttacagacactgatttagaagcttcaaaaacagtggcagatgagattgcaaaagtttcatcacagtatatcgctgacaatatggatcagtcacagccaaagattatccagacagcatatgcttcaaagacaccggtgaataataatatccttaagaatacagttatcggtgctgtactcggactgtttcttgctgccggcatagttgtacttggatacatgcttgacgatacaatttccaatgcagatgatatggaggccagaacaggcctcaaggtgcttgcatcacttcctgttgatgaggcagagtatgatggagcaaagtcaaagagaagaaaaaacaaaaaaaaacagtcatctaaatcagacgatagcaagagtaagaagagggcaatttaatggaaacagtagttattaatcagataaaagaccagagctatacaatgaaggagtctcttcgagctcttaaaacaagcatcagtttcagtggaaagggtgtgaagtccatcctctttaccagcagcttgcctaatgagggaaagacaaccgtagttatggatctggctcgttcgatggcggactctaagaagtcagtccttgtagtagataccgatatgcgtaagtcagtccttgtaggacgaatcagagcgaagctggagagcggtggaaagatatacggactctcacattatctctcaggtcaggtatctttggacaaagtgatatatgcgacaaacatcaagggtgtgttcattctttttgcaggacatgaggtaccaaatcctacggagcttcttgagacagaggagtttaaagagcttatcgagtttggagagaagaactttgactatgtgcttgtcgatactcctcctacaggagctgcgattgatgcggccgtagttggtaagaatgtagacggagcagtaatagttgctgcccagaatgctacaagcagccgtgcaatcatcaatacaaagcgtacacttgaggactcaggcgtcaagattcttggagctgtgctcaataagtgcaggtttgaggagtctaagtatggtcattactatggaaactattatggtaattattatggcaattattatggcagggacgatgacgaaaattagcaggcacagacatatatgaatgacggagaatagtgcagatgaaaaaaaagaaaaatataattattacggcagtaatgattgtacttattgctattatagcgataatacttgtaaagattaacagcagtaatgttaagaataaagaagccaaagacataaagccgggtacagaggcagttaagacaaaagccgatactcagactgaggatgacaacattacagacaaatcaggcatagaggaatttgcactatttggtgttgacagccgctcagatcagcttgataaaggaacacgttccgattccattatgattgtcagggttgatcatgatgctaagaaaatccgcatggtatctattttcagagactgtatgatgaatattgatggtcatggataccagaaggtgacacatgcacatgcgtttggcggaccggagcttgcagtagatacacttaacaaaaatctggacttagacataaagaattatgttacagtcaatttcaatacagtcggtgaaattatagatgaggtaggaggcattgtacaggatattgatgcatctgaggcaaaggtgataaacggatatattgatgaggtcaataagattcgtggaacaagctcatcccatattgattcagccggcacatatacactggatggaactcaggcagttgcgtattccagaatacgttatacagctggaggagactataagcgtgctgaaagacagagaacagtgctgttcaaggtttttgaatcagctaagcagatgaatacagcggcaaagattaagatggtatcagacctgattggacatgtcaacactaactataatactgatgagattctttcagtatttaaaaatcttgcagactatacagtagaggattcgacggcgtatccacaggtgttctatggtggaaaggtcgatggtgcatgggttgaggtgccgactacacttgcagacatggctacaggagtgcatcagttccttgaaggtgatacaggctatactcctagtgcaactgtaaaagaatacagcagtgcattatcaggaaaagtaagcggacctaataacgatttaacaaacacaaattttggggattaaatatgaacttcagacaaaatggagataagtacctcatcacaatagaagtaattgcactgatagttgtgctggtatttggagcagtgcattttgtgatgccggggaataagtcgaataagaaaataacagaaagccagcaggagacacagaatcctactcaggagacggatggaactcagcaggtacaagctgatggacagcaggcagcaccggcatttactccgtcagattctgtcaagacaaagctgtcttctatgacaacagaggaaaaggtagcccagctattcattacgagacctgaggagattacaggtgtatcacagttgactcaggccggtaacaagacaaaggcagctattggtacatatcctcttggtggttttgtgttcagacaggagaacttctcaggagaggccgcagttacaaagatgatgagcagtctgcagtcattttcgcaggagcgactgggcgtgaatctgttccttgcaattgatgaagaaggtggagaaagacttcctcttgcttcagctaatggatatgaggcacagcaggcaccatcacagcttggagatgctgacgcagcgggcagcagtgcaggaaagataggctcatatatggctaccaatggccttaatatgaattttgggccgacagcggatatagcatatggtgataatgcagataacgatatatatgcatttggcagcgagtcagcgactgtaggtgactgtgttgcagcacaggtaagcagctataatgatgcaggaatcaattctgtagcaaagagctttcccggaaaaggaaaggctactacagattcagcgacaggaatgctctggatgacagacaagctggaggatcttgaggcatctgattttgtgccatatcagaaggcaattgaagcaggtgttccggcagtcatgatgggaaatgtgatttgccagagtgtgacaggagaggaaaccacgccatgctctacatcagcaggtgccgtaaactatatgagaactaccatgggctttaatggccttttgattacagatgatttatcagatgcatctcttaataaggtatgtacacaggatgaggcggctgtggcagctgttaaggcaggaatgagcatgatttatgtttcaacaggctttgagagcagctataatgcagtgctgtctgcagttaacagtggtgagataccggcagaaaaattagatgatgcagttggaagaattctaacaacaaaaggaatttaatatatgcaaataaaagtaaatccgttatactatagggtatagcggatttttgttatatattttgtatatttaaaggagaattgttgatatgtcaaattgtttcaatccggcaaatattcttttgccaaacgatggtatagatatggaaaaatggtcagttattgcctgtgaccagttcacaagtcaggctgattattgggatgctgtggaaaagtatgtgggtgatgctccgtcaacacttaatgtggtattccctgaaatatatctgggaacaattgcgaaacaggagaatgattgcaattcgtcaggggatggtgtcaaaaatgacaaagaaaccggcagaaaaacaaaatatgcttcaatgactgatgatgagagaatcaaatatattaataccactatggatacatatctcacagatggaaccttaaagcaagcggtggcagatggctatgtgcttgttgagcgtactacggagtcgggggtgcgtcttggaatagtaggacttattgacttggatgactatgatttcgacccgaaaaagaagactctcatcagagcaacagagggaacagtaatctcacgtatacctccgagagtgaaaataagagagaatgcagctattgagctgccacatgttatgctgcttgttgatgatcctatagacagacaaaaaattgatggatgccagggtgctacacaggaagatgctgcaaatatagcagctgtaaagcatggaataatcgagtatgtgtatgctatcagggatactcttcgtaagctttacgatacagagctcatgcagggaggcggacatattcgaggctatgctgtcgagggtgaggcagcaaagcaggtgacagaggcattcgcagcaaaacagaatagctgtggaggctttttgtttgcagtaggtgatggaaaccattcgcttgcaacagcgaagacctgctggaaaaatatcaaaaaatccggaaaattcacagaggagcagttgaaaactcatcctgcaaggcatgctcttgtggaaatctgtaatctgcacagtgaggcgcttgagtttaagcctattcacagactgctaacaaatattgatgtaaaggacatgctgtcgtttttcgaagctgaaatcacaaaacaaggacttgcgagcgctgagggcgatgagatagtatttgagtatgttgaatcaagcgctaccgaaataaagaattacggaattaatatcacaaatagaggtgaccgccttccggttgagatactccagggtattttagataagtatcttgagacacatgacaatgtggaaatagactatatccatggtgatgaggcacttcacggactggttaaggagactaagggatgtggaatctttcttcagtcgatagacaagagcacattgttccctgcaatcaatgcgggcggggtgctgcctagaaagacattctcaatcggagaagcgaatgagaagagatattatatggagtgtcataagatatctatgtagctttgatttatatacatatgttaattttatcacatttataaacaattgattttatgaagtcgaataatttaacaaataagcttattttactacacaaacacatttattaagtgtataatataagaaaaatttattcacaaggggacgacaatgggaaaatattttggaacagacggcttccgtggagaggccaatgtcaatttaacagcagagcacgcatatcagattggtagatttttgggctggtattatggagagcttaagaagcagaagcagctcgacgagccggcgaagatagtaataggaaaggatacaagacgttcaagctacatgtttgagtactcccttgtatcaggacttacagcatcgggagcagatgcatatctattacacgttaccacaactccatcagtggcatatgtagcaagaaccgatgattttgactgtggtatcatgatttcggcaagccataatccatactatgacaatggaatcaagcttatcaacagcaatggagagaagatggatgaggagacaattctccttgtcgaggactatatagacggcaagctgcgcctgtttggtcaggagtggaaggaattgccttatgcacataaggatgctatcggatgtacagttgactatgtagcaggccgtaaccgttacatgggatacctcatatcgcttggtgtctactcgttcaagggcatgaaggtaggtcttgactgtgccaacggaagctcatggaacatggcaaagtctatttttgaggcacttggagcaaagtgctatgtcatcaacaatgagccaaacggtctaaacatcaacaataatgcaggctctacacatatcgagggcttacagaagtacgtggtggacaatggtcttgatgtaggcttcgcatacgatggagatgcagacagatgtctctgtgtagacgaactgggcaatgtaatcacaggagaccatatcctctacatatatggaaagtacatgaaagagagaggaaagcttgataacaatactgttgtcacaactgttatgtcaaactttggactctataaggcccttgatgagcttggaatcggctacgcaaagactgcagtaggtgataaatatgtatacgagtacatgcagcagaacggctgccgcatcggcggagagcagtcaggacatatcatcttctctaagtatgcatcaacaggtgatggtatccttaccagccttaagatgatggaggtcatgatggcgagaaaacagaagatgagccagctctgtgaggggcttagtatctacccacaggtacttcagaatgtgcgtgtggctgacaaggccgaggcacttgcaaatcctgaggttcaggcggctgtcgaccaggttactgcagagcttggcgatacaggacgtatacttgtgcgtgagtcgggtacagagcctgttatccgtgtcatggttgaggcagagagcgaggaaatctgtcagaaatatgtggatatggttgttgcaaaattaaaataaaggttaatgccaaagataatacacgtaatatacaaaagctgtgtgagaatatcatgcagcttttgctgttatcagggttcataaatgagtgaattaagataaattaagtggatataatttaatctgtagagagaatagtaattaaattctgccggaggaaatagtctatgcctgaaatcttaattatttttatattatgtgccggtattattgtaattggcataatattgtgtataattattaaagtgagtcatatgtctgatgacgaacagaaaaaggacgatgaacgacagctggagttcattcgtgcctacaaggagcataaaaaaggacattgagtttaaaggattatataataagagacatacaggaaaagttcaaatatcttccgtcagcggtatatttggctttaatctgcattgcgatgtatatttttgtgtgtctgctgcgatatcttttcacaatgagagaggtatcacaggcagatgagagaagaaaaaagatagtgggcaaaatctggcatatgctgttctgcggcacctttgtggcttatatgtatacgcttataatgatagtgtattattcaagggagccgggaagcagaaccggcgtcgccgatatggtgctgtggagcacatggggcatgacacttcagatgcacgcttattttatagaaaatatagtattgtttataccatttgggcttttatttccactggtttttaaaaattggatgagatggtttacaatacctgttggtgctcttataagcgcagcaattgagtacacgcagctggttaccggcagaggatattgccagctggatgattttgtgacaaatacggcaggagcagcaatcggattttttatttatttgatgttatatgcagggtggcttatatggaaaaaaataagataagcattgtggtgccatgctttaacgagaaagaggctctgcctcttttttataataaaataacctgggtactgaatcagatgagtcaagcgagtgagacatcgggattgtcatatgagctgattatagtggatgacggctccatggatggtacgcttgatgttgcaaaggagcttgccacaaatgattccggtgtgaaatacatatcattttcgcgtaattttggcaaggaggcagccatgtatgcaggcttgcagcatgcggtgggtgaatatgtggcaataatggatgcagaccttcaggatcccccggaaatgcttccgaagatgtatcaggtccttacaaaagagggctatgatgctgtcggtacaaggcgagtgacacgcaaaggtgaaccagcgattagatctttttttgccagaaagttctataggctgatgagtaagatttcaaaggcaaatatggttgatggggcacgtgactacaggctgatgaacaggaaatatgtggatgctcttttatcgctaaaagagtacaataggttttcaaaaggattatttggctgggtaggattcaaggtcaaatggcttgagtttgaaaatgtaaaccgcgtggctggcgagacaaagtggtcattttggcagctgtttctctatagtttagatggaatagtagcattttcaaatgctccgctatacatggcttcaatagcaggagtgttcagctttattgtggcgatagcagctatgctttttatcataataagaagacttgtatttggtgatccggtagcaggctgggcatcaacggtggtcatcattctttttatcggtggtatacagcttcttagcatagggatacttggactgtatctgtcaaagctttatctcgaggcaaaggacagaccgatatatttaataggagaatcaaatatagaaaaacctacagaaaaaaattaaggctttcttaagaattattaattcgatagcacatgacatttttttcggatgttatgtgctataattttttcggcaacgtttattaatgcatgaaagaggactaagatgaaaaacgtactggagtggcttgaggccacagtggcaaaataccctgacaagcctgcattttcggatactgaatgcagcattacgtttgcgcaggtgtatgatatagcaagaaatacaggagcatatctgatagaacagcttggagtggacagaacccctgttgcagtatttgccggaaggaaaatggtgacaccggcatactttctgggagtggtatatgcaggcagaccgtatgcgccgattgatgcatcgcttcctgacaagagaattgaaaaaatacttgaaaatctgtgtccaagggctattgtggcagacagggaaagccttgagcatgtggagagcatagtggatgagctggcaaagtcagaaggcttcgatagaccgcagatatttattgctgaggatatatcgcgcttcgatcaggtggcgggcgctgatagtaattgtaaaatcagtgaatcagcaggagacgctgtgacggatagtgagaacgatacagatggtggtgttgtggcaggctgtgcaggaaaaaaagatgacagctcactggagaagcttgcaacagtccgcaggcagatgtccatgacagacccgctgtatattatctacacgtcaggctccaccggcaatccaaagggagtcatgacatcgcatctgtcacttatgacatacatcaatgcatattgtgatgtgatgcatattgaatgcgacgatgtgctgggcaatcagtcaccgcttgactatattgcggcaatcagggacatttatctgccgctaaagaccggctgcagcacagcgattattccaaaagagtattttatggagccaaatgtcctgtttgattacatgaatgataagaaggtcagcagtgtcggctggagtgtttcggcatttaccatcctcacatcgcttggagcatttgaggaagtagggcttaagagtcttagaaaaatctgcttctcaggctcagtgatgccgtgcagggtgcttaggaaatggcaggaaaatctaccggaagcacattttgtgaaccagtatgggccgacagaggccacagcatcatgcacatactatagcgtggatcatacagtggaagaggacgaggtgcttcctataggaaaagcctatgacaattacagggttttcctgatagatgagcatggaaatgagccggctgtcggagaacagggcgagatatgcgtatgtggaccaatcctggcgctgggttattataatgatccggagaggacagctgcggcatttacactcaatccacttaacaaggcttatcctgagcgtatgtaccgcacaggggattacggaaggctcgatgaggatggcatacttcatttctgtggacgtatggaccgccagataaagcacatgggacaccgtgtggagcttgatgaggtggagcatgccgccaatgtggtcgagggagtcgcagaaagctgcgttatatataataaagcaaaagaggtgctgatacttttctacacaggtgactgtgacaggagaagccttgcgctggcactgagggacgagctcccgggctttatggtgccaaggaaaatcaagaagttggagcagcttcctaagcttccaaacggaaaatatgatatgaaaaaactggaggaaatgtaaaatgagagacacaattttagagattttagaggaattaagaccggatgtggattttgagaaggagacaaagctcatcgatgacaaaattcttgagtcatttgatatagtttcactcgtgtcggagttgactgatgagtttgacatcacaatcagaccaaaggatctggttcctgagaatttcaactcagtagatgcgatcgagaagcttgttaaagagcttgtggaggaataaagcatatgagacagacaccgtactatgtatttgatacggatgagtttgcaaaaagagcagccatgataagggctgctcttgattgtaaaggaggacgtaggataccgctttgcttttcgataaaggcaaatccgtttctgcttcacaggctgccggagggcttagatcatgtggaggtgtgcagcccaggagagcttgagatatgtatagcactgggcgtgaagccggagagcatcatctattcaggtgtgatgaaggaaaaatgcgatatagagcgagcagtttcatatggcgccggtatactcacctgtgagagcataagacatgcagcgctgatatcagaagtgatgcttgaacgtatgccggaaggtgcgcatgaagctggattggtcgaaaagaaggcacaggtcatactgcgcctgacaagcggcaaccagtttggcatgtcgcttgaggatattgaatatatcatttcgcatccggatgagtttaagggcatcatggtaataggcatccactattattccggcacacagaagagcttgcgcaaaataaataaggacttgcaaaaaataaagtctgcacttaccggattaaaagaaaaatacggttttgagccacagcttgtagagtatggcccgggactttgtgtggagtattttgaggaagactggcaggaaagggaaaaacaagcacttgatgaggcagcagaggtgcttagagaatttgctgtggaatatccgcttggcattgagatgggacgtttccttgcagcctcatgcggtaaatattacacacaggtaaaggaccttaaatcgacaggcgatgccaattatgcgattcttgatggaggaatccaccatctgaattactttggacagagaatggctatgcaggtgccgccgattagtatatatagagctgccggtgtggaattcacagaactgccggacacagactatacactctgcggaagcctctgtacagtggcagatgtgctggtacgcgaggtgaagcttaagaagcttgaacttggtgatgttcttgagttcgggcactgtggcgcatactctgtgacagaagcaccggcgctatttctttcaagacagcttccggctatatatgcatattcgaaggaatatggatatgagtgcctgagggagcatattcctgcggctgagataaatctggccggaaaaaaattgtaaataaaagcgccatggtaaattgccatggcgcttttgaatatgacatgaacaaagcattttgtgggaagcctgactattagccaagctccttctcacacatatcaagtacagaagcaatggtagtatccatatcgtagtacttgtactcgccgagacgaccaccgaatataacaccggtctccttatcggcaagctccttatacctggcgtagagctgtccgtttttctcatcgtttacagggtagtaaggctcatcgcctgccttccactcagaagagtactcacggctgataatagtctttggcagatcatttccatcctcatccttaccgaactcgaaccacttgtgctcgatgatacgtgtccatggagtctcgcggtctgtatagttgacagcggcatt

SEQ ID NO: 194 - DNA, 23747 bp, unidentified
  source 1..23747: mol_type = unassigned DNA
  misc_difference 15981: note = a, c, g, or t
  misc_difference 15982: note = a, c, g, or t
  misc_difference 15983: note = a, c, g, or t
  misc_difference 15984: note = a, c, g, or t
  misc_difference 15985: note = a, c, g, or t
  misc_difference 15986: note = a, c, g, or t
  misc_difference 15987: note = a, c, g, or t
  misc_difference 15988: note = a, c, g, or t
  misc_difference 15989: note = a, c, g, or t
  misc_difference 15990: note = a, c, g, or t
  misc_difference 15991: note = a, c, g, or t
  misc_difference 15992: note = a, c, g, or t
  misc_difference 15993: note = a, c, g, or t
  misc_difference 15994: note = a, c, g, or t
  misc_difference 15995: note = a, c, g, or t
  misc_difference 15996: note = a, c, g, or t
  misc_difference 15997: note = a, c, g, or t
  misc_difference 15998: note = a, c, g, or t
  misc_difference 15999: note = a, c, g, or t
  misc_difference 16000: note = a, c, g, or t
  misc_difference 16001: note = a, c, g, or t
  misc_difference 16002: note = a, c, g, or t
  misc_difference 16003: note = a, c, g, or t
  misc_difference 16004: note = a, c, g, or t
  misc_difference 16005: note = a, c, g, or t
  misc_difference 16006: note = a, c, g, or t
  misc_difference 16007: note = a, c, g, or t
  misc_difference 16008: note = a, c, g, or t
  misc_difference 16009: note = a, c, g, or t
  misc_difference 16010: note = a, c, g, or t
  misc_difference 16011: note = a, c, g, or t
  misc_difference 16012: note = a, c, g, or t
  misc_difference 16013: note = a, c, g, or t
  misc_difference 16014: note = a, c, g, or t
  misc_difference 16015: note = a, c, g, or t
  misc_difference 16016: note = a, c, g, or t
  misc_difference 16017: note = a, c, g, or t
  misc_difference 16018: note = a, c, g, or t
  misc_difference 16019: note = a, c, g, or t
  misc_difference 16020: note = a, c, g, or t
  misc_difference 16021: note = a, c, g, or t
  misc_difference 16022: note = a, c, g, or t
  misc_difference 16023: note = a, c, g, or t
  misc_difference 16024: note = a, c, g, or t
  misc_difference 16025: note = a, c, g, or t
  misc_difference 16026: note = a, c, g, or t
  misc_difference 16027: note = a, c, g, or t
  misc_difference 16028: note = a, c, g, or t
  misc_difference 16029: note = a, c, g, or t
  misc_difference 16030: note = a, c, g, or t
  misc_difference 16031: note = a, c, g, or t
  misc_difference 16032: note = a, c, g, or t
  misc_difference 16033: note = a, c, g, or t
  misc_difference 16034: note = a, c, g, or t
  misc_difference 16035: note = a, c, g, or t
  misc_difference 16036: note = a, c, g, or t
  misc_difference 16037: note = a, c, g, or t
  misc_difference 16038: note = a, c, g, or t
  misc_difference 16039: note = a, c, g, or t
  misc_difference 16040: note = a, c, g, or t
  misc_difference 16041: note = a, c, g, or t
  misc_difference 16042: note = a, c, g, or t
  misc_difference 16043: note = a, c, g, or t
  misc_difference 16044: note = a, c, g, or t
  misc_difference 16045: note = a, c, g, or t
  misc_difference 16046: note = a, c, g, or t
  misc_difference 16047: note = a, c, g, or t
  misc_difference 16048: note = a, c, g, or t
  misc_difference 16049: note = a, c, g, or t
  misc_difference 16050: note = a, c, g, or t
  misc_difference 16051: note = a, c, g, or t
  misc_difference 16052: note = a, c, g, or t
  misc_difference 16053: note = a, c, g, or t
  misc_difference 16054: note = a, c, g, or t
  misc_difference 16055: note = a, c, g, or t
  misc_difference 16056: note = a, c, g, or t
  misc_difference 16057: note = a, c, g, or t
  misc_difference 16058: note = a, c, g, or t
  misc_difference 16059: note = a, c, g, or t
  misc_difference 16060: note = a, c, g, or t
  misc_difference 16061: note = a, c, g, or t
  misc_difference 16062: note = a, c, g, or t
  misc_difference 16063: note = a, c, g, or t
  misc_difference 16064: note = a, c, g, or t
  misc_difference 16065: note = a, c, g, or t
  misc_difference 16066: note = a, c, g, or t
  misc_difference 16067: note = a, c, g, or t
  misc_difference 16068: note = a, c, g, or t
  misc_difference 16069: note = a, c, g, or t
  misc_difference 16070: note = a, c, g, or t
  misc_difference 16071: note = a, c, g, or t
  misc_difference 16072: note = a, c, g, or t
  misc_difference 16073: note = a, c, g, or t
  misc_difference 16074: note = a, c, g, or t
  misc_difference 16075: note = a, c, g, or t
  misc_difference 16076: note = a, c, g, or t
  misc_difference 16077: note = a, c, g, or t
  misc_difference 16078: note = a, c, g, or t
  misc_difference 16079: note = a, c, g, or t
  misc_difference 16080: note = a, c, g, or t
gcctcattttcgggcagcaatgccttaggctctaccagtaccggtgcatatacggtgttgaatttgtgtacgatctctctggtctgttcgatcatgggcagctggtcaccacctacgggaacggtggtcgccttgaaagcggtaatatcggaagcctggctgatgggataggtaaaaaatcccacagggatgctggcttcgaagttacgcatctgaatctcactctttacggtcgggtttctctgtaatctggctacggttaccaaatccatgtaatagaaggtcagctcgcacaattcggagatctgagactgaatgaagatcgttgccttgctgggatccagtccgcaggacatgtagtccagcgccacttcaataatattctggcgcaccttctcgggattctcgatattatccgtcagcgcctgtgcgtctgcgatcatgataaaagtcttcttatattcgccggaattctgcagctctacacgtcttctcagggagcctgcataatgtcccacatgtaatcttccggtgggtctgtcacctgtcaaaataattttgtccatttcgtcctctcaatccgccgtctacgcggctatacgtcattgcttctatcataccatctttttgcatagaagcaaatgatttttctacagaattaacgctttgtgtgcaagccccctcgcattcgttctgctgttctatggctgaactattgcaagcagcttatccagaattttatgtgccacctgttccttgctcatcagttccagactctcctcggaattctttgtgatcagtgtcacaatattggtgtccgtaccaaagcccgctcctgcgctcttcaaactgttggcacagatcatgtcacagtgcttgctctccagcttcttccgggaattctccagcacattttccgtctccatggaaaatccacacaaaatctgtcccggtctcttgttttccccaagggccttcaaaatatccttcgtccgcaccagagggatcgacatgtctccgtcttttttcttaatcttattgtctgctgtcactgccggggtgtagtctgccacggctgctgccttgatgacaaaatcatagtcctgcgctctggacacgattgcatcgtacatctcttctgccgtctgtaccggcaccacatttacaaacaaaggcggctccacatccgtatgggctgccaccaccgtcacttctgcgccgcggtgcattgcagctctcgccagggcataacccatttttccactggagtgattcgtgataaaacgcaccgggtcaatgggttctctggtggcacctgcggagatcagcacctttttgcccgccagatccttctcgcaggcgatctccttcaccacggcttcgaacagtacggactcctccggcattctgccgtcaccgatatcgccgttggccagcattcccgtggccggagtgatgatctcatagccgaaatgctttaatttttcgatattatcctgcacgatggggttgtgatacatattatgattcatggcaggggacacaatcttcttgcagggacatgccatgatcgtagtagtcaacatatcatctgcgatgccgtttgcaatcttgccgatcacattggcagaagccggtgccaccagaaccacatccgcccgctttgccagtgccacatgttccacactgtactggaaattgcggtcaaaggtgtccaccagacatttatgtcccgtcagactttcaaaagtaatggggttaatgaactgcgtggcattctgtgtcatcagcacttccacatcacagtgctgttttaacagcatccgcgctacattggccattttatatgcagcaatacttcccgagattgccagaactacggtctttcccttcagcatagtcgtctccttttgcctgatttatcaaaaatacttcaaaactgtactcctaaaataccataagtgcatattttatgcaaatatcacttttctttttgtccgggatatgatataaacagtaggagtgtcccgaatcaccggggcagcttgtattgtatctcccagagggagaatggtaacaaggaggaaaatttcatatgaacaaacaaagtaagacaatgcgactcacgttgatgggattgtttgctgcggtacttttgctgatggcttataccccgctcgggtacctgaacatcggccccctggcaatcaccctcaatgtcatccccgttgcactggctgcgatcacactgggccctgtaggcggagccgccatgggagctgttttcggattgaccagctttttgcaatgcatcggcgtgggaggcaccagcgccatgggagcaatgctttttggcatcaaccctgtgctggccttcatccagcgtttcatccccagacttctggacggatttctgttgggatatgtcttccgttacagccgcaaagccgtaggagacagaatcgcctgcatgatcaccggattttgcagcgcatttttcaacaccgcatttttcatgtcccttttagtactgctgttcggcaatacttcctatgtgcagggactgatgggtggtaaaaacgcgattttattcatctgctcttttgtaggtgtgaatgcggtcttcgagatgtgtgcatccacgttcctgaccggagcggtagggctggcactgatcaaggcaaaagtcattcctgtatatcagaaagcagagtctgcagcataacaggagtatacccgtggtactgacaatcgacatcggaaatactacgatcggcatcgggggatttcagggaaataagctgctctttattgagaagatatcgtcccgccgtcccctgtctgatgccggatatagaaaaaaactgaatatgattttagacaaacacggtctgtccgccgaagcctttgagggatctgtgatctcctcggttgtgccttcggtgacagccgttttttcctctgctctggaagcttttctggggcagaagcctctgcttcttacccatgaactggatcttggctatgagatctgtacggaatttccggaaaaggtgggctgcgaccgcctggcagatatcgccggagccatttcccgctatcctctgccactgatcaccattgatctgggcaccgccacgacatttaacgtgttggatgagaaccgtcgctttttaggcggcctgatccttcccggcgttggaaccgcccacagggcacttttaggcaggaccgcccagctcccgaaaggggacattcatatgcccgcccacaccatcggtgcgaatacgcaggaatgcatcaccgggggaatgctcttgggcaacgcctgtgccatcgacggactgatccgccgtatccagacagagttagggcaaaaagcaacggtcgttgccaccggagggtacgcaacgaccgtcattccacattgtgaaacgaagatccatatcgatcagaatcttcttatgaaaggtctgagatccatctacgagaataatacctctactggatcaccagattagagtagcccatcaggctctcatccacagcatgtgcggcttctctgccttcacggatcgcccacaccaccagggactgtcctctgtgcatatcaccggtgacgaatacattttccacactggtctggtatttgccgggggcagtttttacgttggtgcgttcatttaattccaccccgaaagcatcggtaatatatttctgacttcccaaaaatcctgctgcgatcagtacgatctccgcatccaggatctgctcacttccggcgatctcctgcatcttcatgcgtccggtagccggatccttttcccaggacagcttcacgatcttcacggctttcaggttaccgttcttatccttgataaattccttgaccgtagattcatagattctcggatcatgtccgtagactgcaatggcttcttcctgaccgtaatcggtcttgcagaccttcggccattcgggccagggattgttctctgctctcttgtccggagccttgggcatcatctcgatctgggttacagacttggcaccgtgacggatggaagttcccacacagtcattaccggtatcaccaccgccgatgatgaccacgttcttacccttggtctccacatattttttatcttcaaagttcgaatccagcaggctcttggtattggctttcagaaaatccaccgcgaaatagattcccctggcatctctgcctggcgcattgatgtctctgggattggaagcaccacaggccagtacgacacggtcaaaatcatgtaacagcttggatgccttgatgtccttaccgatatccgtaccggtgataaaggtgacgccctcttccttcatgatggctatcttacggtcaatgatctgtttctccagcttcatgttagggatgccgtacatcaacagtcctcccacacggtcggagcgctcaaatactgtgacctgatgtcctctctggttcagcagatccgccgctgccagtccggaaggaccgctgccgatgactgctacctttttgccggtgcgtaccacagggggcttggctgccgcataaccctcgctgtaggcgttttcaataattgcatattcgttctccttggtggagaccggatccccattcaatccacaggtacatgccgcctcacacagagccggacatactctggacgtgaattcggggaaattgttggtctttttcaggcggttgtaagcctgttgccagttgccggtatataccagatcgttccactccggcaccagattgtgcaggggacatccgctggccataccgcagatcatcatgcccgactggcagaacggcacgccgcattccatacatctggcaccctgtaagcgctgcttttccttcggcagatgctcatggaattcgttaaaatgctgtattctcttcttaggatcctcagccacgctgacttcccttttatattccataaatcccgttggttttcccatgactctctccattctgcagacgcttcggcgtcggaagaatcgcgaactaaatttcatatttagttctgcgataaactaatttgtggcgcccgcggcacaaattagtcgtgtgaaaagcaatctatcaagattacttttcacactggcctcctactttctggtgttggcataaaatgcttcgatctgtgcctgctctgcgctcagtcctttttcctccatctggacgatggtctttaagactctctcataatcatgagggatgatcttcttgaacttgggcagatactctccaaagttgtccagcacttccttacccttggcggaattggtcagtgccacatgctcctggatcatggatttcaactccagcacatcatatttggatgtgatctcgctggaggataccatttccttattcagacgcttgtacaggtcgttgccttcatccagtacataagcgataccgccgctcataccggctgcaaagtttttaccggtgggtcctaagactaccacacgtccgccggtcatgtattcacaaccatgatcacctacaccttcgacaactgcgatggcacctgagttacgtacgcagaaacgttcgcctgccacaccgttaatgaatgctttaccggaggttgcaccgtacagtgccacattaccgatgatgatattttcctcagccttgaacctgctgccctgaggaggatataccaccagcttaccgccggataagcccttaccgaagtagtcattgctgtcgcctaccagttccagagtcaggcccttggggataaaggctccgaaggactgtccgccggcacccttgcacagtacatggtaggtatcctcttccacatcatcgcccagttttctggtgatctcacttccgaggatcgtaccgaaagcacgatcggtgttgctgacgtctacttcgatgctgcgcttctgtcctgcgtcgatggcttttcctaactgctttaacagcaccttctcatccagtgtcttctctaactggaagtcatagacctgcctgggatcaaaggtcaccttctgcttgctgccctcgtaaggattgcttaagatctgggtcagatccacttcctcctgacgatcggtcagatgctcttttctcttcagcagatcagttctgcccaccagttcatctacggtacgcacgcccagtgctgccatgtattcccgcagctcctgcgcgataaatttcataaagttttccacatattccggcttaccgcggaagtttttccgcagctccgggttctgggtagccacgcctaccgggcaggtatccagattacatactctcatcatgacacagcccatggtcacaaggggtgcggtggcaaaaccgaactcctcggcacctaaaatggctgcgatggctacgtctctgccgctcatcagcttaccgtcggtctcgatgcggactttattacgcaggccgttcatgatcagggtctgatgggtctctgccagtcccagttcccagggaagtccggcattgtggatggagtttctcggtgccgcaccggtaccgccgtcatagccggataccaggatgacctgggctcccgccttggctacaccggctgcgaccgttcccacaccggcttcggataccagttttacagagattcttgcctgggtgttggcatttttcagatcatagatcagctgcgccagatcctcaatggaataaatgtcgtgatgagggggcggagagatcagggacacaccgggcgtggagtgtctggtcttggcgatccagggatatacctttcctccgggcagatgtccgccctcaccgggttttgctccctgtgccatcttgatctgaatctcctgtgcacttaccaggtaacggctggtaacaccaaaacgtccactggctacctgcttgattgcggaacaacggttcagtccgtccggtccgacggtcagacgatccaggtcctcaccgccttcaccggaattgctcttgccgtgcagatggttcatggcgatggccatggtctcatgggcttctttggaaatggaaccgtaggacatggcaccggtcttgaatctggtcacaatggactctaccggctctacttcctcaataggcacaccctttttcggataattgaagtccatcagtcctctgagattcttgatggaatcttcgtcgtttaccatggcagtgtactgtttgaacatctggtaatcaccgcgtctggtggattcctgtaacatatggatggtagcgggattgtacagatgctcgtcaccgccgctgcgcatcttgtgatgtccggggctgtttaaggtcagatcgtttttcagtcccagaggatcaaatgcctgagagtgcaggtcgtctacctgctgctcaatatcttttaaggtaatacctcccacacgacatacggtgttggagaaatacttactgatcacttccggtgcaataccgatagcctcgaagatctgggaaccctgataggactggatggtgctgatacccatcttggatgcgatcttgacgatgccgtggaggacagcattgttgtaatcatccactgctgcatagtaatccttatccagcatattgctctcgatcagttccttgatggtatcctgtgccagataagggttgatggcgcaggcaccgtaacctagcagcgtagcaaaatggtgtacctctctgggttcgccggattccaggatcagtgcgactctggttctcttcttggtgcgtaccagatactggttcagtgcggatacggccagcagggaaggaatgggcacatggttctcatccacgcctctgtcggacaggatcaggatgttcacgccgtctctgtaagctctgtccacttccacgaacagtctgtcaatggcacgctctaagctggtgttcttgtaatatacgataggtacgacttctactttgaatccgtctaccttcatgttcttgatcttcaacagatccgtgttggtcaggatcgggttgttgaccttcagaacattacagttcttcggggtctcctccagaatgttgccctcggtaccgatgtatacggtggtggaagtcacgatctcctcacggatcgcatcgatgggcgggttggttacctgtgcaaacagctgcttgaaataatgaaacagcgggtggttcgtcttgcttaagacgggaagcggcgtatccacacccatggcggcaatcgcttcactgccgttctttgccataggcagaatgctctgtttcatctcatcgtaggtataaccgaaagctttctgcatccgctgacgctcttcgtaggtgtactcagggacacgctggttcgggatgtgaatactcttcaattctgtcaggttgttgtctagccattcaccatagggctgtctggaagcatatttttccttgatctcctcatcgtcaatgactctgccctgtacggtatcgaccaggagcatcttgccgggacgaagtctttcctttaacttgatcttcgtgggatcaacaggaaggacacctacctcggaagacaggatcagggtatcatcgtcagtgatcagataacgggaaggacgcaggccgtttctgtccagtaccgcacccatgatatctccgtcggagaacaggatggatgcggggccgtcccagggctccatcatggtagcgtaatactggtagaaatctctcttggtctgggacatggccttgttgttcgcccagggctcggggatagcgatcatgaccgccagaggcagttccatgccgctcattaccaggaattccagcgtgttgtccagcatagcggagtcggaaccggtcttgctgatggcaggcagtactttgtgcagctggcctttcagatgctcggattccatgttctcctccctggccagcatcttgtcggcattgccgcggatagtgttaatctcaccgttgtgtaccatcagacggttcggatgagcacgttcccagctgggattggtattggtggagaaacgggagtgtaccatggcaatggcggattcgtaatcttcactctgcaaatctgcgaagaaggtacgcagctggcctaccaggaacattcctttatatacgatcgttctgctggaaagagaaactacataggtatcatcggaagactgctcgaagacacgtcttgcaatataaagtctgcggtcaaagggaagtcctttttccacatcggcaggctttttcacgaatccctgcatgatatagggcatgcactctacggccttatgtcccagcacattggggaaggtaggcacttcacgccagccgaggaattccattccttctttttccacaatgatctcgaacatcttcttggcctgattgcggcgcagttcttcctgcgggaagaagaacatgccgacaccgtattctctctctccgccgatgtccatgcccagagccctggtcactctggcaaaaaatttgtggggaatctgggtcagaataccgacaccgtcaccggtcttgccttccgcatccttaccggctctgtgctccagattctctacgatcttcagcgcattctctacggtcgcgcggctcttctctccgtgaatattgacacaggctccgataccgcagttatcatgctcaaattcttcccgatataacggtgccttgggcagctcctgttttacatcaaacatatagttctcctttccgggtttctatttctctctttttcatctgtctgttactattcataacctcatttgcaagactgtgctttcagcactttcctgcaactaaaaaaggtcgcaatgagactctttcgagcgcctcattgcgaccttttctgtactatacacctatttttctcatttgtaaatatagatttttccttgaattgtcagataatttgtcaattcagttgttcgtatggctgttgtctgtgaattgtgttaattttcttttttaagccatgcttttagcacaactctttggggattttccctatttttcctgtctccgaccatacactctgcttgtcagtccctgatagattgcagagaaatgtctgctttctgccattgcggtccggagaggtgccagggtcagtgccatcacagcgcggtaacggaacagttctacgggtttcatgtattttgtcgtgatctccttatgctctgcggcactgcgtttcaggttctcctttgtctcggagtagccgccgccttcgtaggaagatacggtaagccccagatactgcatgggagccttcgcccggtaatagcaccacagaaaatgttcataatctgcgcggatcttgtattttggttcgtagggcttctgtcggcacaggtctgcggcatagaagcaggactgatggcagggaatgttgcggtagcagacaaagccggtgattcggggcggggatgatatcttcgtgtccgttttcgcgctgtaggtatctccgtaatagatgccttgcagtttcatagggtgctgttccatgaattgtgcggtgtgcgccagaacttccttgtcatagaagaggtcaccgcagtttaagaacagaatgtaatctccggtcacatgagagaccgcctggttcatagcctcgtagatactgtgatccggttcctggtagagatggatccgcccgtcagtgcgcatggactctatggatccgtcacggctgccaccgtccttgacgatgacttcgaagtctgggcaggtctgggccaggatactgtcaagggtctgattcagttttgtgccggggttcaggcatactacgataatgctgaatttcatatgttgctccttttaagatataatatctccgcagtcgagaacagggcaaggaacgcggcacgttcgcactctgtcgcagagcgtagcggcacgtaagtgaccaaagtacggtcactaagtgccgacgtctgcttacggcctgcttatccttaccctgttttcggctgctgggttacgttgtccatctttgtatatcttatcaagtatttggatggtgacaaatgtacttttttattgcctaaaatatatttttctgtttatggagcatcccgagggatgctgctgccactaccaggaataccacgcacacgggccagctgacgaagccggtgacggcgatggcggtgtaggacaggcagtaggcgaggacattggatgccacatggacaaagaccgccattttgaactctccaaagtattcgtaagcatatgccatcaggcagccgatgaggaagccgtacacgccctggacgtaattcatgtggtaaacgccaaagatcagagcagacagggctatggcgagtttgatatccatgaatctgcggagatatccgtagataactccgcggaacagaagctcctctgctatgggggagatgaagccgaatacaaggattcctacgataaagtgtgcggaatattgctgggctgcaacttcggtataggcttcggatttgttggtcactcccagaagttcaaacaggaggttgaaaccgataacggcaccgatggtgactgccaccagcagggcatattttgccttaccttcttttttcagatggcttaaatgcatatcctctttgttcttcgtgatcagaagctttgccgtggaccataccgccagtgctccgccgatgaagcccagtgccgctatgatactggacacatctccggaatagccgttataggcgccggtctcatcccgcaggatcagcagatctaccagtccaccggaagcaccagactgtgccagctgatacaacagtgccagcagcgcatactgcaccgcattgcgcaccaggataaacatcaggaacgaatacaccatggtccagattctctggtacatgggatttttctttttattgtcgggattgctgttcaccagttcctcgctgccgcgaagcagaaatttttccagttcttccacggattgtacgatgtagtccgcttttgcttcctttaactcttccttgcttccgtagccataagtcacgcccacgctctccacgcccaacgctctggctccttccacatcgaactttctgtcaccgatcatgtagacctgatccggctctatgggattctccttgaacagctgatgcagggtctcctgcaccacctgatccttcgtctctctggtgccgtccagctcactgcctaccaccacggcaaaatattttttcagatcaaaatgctccagtatgcgttctacatagatctggggtttgctggaagccagtgccagaaaatagcccttggattgcaggttcttcagcatctccggaataccggcataaacttcattttcaaaaatacccgtattctgaaaacgctctctgtattttgccacggcctcctccgcctgctcagcggtaaaaccgtagaattccataaagctgtcccgtaagggcggtccgataaaaggctccagcttgtccagatcaggttcctcaataccgaaagagtgcagcgcatactgcacgcaggtcgtaattccaattttgggatctgtcagtgtaccgtccagatcaaacagcagatattttttcattcttataattcctttttttgtatctgttccaagccctgtaactatcgcaaaatattcattgaataccgggatccgcaagaatattctgtaattgttatgaggctctgaatagttaccctttctttctatagcttgtggggtccgcaaagcattagaagctgcggatcttgtccccgtcatcctcagtgtttttcagtgccttgatctctacgtcatagcccacattggcattgacctgcacatggaccacatcacccacttttttgccaagcagtgccttgcccagcggagattcgttgctgatcagaccttccagtgagtttccgcgaacggtggtcacgatcttgtaatcctcttccgtgccgtcgtcgatgaattccacggtaacagtgttgttgatgcccacctcatccacggcggagttctcggagatcacctttgcggtcttgatcattctctccagataacggatccggctctcgttctgattcttgtattttttcgctgcataatattcaaaattctcactgagatctccgtgggctctggcttccttcacgtcctccagtgccttgggacgcaccaccagcttacgatactcgatctcatcttccattttcttaatgtcagtgggggttaattcatcgtacataatttctccatttctatctgttcaattacttatatcatttattgacagtttttctcccggctcggcacatgctgattttctaccaacagccgtccttctttttcttcggcgaccgaccttcttttccttcagcagacgcctttcttttcttctgacggccgacctttttccttccggcagccaaccttcttttcttgcagaggatgaccggtcgcagtctctatgctgtcccggtgtgtccagcattctacaactgcattgcgtagattaccgccagagacagaatgatctgaataatggcaaaacggaatacggtctgtgtattggaccagtcccacaccttacgcacatgatcatgcaagggagtacgcacatttttcaaaatatgaatcttcaggaagcggagcagggaaaccttaagcagtcccaaacctccgtccagaatcagcaccagagccaacggaataaacaaaaacggacagccgctctttaaaatagcgatgctgatgaacagtcccatggcccgggaacccgcatctcccatcatcagcttactgggtgtggcattgtaccacagatagcccagaatacatacggcaaacagcaggatcaggaaagagtaagtctcattcacatccttcatgcgatccacaatgtagatggacatgatggtaatgatcgacagggttccggaaagtccgtccacaccgtcggagcagttggtcacattcacagatgtccataccaggatcaccgtgagaatggcgaataccacaggcggcagcgtgaactttacatggaacagtgccagttccaccacgttggagttgtatttcaggaaggtgatggctaccagtgccgccacgcacagatctaagaaaccttttttgtactcaccccagggagtcttggaagcatcgtccagaaatcccgtcatcatgcataccacgatcagcagcagatagatcaccagctctgcgcttaaaggggaaaacagcagaacggatgccacaaatgccatgacaaaaataattccggcacctctgggtttccccgcagacaattttccgtcatgggcaaattctcttcctgcatccttgggcagatacggacttaatttcgccgttgccagtaccgtcgctccaaaagcaaaaaggattccaaaaaaagcaaggagagaactgcttccctccggcaagatcatctgtaacatactatccctcgtttccacatgagatactcacttttgtactctcatgctgtattttctgataaattccgtgactgttcacaggggcattcgagaaatgaacacctcagaacagtcacaaaatattttaacacaaatatcccggaatctcaaataatttccacaacagttcagttctgaacatatctgggcgcagaaatcatgcttgcatgattttgcgggcaaatatgtgcaggcgctaagcgccaatctatgagcaaaggtagtcacgaagtgacataaaagcgtgttaacgcgactcccgtgaacggcgcggctgaactgttacgtttgacagtttccccacggtggactactatattcttatgaacactttctgaaaaatagccataaaaggagaaatactctatgatgatccataagatcgaaccgcataaatattacccggaattccgaagccaggagcctaaaccttccgattatctgctgttatttgacggagaaaaggtctatctgccctcccatacagaaaacagtgatgtaacggatacttccgccgatgccggcatctcggagcatcctcaagtatatcttcctacttttgaagaagtccatggactcttgggaatccgtcagcctatggaacgtttttttctggactgtgaatatctcttttccattgatgaccgggcattcttccgcaagacgacggaggatgccggtgctctcatgctcccggaagaagacctctacgcttccggtgtgttccgtaattttgagccggaatatctggcatttgctggaatcactgccacccagatcaatcgtttccgtctggaccggaaattctgcggccgctgcggacatcccacaattcacagcaccacagagcgggcctgcatctgcccggagtgcggccagattgaatatcccaagatctctcccgctgtcattatcgccatcgtggataccgaacaggacaagatcctgctgacccgctatgccggcggttcctatcgtcactgggcactggtggcaggcttcgtggaagtcggtgagaccttcaagggtgctgcccgccgggaaatcatggaagaagtcggtttaaaggtcagcgatctggtctattacaaatcccagccctggtccttcagtgattccgccatgatcggcttcttcgcgaagctggagggggatccttctattactttgcaggaatcggagcttggcgaggctgcctggttctccagagaggatgtcccggatctgccctccactatcagtgtcggtcaagaaatgatcacattattcaagaatggtggggatccgttctgccagagataattgatacatttgaaagtttttcacttctattccatgatataccttgactttgtgcccccgtggtttcatgccccgggggcttatttagtttcttttcctctctgcgccccgctctctcgatcttcccggggcttaatcagcttcttttcctctctgcgccccgctctctcgatcttcccggggcttaatcagcttcnnnnnnnnnnnnnnnnnnnnnnnnnnnnnnnnnnnnnnnnnnnnnnnnnnnnnnnnnnnnnnnnnnnnnnnnnnnnnnnnnnnnnnnnnnnnnnnnnnnntcttcccggggcttaatcagcttcttttcctctctgcgccccgctctctcgatctccccggggcttaatcagcttcttttcctctctgcgccccgctctctcaatctttccggggcttaatcagcttcttttcctctctgcgccccgctccctcaatcttcctagggcttattttgtttctttgcctctctgcgccccgctctctcgatctccccggggcttaatcagcatgctccttatatctacgccccatgtacgcaaaaatctgccttcgacaataacattgtcatgaggcagactcctttctgtacttattctcttcactgtttcttcacctagagcatcgtagctgtcatcgcttctcattatctcaataagcggcacttcttcgccacctttaccagcagatatcccttcgggaagctgcgaagctcctgctccgtgatgccccgcatcaatatcagcatgacaaaatagactaccgcagcgatcatgatcgccggaatgacagagatccgcatggacttcgtcaccatatacagaccttcgtagattgcccaggctgccgctcccataaacgcggaggcgaacgccggaatgacaaaagtcttgacgatctcctgtctatagcctaccgctcttcttaccgcccactggttcagcacacacatcataccggaatacagcgtattggcgatggcaatgctgtacagatccagactcgtgaacatcaaaagcaatactgctgccaccgtctgcaccactagcgagatccccgcattgatgatcggggtattgactttgcccagcccctgtaaaatggaactgtttaatgtcgacaatgcataaaagataaccgacaatgacaatgtcatcagaagggctgctgccaggttcagttcctctgccgtcttgttcgtgaacagcagactgatcaccggcttcgctaatacaaaaagtcccacagcacagggaatcgagatcaccatggtagtcttcactgccaatccgatcttctctctggctcccttcacatcccgggctgccatcagctgtgctacggaaggaatcatagcagatgccatagcagatgcaaaggctatgggaatattggacattgtcagggactgtccggagaaaataccatatttttcataaatagataccgtatccagattacgaagggacggataccatttggtgtagatactgttgttgaccgtactgcttaagttatatacagccgtactcaaaataaacggggtcaccaccagtgtgatcgtcttgaatatctgtccgtaggaatccacatgttcatgcctgtcacgctgcactctgcgcaggatcattccacgattcagagcatagactcccgccataaaaagcaacgccactaatacgccgacgccggtacccagtgcacttcccacggcaccgtaggttgctctcatcacctgccctgcctgatccgccggaacctccatcgttcctataaacatttggatcagaagatatgccgcgcctacgctgactaccgcattggcgatctgctccaggatctgtgatacggaggtctgcgccatgctcttatgtgcctgaaaatatccccgcagaacacccaggataccatagacaaagatcgtcggtgcaaaggtgcgcagtactgtgactgctgctccggacacgaataatcccgctccgaaaaacagaaaaaggctggctataccgccaaccaccagtacatagatcatggctccgtggaacaatctgtgggcgttgcgatattccttctctcccagcttctgtgcgatagctttggaaattgccgagggaatactataagaggaaatcaacagaatgatcgtataatagttatacgctgactggtaatagccaagtcccagatttccgatgacactctgtaaagggcccctgtaaaggagccctatgattctgctgatgattccggctgccgccagaattcccgcctgcatgataaaattgttcttggaactgttcttatctgccatatgttatcttaccttatttcagttctttatccgatcagccagtcatacatctcctgatatttcccggcagataccttccaggagtagtcagtggccatggcacgatccacgatcttattccactctctcttcctgtcatagtaaatatgctccgcatagcggatcgtattcagcatctcgtgtgcattgtaattcgtaaagctgaagcccgtaccggtgctctcatactcattatagggctgtacagtatccttcaggccgccggtctctctgacgatgggtacggtaccgtaacgcagcgcgatcaactgactcagaccgcagggctcgaatagagacggcatcagataagcatcacaagccgcatagattttatgggacagtgcatccgaataataaatgttggcagacaccttgtctccatacttccagtcgaaatgacggaacatattctcataacgttcctcaccggtgcccagtaccacgaactgaatatcatcctgacacagttcatccatgacataagcaatcagatccagacccttctggtctgtcagtcgggataccagaccgatcatcatcttcttatcatctacgcgaagtccaagttcttcctgcagggcacgtttattcttcaccttttccttgcggaaattcactgcattataggcttttacgatatttttgtccgtctccggattgaactctccatagtcgataccattgacgataccgcgcagatcatgacttctcgcacgcagcagtccgtccagaccctcaccgtagaacggcgtcttgatctcctccgcataggtatcacttacggtagtcaccgcatccgcgaatacgataccacccttcagcaggttcgcatccttataagcctccagcttgtcagaggtaaaataatactccggcagtccggtgatgctctgtaccgtcttcacatcccattttccctggaacttcaggttatgtatggtgatcacagacttcatgttgcggtagaaatctccgccatggaaacgttccttcaggtataccgggatcagacctgtctgccagtcatggcaatggatcagatccggctggaaattcaaaagcggtaatgccgacagcactgccttgcagaaatatgcatacttctcgatctcatatctgggatcatccccataaggcttgaagcctccgaaataactctcattatcaatgaaataataatgtactccggcttcttccgcttccagaacacctacgtacacattctgccagttgaaatccatgtagaaatgtgtcacatacctgagtttatccttcatctcctgcttcatacaggtatacttcggaataaacactcttacatcaaaatactccttgtcaatatacttcggcaaagatcctacgacatccgcaagtcctccggtcttgataaaaggtactccttccgatgcggcaaaaagaatttttttcatgtaaaccctccacatatgctacggcttgtatttcaaaacatagattgattataccatgtttacgattcatagaaaagagggcagcgataatttacaaatcttttagagtctgcggttttgcctcagtttctgtaagaaagccggatcctgtcagcgatcagcgcgataaattccgaattggtaggtttgcctttgcccgtgtcgatcgtgtaaccgaacatggcatccagggtctccatgcgccctctgctccaggcaacctcaatggcatggcggatagcgcgctctacgcggctgggtgtggtctgaaaacgcttggcgatggtcggatacaggatcttcgtgatggaactgatcatcgccggatcctccaccgacatcatgatagcttcccgcagatactgataccctttgatatgtgccgggactccgatctcatggatcatatccgtgacatccttttccaggtcatggatgacttcctgggtctgttcctttttttctgtcgcttttactgtgctgtctttggcgtttttcgtagaaggaaccgtgatcataatttggaattccttgttggcattcatcagatcccccaggattttgtatactttttcattatcctttgtagttgtaatgtttaatttttccattaaactacctccatgactacaaaactacttttttcacgtaccgttctattataaatagatatgcgtcatggcttcaagcagaacccatcgcaagatttttccaaatttcgcagaataaaaatgtaaaaaaaggcgcccggaatgacccggacgccaataagagggaaaatgtataagtagaaaaactacgagtaaagcaaattaaattaatgatgctctgccagggtgtgaagagcttccttgatggctgccttcacagtctcatcctgttctgcattcagtctgtgcaacagataggtcttggcatattcggtgccgatgctgcctaatgcttttgctgcttcgatacggatcttcgtatccggattgtcgatcatgtgggcaatgctgttaacactgtcttcatccttgatccggctcagagcttccagtgcggctaccaccacggtgtcatcggaagaactcagatatttgatgatcttgtcggattttcctttctcctgtaatttctgaatcttacttaaatcatgttgttccataaacacgcgcctctttctttctgccagcgcgggggcggtaaaatcgtctccggatcatcactatatatcgcctgtggtgattggcttctcttgataatgttataataacaccttatttgtcagaaaacaattataacaaaatgaaggatttctaaaaattctataacctgctactcttttgctcaaataaatcacatctgtattctaatgccctgtagtccaatgccgatttcacatatcccgcagtcatatcattcattgctttctgcttagctccttgtattcactttgttggaatatacattcgggaaatcctctcgaagccattccacatattcatccgaaatactgtacaatttgaattcttccattatacttcctttcttcggtataaaaacaaaaagagagcaaatattttactatctgctctctcagaatttaagattctccacttatatggcaggagctctcccgataatcaattccttatctgttaatcattatatgctttcttaatgaaaaaagcaatgagtattttagcagtggatctttcaaaatcttattattttctcccaattataataacatgattacttgctcctaaaaccgactgttcacggcatacactataatgatagtcgcaccaagttttgaactgattttcatcccatttgtcaaccttttgtgataaaagaggagctaaaccatcttgggcgaaatggtctacaatttttaatctatatctttggtaaattgattccatttcttcttttgatgagtaataagtatctgtccaaaagcatttctcatcatcatgcttcagcacaccagtttcaataagttgtttcgccaagtgttcatccaaatatttttcattgctcgtagcaatatattgaaaaacatagtatcttggaatgtacgcagtaaccaaaagcccgcctttccttaacactcttagacattccttcatgcatttttctctctgctcttctgtaatcaaatgataaaatggtcccatattgagaacaatatcaaatgaatcatctgcgaaacaggacatatctgtagcatccaaaacagaagtattcatatgataatttttattggtaagagttcgattaataatgtctatatgccttggcgtaatatctgtagcagttacatcatgccccttatctgcaaaccagaaagcataaattcctgttcctgctgcacaatctaatattttactattggtgccgataatctcatccaaaactcttgtagttgttacaaattcaattcttcttgcattatttgtagtcaaacgattttcctctttgtaattctcgtaactgtcaacaacataattcatcactaattcctccgattctattatttttatgtattaaaaaagctaccctccttaaatttactttaaggacgatagctgatagcttcgtgttaccaccttaattcatctatatctcgcaatatagaccttagcaagtacggaaatctctttcgatactctgacgctgtaatgggcgttcccagtgtagcctaataaatatctcactcggtacacggctccaagactggttcaatatttcttcaatagagttttccaccaagcaactcctctctgtaatttccaaaatatttactatctctcttcatcgctttttaacatagtagattcataattattttttgtcaagacatacaaaataaaaattattaattattgagaataatatctattatatctttctttcctttagtgtacaatcccctattatcagcatacttactttccagttcttccttcaccctctgatactgcaaaaccatattctcattatcatttagataatctctgaaatgaatataatttttccactcagttccgttccatttcacaatatgaatatggtgtgtcctgatatccttttccatatcccccattacataaagaatctgatcttccacatccgaaccacaataaaagattccttccttctgtaactgctcattatatgacattattttctcaaaatcagttaccccaacagcaatatcaataatcggttttgctttaattgctggtattgctgtacttccaatatgttgtatatcaacagcatcatcacctaatatagatttaagttttttgattgtttgaatggcagcctcatcccactgtttatcatgtggttcaagctgcactgttcctctttttaatcctaatgacatagcaatctccttaatattacatcacaatttcactatcaaaatattgttcctgaaaataaatctgctgcctaatctcatcttttgaaaacatcattccgttaggtacaactacccacttttcttctatatcatcttttctatgaacaatagccataattttacctgtaaacttgtctactggctcatttacacctaatatataagcgtcctgctcttctccatctggtgccataactccttcaatgtaaccataatttattggataatacatatccttatattcaggatgataacttcctaatggtctatcgactgtgacagttactgttgctccgattatagaattacttttaacccgtaaatacttttctatcaatttcggctgtatcaacggatatgtccagttctcaggcaactcatccataagcacaactttctccatttcgctatgtaattctttcgcaaactctgttatctctgcaaaacaaagcagtccaaatgtttcttcaccggtatcatttactctggtcttacctgtcaccgaatatacgcatattggttttatctcaaatttgatagctccagtctcttcctgcaactcccttttagctgtttctaaaatatcctctccagcttctctatgccctcccggcacttcataggtatctctttctttatgcttacagaatacccacttgccgttgctctgtgagattattactgcaaacttcaatagttcat

SEQ ID NO: 195 - DNA, 34364 bp, unidentified
  source 1..34364: mol_type = unassigned DNA
acaaaagctaactgccaaatccaacttttaaatcaattcgttttgctcatctctctcaagaggaacaggtttatgcttttttattggctgaaatattgaattttcaaggttcaacacaccgtatcggtgtgtgaagttttagtaaagtatttagccagattagattaatgtaccttaaattctgaaatcagataaatcacacggcggggatagcagacttttggagtgcatcaaccggattatgtgctcaaaattgtttgttccgaaaaaacgatttcttgtaggtactatgtgaaatttcaacattcatatcatagttattatggtaaaaaaggttatggataatcaaaaaatgccgataacatatttaaggaatgttacatatgcatggaggcatcatagcggaagatatataaaggctgctacgttgtcagtagaacaatgtagcagtttttattgtgcactttatggcaatgccgctaatggatgagagtttctaattcgccatagtagtggaaaaatacagccaagaccaaaatcaagggtgcgcgggtgaccaataatctgtaggaaggtggaggcaaatttatggtctgcagaacagaaaacacataagactatagttaagggagaggtcggctaattaactaatgattagccctctatttggttatgatggagaataataatggaaaaaatcgcatttattatatgttataacaacgaattatatatgaaagaatgtcttcaatatatatcatggctaaaggtgccggaaggcatggaaaaggaaattattggaataacagacgcggaaagtatggcagctggttataatgcggcaatgcatgaatctgatgcaaaatataaagtataccttcatcaggatctttatatcttaaatgaaaactttatagaagatgtaatagatttgtttttgaaatatcctgaatatggaatgcttggggttattggaagccaatatatgattagtgatgcaaattactggaaagcctgggatgttggaaaatgtgatgcatataatggcttagcacaggttcatgtagatctcgaaaataatgcagaaatatctgaagtaaaagcaatcgacggaatgatcatgattacgcaatatgacgtcgaatggagagaagatatttttgatggatttgatttttatgatgtttcacaaagtgaggagtttcgaaaatatggatataaggtgggggtgccttatcaggaaataagctggtgcaatcatgtttgtggtacatcaaaattaaaaagatacgatgaatatcggatgaaattctgcaatgaatatcagaaatatggatatgattataaagctaatcaggaaataaatgaaaagagaaatggaaattccgaaatagagaagatactaccgcaaatagaatggttgtataataataaaaaacttagcgaaatgaatgaggcggtccgtgaagctgctaatatttgtcagtataataccagattatgtgaacttaggattataaatcaggtgatacagatggaaattactgagaatattcagaatggattttataatgaaaagctatcctgcgacgaaataatagagaaatatcaggcttttcattttttgatgttacgtctggaatatggaaaaaatgaaaaaggaatgcaggatattttaaaagaggttatggattgtgatttgaaaagcgtgatacagatcgctgaatatacggtattcgatgtcagcacagtggcgaagaagctggcaggattagcattacaaaaagaaatgattaaaaacggaaagattaggagatatatattggaaaatagtattcaaagcaagggtgaaacggaaattgcgtattgtattcctacatacaatcattcagacataatacaagaagtattgcaggcagtaggatatttatataaacaaaataatattgatatatatatttatgactcaagtgataattacaagacatactggattgcaaagcattttgcagaacagggaatggataatttgtattatgtaaaaattgattcatctattgggtttgatgaaaaacttatgatgatatttcaaggatatgaattgcagcataaatataaatatttgtgggttgttaaagacagagtctgtgtttataatgctacgttacagactgtacttcaggagacacataaagattatgatgcgatttttcttgatgtggcggtagacactacaaaaccagacataaaacctgtttattatgatgcaggagaattttataagcaggcaggctggatcgcgtcttctatgaatacgacattgtatcattatgataagctgctaaaaaatattgattggaaggaatttaaagaaaaatatttctttgatggggaaaatgaatttgatcatttttgtgtattgtttcatgcacttggaaagaaagagaatataaaagtaagatatttgacaggagacaatattcagttcgcagaatcacacttgggtaaatcgttgtggatgaaaagagcatttaaaacatggggaaaattatggattaaagtgaatgaagcattacctgattgttatgcgcaatataaaaaagatgtgatcaaaaagacaacttcacagccgtggatattgggatctgttgacattctgctttttttaagagagaaagctgttttaacaccagaagtgtacaatcaattcaaggacaggtggacagaactatcctatgttccggtagatgattttaaaaatattgcatatggggaaattcaggaattaaaagctacatgtaagacattctggaatcgtttaagcacgttatttgttgaagaaaagtatcaggatatttgtgttttatattatgtgtatggctggatgagacaattggacgaagacggaaggtatatcatgttgggggaatgtgtgaaaatatatcttttggaaatgcaaaagaatatagagcagcatattttttatcagacaacaggaattgatgaagttctggaaaaatatattgttttgaaatttttattaaaccgaatagaatatggcattgatattgaagaatggggaaatctctccgagtatgtgagaagaaatcatatttcaagtcagtttatattgtatatggcaagcaggcattgtcaaaatccagatttcgtaatagaaaaatttttaaatttagtagggtaatgaggagagagatggacgaaaaaaaaatatgttttatcatctataaagataaaaatgcgaagtatagtgataatctggagtatatcaggtcattaaatattcccgatggaatgcagatagaatgtctaagtattgaagataacgaatcaaagttttcagcatacaatgagggaacagaggcttcggatgcaaaatataaagtttatatggaatgcagtacctatattgtgaataaaaactttatttatgatatattgaaaatctttgattgtgataaacaagctacagttatcggacttgtggggcaaaagggagtttcaacacagaaagaggaagcagtgatatatggaaaacaactggaagatagatacggttatggtgttcagataaaagaatatcatgatattcgtaatttggcagaagaggttgattatatagatcagatgcttgtaattactgcaaaagatgtaagatggggaatggatctttgtcaggcacatgatcaatatctggtattacaacagataggtgatgtgcagataaaagaaaaaatggtagttgcgagacagactaagccatggtgttacaaggatacacctgtataatgagaagaggaaaacagaatgaagtatacactttgcgtagagccaaatcaaaacagtcagacaacttatacgtgccgatatagtgatttcccatcatatagtttgttaagtattgacagggaaagttatatggtacattccttggttgaaaattcggacgaaggttggtgtgtggaaggaaaactggttcataatttgcaggttggaaggtattgttcttttgcagaagacgtattctttttaattggacgtggaaaggattataaacgcgtatcaacttcggcagcgaaagtttttcatcagtccggagcggttgagaaataccaacatcgtgaaaaaggaagcattatgattgaaaatgatgtatgggttggacgtagggcgtcttttatgtcgggggtaacggttcataatggggcaatcgtggcagctatgtcacatgtggtaaaagatgtaccaccgtatgcgattgttggtggcaatccggcaaaagttatcggatatcggttcagtgatgagatcattcataaattattgactatacaatggtggaattggacagaagaaaagatacgaaaatatgcccattattttaatgatatagagctattttgtgaactgttttatgaacaggcaaaattagaagtagaagaggtcataaatcatgcagagaaaacgaataaggacagatatctctttttagtagattataaagataattattctgttaccccagacattgttgatgcgtttatacagaaattcagacagtcagatgataaagaactaatattgtattggatcaacagtgagtcgaaggaggatattgtaaatctcgacaattgcagagcgatttcacagacggtagaaaagaaatcagatatcagatgtaaaatatctctcatgcagggaaatatagaagaaataaagtacattatgccagatataaagcatcttattcttaataggagaagcgaaatgatacaggtaatgaattatgctgaggtatatggtaaagatattgaaataatatctggtgtggacagttcaatagatttatagggaatggaggaaatgtaataatttatgaatattattacatgaacggattatgaaggttgttattttggcgggaggttttggaacaagaatttctgaggaatctcaatttaaaccaaaaccaatgatagaaataggtggaaaaccaattttatggcacattatgaaagagtattcatactatggatataatgattttataatatgtgcaggatataaacagcatgtaatcaaagaatggtttgcaaattattttttgcgtaacagtgatgtgacttttgattatagtaagggaacaaatgaaatgacaattcatgaatcgaatattgatccttggaaggtgacaatcgtagatactggactaaatactatgaccggaggtcgtataaaaagaattgaaaaatatgtcggtaataataccttcatgatgacatatggtgatggtgtatgtgatgtagatattgaaaagctggtacaattccacaaaacacatggaaaaattgcaacgttgacagcggtgattcaggagcagcaaaaaggaattcttgacattggcggagataacgcagttaagtcattccgagaaaaaaatctttcggatggtgctccaatcaatgctggatacatggtattggaaccggagatttttcgatatattgagggggatgatacagtattcgaaaaggaaccattggaacagcttgttgaaaaaaaacaattgatgtcatatatgcataagggattttggcaatgtatggataatgctcgtgaaaaactgatgttagataatatgttgagttccaattgtgcaccatggaaaaaatggaaggattaaacatggataaatttttacttcaaggtcgaagggttttaataacaggtgcaacaggactgattggatatcatcttgcaaaaaaattgttagagtcagatgtacatgttgtcgcaatggggagaaatgaacaaaaattaaaacaagttttttcagaggaaatcccaaacgaaaatctggaacttgttgcgtttgatatttcgaacccattaccaaatacgattgggaatgttgattatatttttcatgcggctagtccgatttcaggaattgaaattaggcagaaaccggttgatacaataaaagcgaatctgacaggtacacaaaattgtctggagtatttaaggcatcagaaaagcgaaaataaaacaaatgggaaaatgataatattttcttctgcgacagtgtatggaaatgcatgtggaagcgactgtattttttcagaggaacaaacggatcatgcagaacagcttgtagcagctgcaatattttattcggaatcgaaaagaatggtggaagtgctggcaagagcgtatcacattcaatatggtacagacgtcgtgattgcaaggatgggatatgtgtatgggtatgcaaaatgtatgccggatactgcgttttatgaatttattcaggctgcaatagagagacatgatattttgttaaataattcagggatgagtaaaagagataatatttatgtgaaagatgttgttgaaggattgctgtgtattgcagaaaaaggaaaatcgggagaagcatataacatttcttccaatggggaaagggataactacagtgcaatcgatcaaatcgcacatatgattgcagagtattctaatgagattacaggggataaagatatttccgtaaaaaccaaaatggggaaaaaagaaagtaatccaggagtaagacttaataatacaaaaataaaaagtttaggatggcaggtgactacaggattacgagaaggaatcaaacagacattggatttatacatgaaatagacaaagcggaggctggttgaatggcacactggaaaaatgaagatgaagcaagaaaacagataaaagatttggttacaaaatattaccatgaatttaaagaaaaaaaggatgcattccaagagggagatcgtattacatatgcagcgcgtgtctatgatgaaaaagaaatgtgtgcgttgacagatgcgatgttagatttttggcttacaacaggaagatttgccgagcagtttgaaaagcagtttgcagagtggatgggggtaaagtatgcccatctggtaaatagtggttcatcggcaaatttgattgcgtttatggtattaacagcacctgaattaggaaaacgtcagattaaacgaggggatgaagttatcacagtggcatgtggtttcccgacaacagtgactccagtgattcaatatggagcggttccagtgtttgtagatgtgacagttccacaatataatattgatgtcaccagattggaggaagcctattcagataaaacaaaagcagtaatgattgcacacactttaggaaatccatttaatattgctgctgtgaaggaattttgtgataaacatgatctgtggttagtggaagataattgcgacgcacttggaacagaatatacaatgaacggagaaaccagatatacaggaacctggggagatatagctacatcaagcttttatcctccacatcatatgacgatgggagagggaggctgcgtatacacaaacaatgcattattgcatagactgattctttcttttcgtgattggggacgtgattgtatttgtccatctgggcgggataatttttgcgggcacagatttgatgcacagtatggggaacttcccaaaggatatgatcacaaatacgtatacagtcatttcgggtataatttaaaagtgacagatatgcaggctgcaattggatgtgaacaattaaaaaaattcccacagtttatagagagaagacggcataactgggaaaggttgtacagacagcttataagtgtttcagacaagctgattcttccagaaccggaaaaaaacagttgcccatcctggtttggttttttaataagtgtcaaacctgaaactggtctggaaagaaatcgcattacaaaatatttagaagatcataatatacaaacaaggctgttattcagcggaaatctgatcaaacatccatgttttgatcagatccgagataccgatgcatacagaatagccgggaagttagaacatacagaatttattatgaatcatacattctgggtcggagtatatccgggaatgacagatcagatgatcgattatacagcaaaaacgatcatcgatgcattaaaggaataaggagattcaggtgtgaataagaataacataagcatcctcgattgtacattacgagatggaggtttttgcctcgaagatgctgcaaaatacaatatcaaaacaaaattgttttcggatgaagatatgaaatttattatccataaacttgcggctgccaaaatagattatatggaaataggagctgttgaattatcggataatgataagacaatttatggaataaaacataaaatagaggatttttctgactttatcatagcatcagaaaaggctaatttgaatcaggctgttttcttcagaggaccagatacaccaatagaaaaagttccagattggaaaaagggaatttgttcgattgttcgattgtgtgtccgatattctgagataaaaaaatctattgaatactgcaaacaattaagggaaaaaggttatcaggtttccattcagcctatggtaacagtgcgatatacaagggaacagttgaagtatatatttgaagcggcaaatgagatggaggcttttgcagtatactttgtagatagctatgggtatcttacaaaagcagaagtattagaatattttacgctgtttgataataatttaaaggaaaatatcagagtaggtttccatggacataataatatggcaagtgcatttgcaaatgctcaggctctggcggaattggaaacaaccagaaaaattattattgattcttgtgttatgggaatggggcagggtgcaggaaatttgcagactgagctattctcagcatatttgaaccaatatgaagcccgatatgattttgacgaaatcttagacatatgtgattatatagaacagataaaaggatttgatctatggggatattcggttgatcgtttattgccggcaattcataaagtcgcttataaatactcatttgcgctacaccatcaatatggggtgaaattcagagatattaataagatgcttaagagaattccagaagaaatgagacatcgatataccccagagaatgtaaaaaaactgatgcagatgaatgattataaattttgacagagagtgttatgaatgtagcagaatatgtagttgatgtgttaataaaaaatgaagttacggatgcgtttggaataccaggtggcgtaattttggatcttttgtatgcaatggaagaccgaaaacaatcgctatgtccgcacttaaattataatgaacaggcatccggatttgctgcatctggttatgcgcaggttaaagacagtattggggtggcgtacgccacaagaggtccgggttttacaaatctggtgacagcaatggcggatgcctatcaggagtccattccggtggtttttatcacttctcatgcggcaattactaaaaattgtgaaatacgcacggagtatgatcaggaaatagataccagacgaatcgcagacagtatatgtaaaggtgtatacagaatcgacgaattagaaggttgtgaaaaggtcatagaaaatgcctgcaaggaggcgaatagcggaagaaaaggtcctgtgttactggatattgcaagcagtttatggaaaaaagaaatagcacctgagcaaagaaaaaatatgatagaatcgcatcaaagtgatttttatgtgaatgaaaatatacaagagcaattgaaagaaatgttaattcctgcgaaacgtccggttattctgattggtgagggcgtaagaaaatcaaatactattgatatcgtgaaagatttttcagaacattgtaatattccaataatttcaagtcgatgttctgaggatattttggcaggatttgaaaattattatggatatattgggagtcatggaataagatatgcaaattttattctttcaaaagctgattttattctggcacttgggaatagaatgtcatttccgatagagtcgaaaagtttttctatgatttttaaaagagcgaactgtctcagagtggaaatcgatgaagccgagttaagccgtgtaatcccaaatacagtgaatatgtgcatggatctgaaggagttctggggacatatagattatagaaagtttccacacaaagataaagcgtggattgacgtatgtaatatattaagagataaattatatgcgtgtgatgtagatttaccaattaaaacacttggaaattggatgaaaaatcttaatggaaggatttccatggtttgtgacgtgggtaataatgaattttgggtatcaagagcatatgtttattctggagtaaagaacaggatattgtattcaagagcatttggcactttaggaaatgccttaccaaaagcaattggagtatattatgcaacacgttgtcctgtagtatgttttaccggagatcagggaatgcagatgaatattcaggaattgcaatatattgcaaaatttaaaattccgatcctgattgttctgatcaacaatactgtctctggcatgatacgaacacacgaaaatatgaaatatggagacagatatattcatacagaaaaagaaaatgggtatggggttcctgattttgaaaaaatagcgtcagcgtacggaattttatatgagaacaaacttaaagggtttcaaaatattgatcagccaataattatggaatatcaaatttcaaaacaatacgatcttgaactgaaactaccaagagggaacgagtgccagaatatggcccctgtattagctgctgaagaatatgaatactttaatcaattgtaaatgggggataatatgtatatagaaaaaataaatagtccggaagatttgaaaaaattaaatatggatgaatgcgaaatattagctgaagaaataagaaaagcattattaaaaaaagcttctttgcaaggtgggcatttggcatcaaatctgggggttgttgaattgacaatgggcattcattatgtatttgatgtgccaaaggataaagttatatttgatgtttcacatcaatgttatacacataaaattctaacagggagaaatcatgcatttattgatccggatcaatataaaagtgtgaatggatatacaaatccaaaagagagtgaatatgattgcttcagagttggacatacggcaacttctctcagccttgcatgtggaatggcaaaagcgagagacctaaacggaaaaaaagaaaatattattgccgttattggagatggatcattaagtggtggtgaggctttggaaggactggattttggaggagcggatataaagggaaatttgattattatagttaatgataatcagatgtctattgcagaagatcatgggggaatttacagaaatttaaaagaattaagggaaaacaacggtaatgcacagaacaatttatttagggcatttggatatgattatcggtttgtcaaaaatggaaatgatttaagagaagttatcacagcgttaaaggaagtcaaaaatattggccatcctgtagttgtacatgtttgtactataaaaggaaaagggtatgggtacgcagagacgcataaggaaaagacacattgggtaagaccttttgaaatagaaactggggaggaaaagaatccatttaatggggaacgttatgacaggattatgagagactatctgatacagaaaatgaaagcggataagaaagtaacaacaatgatagctgcagttccggattcattggctttttcgcaaaaataccgcatagaagccggtgggcaatttatcgatgttggaattgcagaagaacacgctgtttcaatggccgctggtttggcaaaaaatggatgcaagccggtatttgtaacaatgtcgacattttttcagagaacatacgaccagatttctcaagagttgtgtattaatgaaatgccggttacattattggtaattaatgcctctgtttattccgtaaatgatgtgacgcatattggaatatttgatattccaatgatgtctaatattcccaatttggtatatcttgcacctacaaataaacaggagtacttggcgatgatggagtggagtattgagcagaatcaatatcctgtggcaataagagcaccaagaaacggagttttttatgcaaaaaatgatgtggatgtaaattacagtgatataaataaatataaaatagtaaaatctggtcagaaaatagcaattattgcccttggcgatttttttcaaatgggtgaagaattgataatggaaatagaaaagcagttgggaataaatgcaacattaatcaatccaagatttattacagggttagatgaagaaatgttagaaaaattggaaaagaatcataacattgtaatcacgttggaagatggtattcttgatggaggatttggacagaaaattgcaagtttttatgggacttcagaaatgaacgtgtttaattatggactgaaaaaagaatttctggatcagtatgatttgaaaaaggtgatggaaaaaaatcatcttcagccggacttaattatcaatgatcttaaaaatagcaggtgtatatagaaagagggcaatcataggatgcggttttttacagatttttataaaaataaaaaagtgttggtaacagggcactcgggatttaaagggacttggatgtgcaaagttttggagatggcaggagctgatgtgacaggatatgcgctggaaccaccgacaagtcccaacctttttgagatggcagatttggaaaataaaatgaattcaatcgtgggagatatccgggatttgaatcatttgaaaaaagtatttgaacagacacagcctgaaattgtgattcatatggcggctcagccgattgtacgggaatcctacaggaatcctgtatacacatacgagacaaatgtgatggggacggtaaatgtactggagtgtatacgtatcaattcctgcgtaaaatcattcataaatgtgactacggacaaagtgtatctgaataaagaatggaagtggggatatcgagaaaatgaagaaatcaatggatttgatccttattcgaattcaaagtcttgctccgaattagttacaagtagttacataaattctttttttcaggatcgggatgtggcaattactacatgcagagctggaaatgtaattggaggtggagattttgcagttgacagaattgttccagattgtgttagagcggtagagaataacaaggacattattattcgtaatccattttcaataagaccatatcagcatgttttggaacctgtaatagcatatttgatgattgcaaaggcgcagtatgaagataagagtttggccggaaattacaatgtgggaccggacgatatggattgctggacaactggaaatctggtaaatcttttttgccaggagtggcaggaggagacaggacagaagattagctggatcaatgagaacgatcagagtttccacgaagcaaattttcttaaattagacaacacgaagataaaagcaacatttaactggaaaccaacttggaatatagaaacaagtataaaaaaagtggtagaatggtcaaagtgctatttagaacatggaaatgtggaaacttgtatgcaaaaacagattggagaattccttttgatgcagaaagtaaatcgttttatataaaataaaactataaatgtgataagaaaatttatataaataccgatatatatggtaaacagttataggtattacaaaggagaaaaattatggagaacagaaaagaacaaaaggaagcattggaaacattagttgaatttaatgagcgattagtaaaaaacatgcatattattgtaaaagaattatcaggaaatcgactggaggatactgataaatttttaaaagcaattgttgatgcaatgaattgggaaatcgcggttatgaatggcacaatgaccttattaaatgagggaaaacagcgtgtggataaagacacattcaataagaaagtgttggagtttggaactgcaataaatagtaagaatgatgtggccatggctgatgcaattacacaattgattcctgaatttgaaaatttgggaaatgcagcgaaggaagtaattgcttagtctgttttgtgtgcaagagatatgtgtaaaacatatctcttgttatttttatttatgcaagatgtgggaaaacgggaacatgaaagaaaaaatgtgttttattatttgcgcaacgaataagacgtatctggatgaatgtatatattatataaaaaaattaaattgtccggaaaaaatagaggttgaaattgtatgtattaatgatgcaaaatcaatgtgtgcagggtataatcagggaatgaatcgttcaaatgcaaaatataaagtatatttgcatcaggatgtatttattcaaaatcctgattttattaaagatgttataagtattttcaataaggattctgagattggaatgatcggtatggttggaggaattggaatgccacaaaacgccgttacatatctggcctggaatgtggggtgtgtggataccaaagaaccggatgtgacgtatcggatgatctgtgcaccaaatcaagtacagaatctggttgtagatgcaatagatgggttgcttatggcaacgcaggtggatattccctggagagaagatttattttgtgatttcgatttctatgatgtgtcgcaatcttttgaaatgagaaagaatggttataaaatagttgtcccatatcaggaaaaaccatgggtaattcatgaatgtaattatgcaaaattaaagaattatgataaaaacagaaaaatctgtataaaagaatatgccgagtttctgacagagaaagatgaatttgaatttgtatatcataaagaatgggaagagttgagcgagaaactttcagatattataaaagagctgattgataaaaaagcttgggatcagattagggaattacttgcggcatatcataataatcaaatgaaaaattcgcagcttgagatgtataccgttatgttggaacttgcaattggagatagggaaaatgagaattgctcaactttttttgatggtctggataccgtagatgagatggttcagaaatattggaagacccgttttatgttgcaaagaatagaatgtggaaaaccagaagcagactataaaatttttaaagaaaatatatgcgcaggagagatttcctttgatagcattgcatatttgattttacattttagctttgatagattaaaagtttttgaaataattaagacatggtactctcaggttggaaagcgggatgttgtaaaaagaatagagttgatagagaggaatatgaatagacagggaccgattgtggcatatagtaaacgagcggcaaaggagcagtaaaaatacatatgaaaagaatgatagcactattaccttgcctggaaggtgctggcggaattagagtattgcttgatctgtttcagggaattcagaaaatgggatatcaaataaatgtctggtcacagcttgagggttcatttcgtcagaaatttgaagaaatgggcattaacgtgcagattcaaaagaacatgttggatgaaacttttacattgaatgtgaaagatgatgaagacatattcgttaatacgcttcagatgtttccagttataaaaaacatgaatgatatgggaatgcccaatcgcatttattggtggatacatgaaccacctgcttattttaaattatatgagaagcaaattccacttgatttttttgacactttggatatgaacataaaagtatatgctgcgggacctttggtacgtgaatatctatggaaaaaatatcaatattgttctgaaattttaaatataggagtaaaagaaatctacaataaaaagaatacagtaaatgtacaatgtaaaaccagatttttattaccgagtttttattttgattatctgaaagggcaggatctgttgctaaaagcaattttaaacttaccgcaggagtatcttgaaaaaacggaattttattttgtgggtattgtacaggaagatatgatgcccctgtatcatattattcagaaactggaagctgcatggggaaatgtgcattatgttccggttatggaacatgacgagctgattacttttatgaatgagatggattgtatcgtggcaccgtccagagaagatgctacgaatgcatgtattgtggaaggattgatgctgtcgaaagtatgtatatgttcggatcgaatgggtgtgtcgtattatttgaaagatggggagagtgcttttgtggtgccgtcaggtgatgttgaagctttgacagaacggatcatacgggtgatagataagaaagatgaatatgatgagatgaaaaaaatgggacattatatatataaaacagtttattcggaagaagtgtttacagaaaatgtaaagcatatatttgcataacttgatgttacagaatttataatggagaaaaatgatatgcgcattttatattatacttggtatgaaaattcacaaagggatatgtcagaatctttggtaagattggggtatgaagttgtgtgctgtcatattccattttcggattacgaagaggatgaaaaatttacggaagcacttgaaaaagtatttttcgagcataattgtgattggtttttgtcgtttgattttttcccgttgattgccaggagtgcggagcgtttgaaaagaatatatatttcctgggtttatgatacaccgcatttaacagttttttctccggcggtacagagcaattatgtgaaattgtttgtgttcgataaaaatcagtatgaaagattgaaaaaaaagaaaaggaatggtctgtttcatatgccattggctgtgaatgtttatcggctggacaagtttcttgattcacacaatgacgaaaaagtatatatgaacgaaattagttttgtcggaagtttatatgaaaataatatgtatcgtaaagtgcagtaccttccggagtatataaagggatatttggaaggggttatttgtgcacagcaaaaagtatatggatataattttgtagaagaggttataacggaaaatgttcagaatgaattgcagaagtatataaagatgagattagatgagcgttatggcgttccggacacgcatttatatgcaaatatggttaatgcggaaataactgcaagggatcgggaaaatttattaaaggcggctgccaatgttggaaaagttactttgtattctgcatcaaagttttcagaaaataaaatagaagaaaagggaattattgattatgaaaatggaatgccgaaagtatttcgaggttcaaagataaatttgaatattacgcttcggtcaattacaagtgggattcctcttcgggcattggatattatgggagcaggaggtttcttgctttccaattatcagcctgagttggcggaatattttgttgatggggaggatatggttctttttgatagtgcggaagacatgtgttggaaattggattattatttgaaacatgaagaagagcgaaaacggattgcaaagtgcggatacgaaaaaataaaaaagaatttttcatatgatgtacaattgaaaaagatcatgcatttagtttcaaaataagaaaatagagggaaacatggatacaaaaatctttgtaatgacacacaaaaaggtggatgaagttgaagatggcttacactatctgatgcaggtgggaaaagcaggaaaagaagattatggttattttggcgatgatacgggagataatatctctttaaaaaatcaaacatattgtgaactaacaggaatttactggctgtggaaaaattatacgtgtgatattattggaatttgtcattacagaagatttttttttaaggatgaaaaattgattgataaatcatacatagaaggtctgatagacaaatatccgattatcataccgaatagcagttgcgtgaaagaggtatctgtttataaggattatcagaaaaaacattataatagggatctggatatgtgcagggaggttatatgtgagatttgcccgcagtatacggaggcatttgatttttgcatgcagggaattctaatgaatccgggaaatatgtggattaccaaaaaaagtatttttgatcaatattgtgaatggcttttttccattttatttgaggtggaaaaaaggatagatatagcttcatatgatgaatatcaaaagcgtgtgatgggatttctatcggaacgtctgtttcgggtatggatttacatgcaaccggaaaaaattacggaggagaaggtaaaacttacagagatagatgatttaaaaaggaaagacaggaaaaatctacttatgaagcagttaattgaattaaagcttcaggattttattcccttttttaaaagagaggatgagaaaaacggtttgattgagcctttgcattgtgaggacaattttgaaggaaaaataccggtatgggtggttgtgtggaggggattagaaaatgccccagagatggtacgaagatgtataaaaagtttgaagcagcatttatccagagagaaagccgtcatacgaatgattacattggaaaattgtatgaaatatgtttcgttttcgccagagatcatagaaaaatataataaaggattgatcacggatacacacttatcggaagtggtgaaaatggaattgctttatcgttatggggggatatgtttggaagatacatactgggtgactcaggatatctctgccacagatttgaaaattaattcttctagacatagattttttcagttcatgacggaggcggtttggtattattgggcaaccaatgatgaattaataggcaatcatttgatgaatgatttaatggatattgcaatagaaaaaatgccggagattgatatggaattacagaaaagcgagctgatatcaaatatagtattattttcagatgaaaaaatgaacagtaaatgttctcgaaggcaatttgacaggataaaacaggaggcaaaattctataaattaaattcaaaagttgaatatagagataccaatctggtaggagagaaaacggtttatgggtggtggaaggaagaattagacaatgatgtatacgcaaaatgatatatttgttttttatgaaattattaatgatattaaaccggaaaaagtattggatgtgggtatgtttttgaaatctgtgggcagtgtttcaagaaagattatggataagaaaattgatgaaaatatttggatgaaaggagtggactttatgcctgaagtccagttcccggtttttcaacagatttatgatgaaataattacaatacaatcatttttaaaacaaagcgataataaagaaaagtatgatctgggagtttttctaaaaaacaggaaagcagatattgaaggcgaaaaagaaaagaaaatactgggaaaaatgtcagaaatatgtcattatattttaataaatgaatgtgaaattgataaatggtgcaagaaaaaaatagagagtgtaattactgttaaggtagaagatgatgaatattatatatctgttcttaaaagatagaaatttaaaagtagtaaatttaattatcgggagaataaaagatataaatgaaatttaaagaagattttttcaggaaagagataagagaagaatttgaaattacagagatgatgaagcgtgcatgggcagctcagatggaagttttacaggtggtaatagaagtttgtcagaaaaatggattgcagtattttgctgattggggaactttgcttggagctgttcggcatcatggatttattccatgggatgatgatattgatatttgtctaaggagggaggattataatcgtttgattcgcatattgtctgcgcaacttccgcatggatttgctatgacggggatgtatgccgaaacagaacggttgcgattggcagctgaagtgccgcaaattcgtgtaatagcagatgagacaatgtggaattttaatgattatatgaaatattttcatggttttccctttcagagagtggggatagatatttttcctttggattacataccggtggaacaagaattggcggagatgcagaaattaattatcagacagggaattgttctgttggaaaattggaatgatttaaacaaaacagaagacttgaataatgaaataaaaaaatttgaaacattatgtaatgtaaaaattgataagggaaaagatattaggaattctatttggaaattaacagatgcggtagtttctttgtatcacagagatgaggcggaatatcttacaaattatgcattttggattataatggatcattataaaatgaaaaaggaatggtatgatgatgtagtcatgcttccgtttgaaaatatggaaattgcggctccggcaatgtatcatgaggtattaactgcacaatttggagattatatggttcccgtaaaaggtacttcagatcatagttatccattttatggatatatggagggcgaattggagaaacatattcgtgcaacgggatttcatggaagtgtagatgagttttgtcgggagatttccgaaggaagattaagagtgtaatataaaaatgaatcaatggaataagatatgggcaaatagaacagcagatgttgcaatctcagatgatatttttgatatgttctgtaaactgaaaaaggcagatggatttgatacgcaggatataaatggatattatgaagcttttttcgaagaatggaataagatggagaaccaaatagagaagcttgccggaaatgttgcaagtgtgtatgaggttggttgtggaagtggagtgaatctgtatctgtatcagcaattgaaaaagctggctatcgttggcgggtgtgattattcggaagcattggttcaactggcgggtagagtaatacagacgaaagatttgcagtgtatggaggcggattgtatttctgcagagcctaagtatgatctggtgctggcagatagtgtatttcagtattttcagaatgcagaatatggaatgcgtgtattggaaaaaatgtggaaaaaagcaaataaaatagttgtgattacagaaatacatgatgaagagaaaaaggaagaacacttaaattttcgcagacaatgtgtagaaaattacgatgaaaaatataaggggctggataaaacattttacacgaaagaaatgtttcagaagtttgcagaaaagacgggggcggagtgtcgaattgtcaaaccggggaatgaactgtattggaataataaatatgtatttgattgttatttgattaagtaaaggagaaaccgaatgcaggcaattattttggcagcaggtatgggaaaacgtctgggggagcttacaaaaaataatacaaaatgtatggtggaagtggatggagtgcgtctgattgaacgtgcacttcgtattctggaacggaaaaatctgaatcggatcatccttgtagttggatatcagcatgaaaatctgatgacttttgtgaactcgttaggaattcagacgaaaattgaatttatcataaatggagtatatgataaaaccaataatatcttttcgctttcactggcaaaagaacagatgatagaggatgatacgttattactggagtcggatttgatttttgaagaacgtctgatagatatgctgctggaggataagagggattctctggcactggtggacaagtttgaaagctggatggatggtacctgtattgtggtggatcaggacgataatatcacggatttcattccgggcaagttattacaataccgcgaaaaagaacagtattataaaacggtaaatatttataaatttggtgcggatttttcgaaaaatgtatatgtaccgtttctggaagcgtatgccaaagttatgggaaataatgaatactatgaggcggttatcaaattgatcctgttattggacaagaacacaatgaaagccaaacgtctgcagggggaactgtggtacgaaattgatgatatacaggatcttgatattgcacagacgttatttattgaagatgataccaagcgttatcgttctttgatgaaacgatatggtgggtattggagatttccgcatctgcaggattactgttatctggtaaacccttatttcccgaccagacggatgcaggaagaaatggaatctaattttgatagtctaatgcggcagtatccgtcaggcatggaggtaaacagccttttggctgcaaaatgttttcaattgcatgaggaacatgtggtattggggaatggtgcagcggagttgatcaaatgtctgttggaagaactgcatggaacattgggagtgatccgaccgacatttgaagagtatgccaatcggtgggcttcagaatgtgtggtgtatgattgcacacagaatgattttacatataatgcacagcagttaattacttttttctctgagcatctagtggatactctggtgctgattaatccggataatccttctggatattatatgggacagtcggagattgcagccttattgcaatggtgtaaaaaagaaaataaaattctgattgtggatgaaagttttttggacttcgcagatgaagaaaatgtgtcactattatcagaacgtattctgagtgaaaatccaaatctgtatgtggtaaaaagtatatccaaatcatatggcgtaccgggacttcggcttggaatattggcaagtggaaatgcagatatgatcggatgtctgaagaagagcgtatctatctggaatattaattccatggcggagtttttcatgcagatactggataaatataaggcagattatgaaaattcccttcgagagataaaagcagagagagcgcgtttttttgaggctttgagtcagattaaatcgctgaaagtttatccgtcacaggcaaattattttatgtgtgaacttctggatgggcataccagcgaagaattggcgggaaggcttttaaaaagaaatattttaatcaaagatttgacggggaaaataaaaaacggcagacaatatattcgaattgcaattcgcacaggaactgaaaaccaacgtttagttgaactgttgaaagaggaaacacagtgaaaccaattttatcggtatgtattattacaaaaaacgaaaaagaaaatttaaaaaagtgtattacggctttaaaaaaagatttgtttgaaattatagttgtggatacgggttctaacgacggaacacaacaaatgctggaacaaatgaaaaatgtccagttggaacacttcacctggtgcaatgattttgccgccgcaaaaaattatgccatctccaaagcctccaacgatatggttatggtcatagacagcgatgaatatctcgatcagatagatattcctgcgctggaacagatgattcggaaaaatccggataaagtaggaagaataaagcgcagaaatacctttgagcacaatgaacagaaaccggaaaaccgggagtggatcaaccgcatcttctcacgaaagaggtttcattacgaaggcagaattcatgagcaggtagtggcgctggacggaagtgaggattacgaaacctatcaggcaccggtgaccatattgcacagtggatacgatctgccggagaaagaacgaaagaaaaaagcgagacgtaatattgaacttctgaatcaggaactgcaggggctgatacagtctgttctgggtgaaacagggcagaaggattgtctcacaaagatcacagattgtatgaaagcgaatgattcattggcggcaaagtttcaagaggatacccgcattccgtatgttttgtatcagttgggaaaaagttattatatggctgcggagtatacgaaggcatgtgcttattttgactgtggattgtattttgatctgaatcccagactggaatatgtgatcgatatggtagagacatatggttatgcattactgaattcgggacaggcggatcatgcactgtttctggaaaatgtttatgaggaatttggaaatactgcagattttaaattcctgatgggactcatttatatgaacaatgaaatgtttgatgctgcagtggaggaatttaagaaggcgttaaagatgccggagggacgtgccaggggagttaattcttatcttgcctgctataatattggtgtgatctacgagtgtctggggcagatgacagaggccgagcagtattacaacagatgtgggggatatgagcctgcagagaaaagattagaaaatatgaaaaaataaatactatttacaaatatcctcccacagacgtataatagaaatacgcctaaaggaggatttttttattgaaaaagcaattatttcatggatcggatcatataattgaaactccgatatatggagttggaaaaaaacacaatgattatggacagggcttctactgtaccgaagatattgccttggcaaaggaatgggcggtatcggaggaaaaagacggctatgttaatgaatatgagatagagacaaatggcctgcatattttaaatataaatgatggcagctttaccttgttacactggatggggcttttgttgaataaccgcgcgtttgtattggcaacaccgctggaaagggaggcaaaacggtatattaccgattgttttccagttccattagcaggagtggatgtaattataggatatcgtgcagatgacagttatttttcttatgcaagggatttcatcagcggtgttatatcgtacgagcaattagggaaagctatgcagttgggaagccttggagagcagtactgccttaaaacggaaaaggcatttcagcatcttaaatttatagcgaaagaacacgtcccttctgccgagtggtattcgaaaaagatgttgcgggaccggaatgccagaaacggatataaggacatggaaaaggaaacctatcacaggggggaattgtatatttccagaatcattgacgaggagatgaaaagcgatgatttattcttacgataaagtatatttaagaattgcacagcgtgtactgggcgagatgcttaattatgccgtatatgattgtggatatgagttgaacgagtattatcggctttttacagaatcttcatacagtgagcgtttttcaaaaggagacccatttgtaattgcgggaatgtcaggggcagagctggccattcgtgtgatggatgtgccggatgacgaaattgttgcgccgggatattattttgaaaaaagcccggaatattggaccggatggttgttggcatattatcaatggatgagtgggaaaacctttgcggtgatacaaaaagaagttccagttgagaaaattcgtgatttatatcagccatatcatgagatggatattacgcagggagtgcaaaaagtaagagagattgctcagcagaacagggtagaaagttatctgaagttgttacggaaaagagccagactcagtcagagccagcttgcggagcaaacagggatccccgtcaagacgattcagcagtatgaacaacggaggaaagacattaacaaagcacaggcggagtatgttattaaactttcgcaggtgttgtgttgcaaacctcaggaactgatggagataaatgattgaaaagcctgcttttcattcatttaaggatagggtatactatatgaaaaaggcaaagacagtgttgattgtggaatgatctggtaaatattgtctggttggtgcgcctgaagggcatagtaagggatactacaccagcatcccaagcgttcccgccacaatcagtaccagccccccggcttcttttttccccagtttctcatgaaatacaagataagaaaacagaatggtaaccagaatactcagcttgtcgatcggcacaacgacacttgccagaccatcctgcagcgcacggtaatagcacagccaggaagcaccggtggcaagtccggacaggcagataaagccaagttccctgtgatcgattgtgcgcacactgtcctgctttttcgtgacaaacacgacaatccatgccatgatcagcacaacgatggtacggatggctgttcccagattggaatcaatgttttcaatgccgacttttcccagaatagaagtcaggctggcaaagacggcagagccaagcgcgtagaagaaccagctccagccttttttcccggaagtctcagaagaggtttcctttttcgtgatcatcaggtaggttcccgcgccgatcagcaccacgcacagaagtttcagtgggctgatgctctcatgcaggaagagaaaagcgagaagaatggagaggatggcactcgatttatcgaccgggaccaccttatccacatctccgatctgcagtgcacggaagtagcacagccaggaagcaccggtggcaagtccggacaggatcagaaatgtccaggttttggcagaaacacttccgatgccgtgttgtgccccaaccagaaataccatgatccatgaaaaaataagtacaataatggtacggatcgccgtagctgtattggaatcggtatttttgataccgcatttcgccagtatggaagtcagtccggcgaacagagctgacccaaatgcaaatagaatccacatatgcaatttcctccctgggacaagcgtaaaatgttttggggcatttgtcaaaacttttttcttgtgatatgataattttatctttttcagaggtgacagaatgtttgaaaaaaaacagatcatatacagtgaaacacagggagtctgtcaggtagaaaatattgtttcgctctccgcatcacgcagggagcgaaaaattccgtactatgtgctgcgcccggtattcgacaaatccagagtatcttatattccggtagaaaaccatcaggtaaaactgcgggaattgtttaccagggaagaggcagaggcacttcagggaacggaagaaatgaaaaaagacgaaaaactgagacaggccgtggagtatgtattaggaaaaaaggagggataggatggcacagcagcagccacagcaggcaatacataaatttgtacttggaaataaagaacttgaaggaaagacagcggaattccagtatgacaaaggctggtacagcattacggatattgtaggggaggaacgcaacgtaatctacaaatcccgcaatgcgcaggaagcctatatgaaatggaacgtatatatcggccgcaaaaaagagagaccgttatccggcaaaaacagcgatgcggatcatggaagccgtgcggatggaaacagagcaaacgattcccgtgagcatcggagccgtgatttccgcgaaaagcgtgacatgacagatcggcgtggaaataaccggggacgtcattgacatataaaaacagcaccgggcaggtgaagaccgcggtgctgtttttgtttaaaaagtgagcggagagcatgggattcgaacccacgttgcgtctattcgacgcaaaccgcatttcgagtgcggcaccttcgacctctcggacaactctcccttgaaattcatctccgatgaatttcctacgtacatcgcttccacggagcggaactttcatgcgatgtgctccttgaggtatagcgtaagctatatctcctacgtacatcgcttccgcggagcggaactctcatgcgatgtgctccttacatagtatacagaatttacatacatttttcaagtcgcttatcttgtgaacggacaaaaattatactataatacaaatgtgtatgtgaaaacatttggtacacaataagagaatatgcaggaggaaacgtgcatgatgaagatcggaatgcttaccagcggcggagactgccaggctttaaatgcagccatgcgtggtgttgtaaaaggacttactacgaatgtagacgaactggagatttatggatttgaaaatgggtacaaagggctgatctatgaacagtacagaattcttacagcctcggatttttccggaatccttaccagaggtggaacgattctcggatcttcccgccagccattcaaacagatgcgtgtgccggatgaaaacggtctggacaaggtagaggccatgaagtccacataccgtaagctcggactcgactgtctggttatcttaggtggtaacggtacacagaagacggccaatctgcttcgtgaggaaggactcaatattatacatcttccaaagaccattgacaatgatatttacggaacagacgtgacattcggttttcagagtgcaattaatatagctacagaaaccattgactgtatccatacaacagcagcttcccacaatcgcgtgtttatcgtagaagtcatgggacacaaagtgggatggcttacgttgtatgccggtgtggcaggcggagcagatatcattctgcttccggagatcccatacgacatcgacaaggttgtagaggccattcacaagcgcaccaaagacggaaagggctttacgattcttgctgttgcggagggtgcaatctccaaagaagatgcagagctttccaagaaacagtacaaggcaaaggtagcatcccgtaagtatccgtcggtttcttatgagattgcagatcagattcaggagaagtgtggtgtggaagtccgggtggcagttccgggtcatacacagcgtggaggaagtccgtgcccatacgacagagtattatgtacccgtcttggatctgccgctgcccaagcaattatggatggaaaatttggctgcatgattgccatgatcaacaacaagaccaaatgtgtgccgcttggagaggtggcaggcaagttaaagacggttgatccggacagtcagatgattcaggaggcaaaacggatcggtatcagttttggagattaaatttcctgatatccggcaaaaaggagaagaaaaatgtcttacacggctttataccgtaagttccgtccgcaggaattcgaagatgtcaaaggacaggaacacattgttacaacattaaagaaccagatcaaagccgatcgcataggacatgcttatttgttttgcggtacccggggtaccggaaagacgacagttgcaaagatttttgcaaaagcagtaaattgtgaacacccggtagacggaagtccctgtggaaaatgccctgcatgtcagggcattgccgccgggacttctatgaatgtcatagagattgatgcggcatcgaacaacggcgtggacaatatccggcagatccgggaagaagtatcttaccgcccgacagagggaaaatacaaggtttacattattgatgaggtgcatatgctgtcggcaggcgcattcaacgcgctgctcaagacgctggaggagccgccggcatatgtgatttttattcttgcgacaacggaagcacacaagatcccgattacgattctgtcccgctgccagagatatgattttcaccggatttccattgataccattaccgatcgtctggcagaactgatgcgtaccgaacaggtggatgtcgaggagcgcgcactgcgttatgtggcaaaagccggggacggttcaatgcgtgatgcgctgagtctgctcgaccagtgtattgcctttcatttgggagaaaaactcacctatgaaaatgtgttggaagtgctcggcgcagtggatacggaagtgttttccgcgctgttgcgccaggtgctggcaaaagatgtgaccggtgccatccggacggtggatcatttggtggatcagggacgggaactgggacagatggtgaacgattttacctggtacatgagaaatcttttgctcatccagagtgcggatgacatggaggaagtgctggatatgtcggcagatcatctggcagccctgaaagaagaggcacagatggtggagccggaaacactgatccggtatatccggattttctcggaactgtccagccagatccggtatgcggcacagaagcgcatcctgctggagattgcaattatcaagctttgccgtccgcagatggaaaaagatctgtcggcactcaatgagcgtatggatgatatggagcagaaattagaaagtggggcatttgtttcggcggcaccacagagtgcagcagttccggcagcaggtggcacgcaggctccagtggcacagacaccggagaaaacacagcttcccaaagccattccggaggacattaaacaggtgatgaacaactggcggtcggtcatttcagagatggggggcatcaccagacagtatttaaatcaggcggtgccgacgcttggaccggcgggagaactgctcctggtgtttgacgatgccaacgctttttcctatctaagcgacaataaggcagggtgtattgatcatttgaaagaaatgattgcgcagcggtgtgcaaagcaggtggaagtgcagctccgcttaaatgaaggaggacgcagcgcagccaatacggtaccggatttgcggcaattaatcaattttgatattgaggaagagaacttctaatggtatgataatacaagattcgtaaataactgaaattagaaagcaggaggaccccacatggcaaaaagaggtggattccctggcggtatgccgggaaatatggcaaatattatgaagcaggcgcagaagatgcaaaagcagatggaagaagcgcagaagaacttagaggagcaggaagtgacagccacagcaggcggtggagcggtggaagtgaccgtttccggcaagcatgaggtgacaaaggtaaaacttgcagaggaagtcgtagatccggatgatattgagatgcttgaggatctcatcatggcagcaaccaacgaggcaatgcgtaaaatcgatgaagcttcccagcagtccatgtcacagattaccggtgcattgggcggaggacttccgttctaaatatggattattacagtcatgagattgcgaaattgattgaggaattgtctgcacttcccggaatcggagccaaatctgcgcagcggctggcatttcatattttaaatatgccgcaggaccacgtggatgcactggcctcggcgattgtttcggcaaagaaaaacgtaaaatactgtaagtgctgttttaacctgacagatcaggaaatctgtccgatctgcagtgatacttccagagaccacaagacgattatggtagtggagaatacccgtgatctggttgcatatgaaaagaccggaaaatacaatggagtctatcatgtgctgcacggtgctatttccccaatgcttggaatcggaccgaacgatatccgcttaaaagaactcatggttcgtctggagcaggatgtggatgaagtgattattgctacaaattccagcttagaaggcgagacgacagccatgtatatcagtaaactgatcaaaccgaccgggattaaagtgacacggattgccagtggagtaccggttggcggagatctggaatatattgacgaagtgactctcctgcgggcattgcagggaagaacggaattataatacaccaccattttaagaggaggaaagaataaataatgaataatttagaattggaaaaacttgcgaatgaaatccgcaagagcattgtaactgcagtgcacagcgcaaaatccggtcatccgggcggatcgctgtcttcggcagatatttttacatatctgtatttcgaagagatgaatattgatccaaagaacccgaagatggaggatcgtgaccgttttgtattgtccaaaggacatgtagcaccggcttattattccacacttgcagagcgcggatttttcccgaaggaagatcttgtgacactgcgccatacaggttcgtatctgcagggacatccggatatgaagcatattcctggcgttgatatgtccagtggatctttggggcagggagtttctgctgcagtaggtatggcagcagccggaaaatttgatcacaaggactatcgtgtatacaccctgaccggagatggtgagattcaggagggacagatctgggaggctgctatgtgggcaggacaccggaagctggacaatctggtagtgattgtagacaataataatctgcagattgatggggagattgacaaagtatgttctccgtatccgattgataagaagtttgaggcatttaatttccacacgatcgtgattgatggaaatgatttcgaccagatccgtgcagcatttgaggaagcgaagaagaccaaaggtcagccgactgccattattgcaaagaccatcaaaggaaagggagtttcctttatggagaatgaagccggatggcatggaaaagctccgaatgacgagcagtacgaaatcgctatgaaagatcttgagaaagcaggtgaagcattatgtcagaagtaaagaaaattgcaaccagagacagctatggaaatgcattggtagaacttggaaaagagcatgagaatctcatcgtgctcgacgcagatctggcaggtgctaccaaaacctgtattttccagaaagaatttccggagcgccattgggactgcggtatcgcagagtgcaacatgacaggtattgctgcaggattatctacctgtgggaaagttccgtttatcagttcttttgcaatgtttgcagccggacgtaactacgagcaggttcgcaactccattggctatccacatctgaatgtaaagatcggagctacccatgcaggaatttcggtcggagaagacggagctacccatcagtgtctggaggatctggctctgatgcgtgagattcctggtatggtagtgatcaacccgtcggatgatgtggaagcacgcgcagcagtacatgcagcatatgatcatgtgggaccggtgtatcttcggtttggacgtctggcagtgccggtgatcaatgacagaccggattacaagtttgagatcggaaaaggaatcgtattaaaagaaggtacggatgtaaccatttttgcgacaggactggaagtgtcagagtccttagaagctgcaaagatgctggagaaaaatggaatttctgcagaagtaatcaatatccataccatcaagccgattgacgaggaactggttgttgcatctgcaacaaagacgaagaaagtcgtaaccgttgaggaacattccgtaatcggtggacttggaagcgcggtagcggaagtattgtgtgaaaaggcaccgacaaagatgatgcgtatcggcgtgaatgaccggtttggagaatccggaccggcggttgagctgattcataaatacgaactggacgcagaaggaatttacaaaaaagtaaaggcttttgcaaaataatacagcaagtacaaaggagactgtcgtatcgaaggatatggcagtctttttttgcctgaagtctggaaatatgtccggtagtgtcgtacgatttttttcatgcctgtcaggtttttccaaaattctaccggatggtggtgatactatattctggaaaaatggataaggaggcaggatatgatagatattgcagaagggccgggacgtgacctgaaaaatatcagacagatcggaacaccggcagagggggatcggatttacatagaaaatgcggcgtatgccagggtgcatgaagaaacttatgaggagcggagagtgtttatctttatggggcatacagagtgcgagcagggtgtatatatgacctttgtagaggctgccattccggtaagggatatggagttttcacagaatctgccgagatggggaacacatgcgtggtcggatgtattccgtgagattaagagatcttatgagaattccattattgtcggatgggcgttggattgtaaaggatatccaccacgcctgacagcagaactggaagctatccatagagaacagttcggaggagcacatcaggttcttttccttatggacagtatggagggggaagaatacttttatctgcataaaggcaaccggctgcagccgaaaaacgggttttatatctattatgcaagggaactgcatgagatacggatcccggatgtgacgattgaactgccgagacgtggaacccggcagatgcttccggagattctgacggagagcaaaaaagagaacgaaaaagaagaatgcagcagttcaaagagcgaacgcaaaccaacgtcgtatgcgatggctgccgcaatcgcgttgcttttggttctggccggggtcggaatctggcagcagcgaattcatattccgggtctggagcagaccgtggagacgataggagaaaaaatccgccatgtgtcacaaccgg

SEQ ID NO: 196 - DNA, 5497 bp, unidentified
  source 1..5497: mol_type = unassigned DNA
atgaaaatcctgttggtaattgaccagttcgatcagggaaataacggaacaacgatcagtgcgcgtcggtttgcccaggcgctggcggcggatggcaacgaggttcgggttgcagcggcgggaaagcctgcgagaggcaaatatccgatgccggagatccattttctgccggttgcggattctattatcagaagtcagggcatggtgtttgcaaaaccgaaccgcagcgtactggaacaggcgattgcatgggcggacgtggtgcattttatgatgccctttgcgctttcccgtgtcggactgcggattgcaaaggaaatgggcaaaccggtgacagcggcgttccatgtgcagccggaaaacattacatcgacgattcatcttgggaaaaataaaaaggccaatgagcttttgtatgaatggttccgagatgatttttataatgaatttacgcatatccactgcccgagtccgtttatcgcggggcagttaaaggaacacggctatcaggcaaagcttcatattatatcgaacggcgtatcggatgaattttatccgcgcgtgcgccaaaaggagccggagctggcgcataaattcgtcattttgatgattggacgttattcagaagaaaaacggcaggatgttttaatagaagcggtaaaacgatctgcacattcccacaggattcagctgattttggcgggacagggaccgaaggagcgcagcctgcgctggcagggaaggtcgctgcgctatcctccgatcatgggattttttgatacggagcgactgtgcgaactgatggcgatgagcgatttgtacgtccatgcggcggacgtcgaaatcgaggcgatcgcatgcctggaagcggttgcgtccgggctggttccggtcatcgcggattcgccgctttcagctacctcgcagtttgccctcgatcacaggagtttattcgaagcgggcaacgtagacgatctggcggagcggattgactggtggtatgagcatgcaacagcacggcatcaaatggcacgtgtctatgcggagagcgccaaccagtatcgtctgaaaaacagcattcggaaagcagagcagatgtttgcggaagagattgcggagaccttgggataaatggaatggaggcaacacagggatgattttggtgaaagaccgtacaggatcaaaaaacggcaccgcagacagcaccctggtcggagtgtttgactccaaacgtccgttgtaccggatcgtaaagtggctgatcctgcacatttttccgccggtgtttaggctgttgtacggatttcgggtggtcggcaggataccggaggaaaagatgcagaacggctgtatcagcgtctgcaatcatgttcacaagctggactgcgtgatgctggcatgcgtgtttcaggattatacgatgcagtttttatcgttggaatctaatctccacattccggtcgcaggcgcgattgtgcgtctgatgggcggaatcggactgcctgcaaagctggacgggtggcgaccggttttaaaacgcataaaacaggggctggatgagggtcagatgctgcagatttacccggagggagagctgatcgatggctgtcggacgctccgggcgtttcagccgggcgcgtttcagatcacgtgttggttccggaagccgatgattccgtgcctgctgcggttttatccgcgtttttccaaaagcggcagacgaaaaagggacggaatggagctggttattttagagccggtggacattccgaccgataaaaagggcaagcgcgcggcaacagagctggaaacgcagatccgatgtcagatggaagcggcacggcttgcagttggtagagagggtgcatgaggattgtgcattctattgtttagatagagcaggaaaatcctgcggaaatggagcagaaagtgaaaattacctggcttggtacggcagcaattcgtctggaagcggacggtgagacagttttattcgacccgtttgtacagctggtcggtggggaaaatccgaactgtctggatgactttttacaggatcagacgatctgtgtgacccatgggcatctggatcatatgatggatgttccggaatttctggatccggaaagcgatgcggaggcgaccgtttactgcggagaagtggcggcagagacgctttccgatatggtggagaacaccagcaacgtagtaaaggtgagaccgggcgacgtgatccgactcggggacgtacggattcttgtaatggaaggaaagcatgcaaagcctggaaaaagtcaggtattccagaagctgttttcccgcagatttttgcagtatttcagaaatgcgctggcacttgcatatttgaatccgaaatttccggagggcggacagacgctgatgtacgaggtgcatgcggagggcaaacgcgtgcaggtgatgggaagtctcggactgcaggaggatcaggaatacccgcagggtgccgatcttctgattctgccgttccagggaagcgaatttctggaagcagtagcgctggaggtcgtagagcggctgcagcccaagcggattttgctggatcattttgacgacgcattcccgccggtatcggagcatgtcgatacgagacggtttaaaaagctgatggatgaggaatatccgcagatcaaagtcgtaaagccgacggcaggaaaaacggtggtgctgtaacgggattttataacgtatggagaaacaccagtgctaccggtttgcagtttgagatacagcatgatataataaatagaaagagcggcttttcgtgcagatatcactcaaatagccgtataacattttgacaggtctttgcaacatggaagaattgcagctgcgggggcttatgttacaataggagggaacaaatggaaaaaccgacattagtaattctggcagcaggaatgggaagccgttatggcggcttaaagcagatcgatcctgtagatgacaaggggaataagatcattgatttctcgatttatgatgcagtcagagcgggattcggcaaggtcgttttcatcattaaaagagagcatgagcaggatttcagagagtgcatcggcaatgcagtcagcaaacatattcctgtagagtatgtattccaggagctgacgaaggttccggaaggatttcagattccggaaggccgcgtaaagccctggggaaccgcacatgcaatcctgtgctgcaagggcgtagtgaatgagcctttcgcagtgatcaatgcagatgattattatggaagaagcgcttttgaagagctgtaccgtttcctgaccacacatcacgacgatgaaaaatatcgttacgcgatggttggctatcagctgggcaacactttgacagacaacggttccgttgcaagaggtatttgcgtaaccgacgaaaacggctatctgcaggagattgcagagcgcaccaagatcgtgaagaccgaggatggcgcggcatacacagaggatgatggtaagacctggattccggtaggattaaagactccggtttccatgaacatgtgggcattttctcccagcattatcaacgagctgcagaatgcagtagatcgtttctttgcagaagaagttgaaaagaatccgctcaaatccgagtgctttttgccgatcgaggtagataagctgttaaaggctggaaaagcaaccgttgaggtgcttcattctgctgacaaatggtttggcgttacctataaggaagacaaaccgtttgtgatggagtcgatccagaagttaaaggatgccggtgtttatcctgatgttctgtggtaaaacaataagaaaagtcagcaaaagaatggaggaaacgaaacatggcaattttagttacaggcggcgccggatttatcggcagtcataccgttattgaattacagaatgccggatatgatgtcgttgtagtagataatctggtaaattccagcgagaaatccctggaacgtgtagaaaagatcacaggaaagaaggttcctttttacaaagtggacattctcgacagagaaggcctgaatgaagtttttgcaaaagaaaaaatcgattcctgcattcatttcgcaggcttaaaggcagtcggtgaatccgtacagaagccctgggaatactatgaaaacaatattgcaggcactctgacactggttgatgtaatgcgcaagcacaatgtgaagaatatcatcttttcctcttctgcaaccgtgtacggcgatcctgcgatgatcccgatcaccgaggaatgcccgaagggacagtgcacaaacccctacggttggacaaaatccatgctggaacaggttctgacagatatccagaaagcagatccggaatggaacgttgttctgctgcgttatttcaacccgatcggtgctcacaagagcggtctgatcggtgaaaatcccaatggtattccgaacaatctgatgccttacatcacacaggttgcagtcggcaagctgaaagagctgggtgtttttggtgacgattacgacactccggacggaaccggcgtcagagactacatccatgtcgttgaccttgcaaaaggccatgtaaaagccctcaagaagctggaggatcattccggtctgaacatttacaacctgggaaccggacacggctacagcgtgctggatatcgtgaaaaacttcgaggctgctaccggcgtgaagatcccgtatgtgatcaagccccgccgtgcaggcgatatcgcaacctgctactccgatgcgagcaaggcagaaagagagcttggctggaaggcggaatacggcatcaaagagatgtgcgaggattcctggagatggcagtcgatgaatccgaacggatacgacgactgagaatacaagtaaaagcaacgggacgatcggtgtcagtagaaaagacgctgaccgtcctgttttagttcatgacaatagaatgcttgcagagggcgcatctattgttcatgacaatagaatgctcgcagagcgtgcattctattgtttgaaggagagattatgacacaacaatatcaggagctgacagagcagttggcggcgctggtggatgcagagtggccgatggtcagcaaccttgcaaatgcggcagcgcttttatatgaaaggctggatcgcctgaactgggcaggcttttacctgacggacaatcatgtgctgtggctgggaccttttcagggaaaaacagcgtgcgtgcggattgcagagggaaacggcgtctgcgggacagcgctgcagacggacagcgtacagcgggtcgaggacgtgcatgcgtttcccggacatattgcgtgcgacgcggcatcccggtcggaaattgtgcttccactgcacaaaaacggagaggtaatcggtgtgctggatattgacagcccggaggttggcagattttcggcggaagatgaagagggattgcgagaggttgtgcggattctggaacggattatagtttgctcgtaa

SEQ ID NO: 197 - DNA, 27106 bp, unidentified
  source 1..27106: mol_type = unassigned DNA
gtgagcgcattacgttggttttatgcagttataatttatatccatcatttcaaaaggggcatatttacagtgcctgaaaacgtaaaacagaagcttgtatgtataggcaatatgacgaactttgataaggctacgcttgttcaactgtttcttgttcagcagtcacagcttcaggatattgaccggaagcttcagctgctattggaacaggtcgctgtattgaacaacaaccgttttggcaaatcttccgagaaactggatactgagaatcagatctgcttcatggaagtagatggcaacatcgttttcttcaacgaagcggaagcagttgcttcgctcaatgaatacgctgatgaagatgaaaccaagccaagaggcaggaaaaccaaaggcaaacgagaaaaggatatccggggacttcctgtaaatccggtggaacacaagatgtccgaagaagaactcattgccgagtttggcaaagatggctggtatgaacttgaagacgaaatctaccgacgttatagtttcacacctatgaaagttgaaatagaagaacatcatgtaggagtctacaaatccaagaaggataatcacttcaaaaaagcggagcatccggcatacctgttaagaaacagcttagtatcaccttcgcttcttgccggcgtatggaatgccaagtatgtaaatgcaacgccactctatcgtcaggaaaaggaattccagcgaatggggcttgccattgatcgggcagatatggcacactggacgattttgtgtgcagagagatatctctcaatcttttatgattatctgcatcagaagctttatgactatcatgtgcttcaggcagatgagactccggttctggtctcgaaagaaaaccgaaccgatgggaacaagcattacatgtgggtgtatcgtaccggtaagatgtatgcggacagacagatcatactgtacgattaccagccttcgcgtaatgcaagccatccaagagatttcctcaagatgttcaagggaatctgcgtaaccgatggttaccaggtctatcataccaccgaaaaggaacgcgaaaacttgaagattgccggctgctgggcacacgcaagacgtcgctttgacgaagccgtgaaagcattgccaaaggataagaaaaagtcttcgctggcttatctggcactaaagcagatccaggcaatatatcgcgaggacaataaacttgcagataaatctgcagaggaacgtttgagacatcgtcagctgacagtaaagccactggttgatgcttactttgcgtgggcaaaacagaaccagcagtctgtcccagccaaaagtaaaactgccaacgggcttacctactccttaaatcaggaaaagtatcttagaactttcctagaagatggagaagtgccaatggataacaatgccgcagaacaatccattcgtcctttctgtgttggaaagaaaaactgggttatgattgatactgttgcaggagcctaggccagtgcaatgatttacagcattgctgaaactgcgaaggcgaataacctcaagccttacaattatttcaagtatcttctggaagaaatcccccgacacatggatgaccatggtgtggatttctgtgaaaatctgcttccctggtcagacaagctgccagcggaatgcagaaagtaactttaatgatatgctgctctttggagcggttgtttatgtgggtgtacccactatggagcgtttactatgaatacatgataacctcctgatatttatgctattatcaggtccaggattctgtccgcccccccgggtcagttttaagtataaatcaacagtagcaatgtcatattcacggcagatatcgcatctgcgtttgccggaacgatatagttccaccagttgctgtttgaactcgtcagtatatttacgaggttttcttcgttgttttggttcggtcataatgagtgctcctttgtgtatttattatagattatatgaccttaaaaaatctgtccagttaattgtaacctatccaaagaaaccctctcttaggttatatccgggcatacatctcaccacctacgcttccgctaattttgcaattttatgataattagcaatccattttaccaacgttcttatatcatcttccgtattatatcggcctattgatattcttacagaagaatcaatccgtgcctcatccaatcccatcgccaacaatacatgcgatctatcttgtgacttagaattgcaagcagaaccgatagaaatacagatatcatgcatatctagcatatttaaaagaccttccccatcaataccagagattgcaatattcaaaatgccggcagctctgcttgaactatcaccattaatactaaaatctatttcattttccactaatagcgtacatagtaagctatcaagttcagaaatatggttgtgaatactttccatattggcaacattgtcttcaagtgcttttgccatagaataaatacctgcaacattttcagtaccagatctcattcccttttcctgtcctccgccaactacatacggtgcaatggaacatttcttacttatatataaaaaaccaattcctttaggcccattaaacttgtgtgcacttgcagataacaagtctattcccatttcttttacatcaattttaatgtgcccaacagcttgcactgcatcagtatggactaatgattcaggattgtcctcgtgcaccagtctagcaatttctgtaacatcctgaatagcacccacttcattattctgaagcataacagatactaaggtgggttccttatctaacactgccgccaattccggtatgctaaccaagcatttactatctacaggcaacaacagtacgttcttcccctgtaatcgctggttctctgccggatgtagaattgcatgatgctccaccactgaagtaattactttttttgccttatctgtggccttagtcataacccagttatcactttctgttccgcatgatgtgaaatatatttcctccggctcagctccaatacagtcagcaatgatttttcttgatccttcaagaagtcttttcgtctgccttccgaagcgatatactgaagaaggatttccatatatatgggtagaaacctccattaatgaacttaaagcgacttcactcattgcagttgtagctgcattgtctaagtaaaccattacaatccccttactttaatatcaggcattctgtctgtaaattctcgatctatagccgacagttgctgtctgataatttttcttttttcaaatgctggatcaaagcacatcatcttaaattcctgtggagaaatatccgaggcagttcttacatgcggatataacaacttcaagtatgcagaacacattttaataaccgcatttgtatctcttgtatcagcatttttaggaatatccaacaattcctttactattgcactatagaatgactgagttctgatatatgaaagtatctctgaaaaatactcaacattcaatgagtatccgtttaattttaagtcctcactgattcgaggcaaataccagccttcaataaatccatggaatctgtcaattaacgcatgatcctgaaatgcctccggtaattcttcaaaataatggttattcagaggtctcttgtttgaatccaagtcaatatttcccagtaagattattcctgccaatgatgtctgttttgatttacctactgtgaatgccccctgctccatgtagttctttaaagcaccctgtatttcctctggattatcaaatgaaatagtcttaacctcatccaatgaaacaaattcatatgacggaataataccaggcgtatttctacccatatcatagaacaattttgctctggtaatcttaccgccacttatttgccatccatgcttagaaaggttattaaaaatgtatgatttaccagtacccttaggtgccagttctatcatattaagatttggttcaacaaaaacaagtaatctggtcagaaacaataatttctgatccaacgactcaaatgaagtcgaattaggattatactccatattactgataaggaaatcaacccactcttcaagatcaaagtgttctcttgcctggcagtaataatcaaaatcaggtctatacggactaaacggtttaaatttaaccatttcagcgtagcctttttccttcccatccggttcaacatactgcatggttacaacaccccagttttctccttctttaagaagcccctgctgacgtgctaaatatggtgatactcttccctcaccatttttgattcctatatctggtatttgaaaacgatattctccacttctaatatctgattcaaatattattcttgccagaatctgaatcacatcaccatttaataaacggcttctgatattgctatccttcgttggaatatgcttatcaataaagttatataatccttccgtgtctatagtgtcatcgttagaaaactttttaataagccaatcctttataaacgaaggaacatttacaccagaaaacaggctatatctgtcaggagtcttatgcattgactcttcaggaaatatgtcttttatttttttatctaaattagtcatcgaatccatcatcctccatcatatttttcttagctttgttaacaacatggaatttatattccttacttgcaataattacctttatatcctgttctttaccagatgataattcagcagaatacattccactatcagctactaatttatgtttagttccatcagcctcaataacatatgcttcctctgtatcaggaataattgcgaatgttactttcttgtccagaccagtaacctcaagtttatcgtccacaaccttataaacaacctttttctgaccagtctgtggactggcaacaattaccggtacaagcatttcctcaattgtggcaccaccatggttttcatatttcggccggttatataaagaagtctcattaagagaaataatatatggattgcctggtttcccttcgtcttcataaacaatataatctacggtatctgtaaaatcatctttcgatgcaatcttacagcatcttccctcatgatccgatccatcgaagttatattttttcttggtttcagtccactttgcccttgctgtagcgccatgatctgctgtaataagaatcttctttccgtcagcttcctggactatatctcttatcttttcttctaatatatcaaaagcttttctcagatttattgccgacttgtaaaactctccatgaataactatctggtcaaaatcgaggaaccattctttgtatccaatagatgccatgtattccttattaacgtctgttatggaaggcaaatggcaggaagcatagtcacaatactcaacttcatatccatttataacaagcaactctataatgagcggtgtatattctgcaccaactccatctaaaacgtaaatatcagtctcaccaacatacggtgcaattagtgtttcttgtctctgaagttcataatacatactgtagaggtttgtagaattcgcacatccactcgaataatactgctggagatactggttatctgaatctgcaaccttgctctctctataggcttctaagtagtatttccactcattttttccttctatttcagcctctcctattccaaataaataagaatagaaagacggatatacagattttacttcatccttatccaaaacaccatttttatatagtttaataacaaattctttttcggtattgctcaatccggtatacgcaggcttaaaaatcttggtataatatgaaaaaagacgatttctcatatcctctatcgtttgaccatattgtgtgctcaactctaccaaacatatttcggatacattaccgttcacaggaatgcttagttccttagatattccttcacatataacctcttgtatttctttttccggcgcaattgatccggcgtatttattaagttctttaattattccaattctttcttctaattgaacaggattactcaaccaatatccctgttgccagatggttatcagatattctttttttgaatttgttttaagcaccttaaatactcttgcaagaaaagacattggataaaaaactgctatatagcatctaataaaccatttttcatattgtgagtctgatgtaagccatttcccggcaataacataaattgaattaacatctatacctaataccgccgatgccaactcatgtaatcccttcccagacaacatattagtatagtcaacacataactggttccaatatgcctcatctgttacactgtagcggaaatcaatactttaaatcgcaggccttttcaagatattcctttgaattgtgaacaacatcaatctgaaaagcattatctggcgaggccttctgatgccactcatacaagctttctgagcaacaccatattggagaaccaaaatccaacacttcagatgatctccacagtccaagccattctacacttgaaataattttatttttcgtaatatgatctgagtattcattagccacaaaacatactcttctattcttacctataagctcataatctgaatttaaaaacggatcaagcaaatcttttctggcaaagctactctgcaatactttatacacattatccatcatagaaaaacatataaagataattcttctttgagacgcatttgccccagaaatcccggaattttctatatcaaatagtgagagcaccgtggattcaatatcctttttagaataaaatctaatcagttctgaaaaacccaagacatatgtatccctatcctttgcagaatattccctaataacatggacgaacttagtctttgtcatccaaccatcatctttcttcataagataatcactcagatcaagcagttctccgtttccggctttcaccaattcctggatatcttcctgagtatgattattcatttccataaacagaaaacgcactggatatctacgatatgaacttgtacccttatttttatcttctaaaatcttttgcttgattacttctacatccatatttccgcctattcctcacctaaaaatttcataaccgctgagcatacaacaggatactctttacaaagcttaacaagaatttcttttgcttctccatcattaaactgcttctcataaataagttttgttgttgcctcaatcgttgcatgtgtctttcctatagcaataggttcaatatctattggttcaaaatccggactttcaaaaagatcgtcatctgcttcataatcatcctcttccccagaaatgctgtttacatcagactttcctgcattgttcggatttatatctgtatcatcctctgcactatcaccattatttgaaggcggattcacaggttgcttactctgcaatgcacaccataaaagaacttgtttttcaacgtcttcttctctccagaatacaatagcatctgatagattctgtttaaggaatgccatcaaattagaataattgtccagtttataatttacagttgcaaggcacttatcaacaaaggcattgatacaggccgaatcctgtaccttttctaatgtaagcgctattgttgtcttctgcttttttaagccttcaagtagtctgcttacatcatcttgagttatactatcacctgtcgcattagcaagcttaaataactcatcaacaactgaattgaactcgcttcctttatcaactacatattttaatgcccataacggcgatttatattgtttttcaaatgccgatctcagtgaccactttgtttctgaaataccgtcaccctttactccaaaaacactctgaatcaaatcaatcaactctttttcttctacagttgaaaatctaactctaagtttagcatcagctttttgatccaaccaattataaaatgcagcattaacaatatctcgcatgattgtggttgacaccaagcttccttgatctgcaagatacatttttccaatatatctacggaaaactaatgctactgcagccatgcaaatatagttgttgtaataaccgtatggtggctgtgttaaaaacttaaactctgagccgatatcgactactgttttatttcttagttctgcaatcttatcgtcaatgactttaaccagaaccgtcataggaacatttacatcataggttccaatatagtctaatttctcgtcaaaaatccaatttccattcttatcttttaaaaggtttattacagcagattcctgaccaccaaatgcctctatgtctgatctacttaacgcatagcaaactttttcaactgtctttttagcatatgtagtcttccaagcagtactagcgttcgctattttagataacttctcagcgccatctgtaaatatccttccaacgcttgttattacacctgaattgcttacagacttaaaacttgaagtattaactctctctccgtggaaaataatagttgccgctccatcaagcaactcagttttccatttttccatccacttcatagccctcttttcataaggagtaggatcttcaacctttgtatcttttgcgacagtttcacgtgctttagcttcaataacgccttcaaatctttgctgtccaagcgttgtgtctgcaattacgaacacaatatctttcattgtttccctttgcgacaatgcttgaatcaaatttttctgattttcgagagtagcttctggacgatttgatttcttatcataggttggtgtatcacctctaaaaacaataattgcaatcttcgctgcataatcttttgaaaaggctttcagtagttttgactccattgatattgccgacaaacttccccataccaatgaaaactctgttattctattaaatccgtccgcattagaaatagcctttgtaatgtcatttctataacctatatattcatcaagcaaagaactaacatcttcatacttcaaatacagcttgtcctttgccgcctggattttttccataggcatagccgatgaagaaacctcatatacttcatccggtcctttaagaactatctgcttttcatcaatagaatccaatgctcttgtaatagcatcactgctccattcaccacttaatacatgaagaatattctttttgctaggattaactaaactcttctcctgatcggcaccatccatctgtgtcacacgattcaaaagattcaaaagaagtattaccttaaatgcagataattcaggcacatcggtatcttccagttttgttgaatacatagagaacttataaattattgcatcaaaattatttgttctatcctcagaaaatgccttaacaaagaaatcccacactttatcagctgtaagatatttaacatcatctatatcctgttgtatgaaatgtttaaatcctttattctcatcattcaaaaactcgaaaatacttctttctgcagaaccaatagctctcgaaacaaaagttgcaagatatgccgtataaggatgaaatggatataagtgttgaataatatccttagtctgcgcagacttatccataggtgcaacaatttcatctaatgcctgcttaacttctatctgtccagctatacgatcagtaattaactgcgaatattttggctgatcactaatcttcaaggcattcgaaaggatatgatatgttgttatatcctgcatatcatatttgaggccgaggaatcgtgcctttgccatcgttttctcatcttccttaagttccttatagctatcggtagcctccatgctcttgtgtgtaatcaagaaaacatacactccgatgtatttatccttatcatcttttcttggagccttactaagttcagcaatatcctgcatacaatttaggatactacgacgttcagtaatctccagcaaagaggtaaactcatcccagaaaataacaaggtaatctgccacattttgtttacgaagagcatccattacttcggtaagccactgtttaatatctggtgttgcttttatcatattagactttttgagagcaatgttaatctcctttaggacattaacatcaccaatttccagagcttccttcagctcatcaattgatgaagcatacctatccagctcgtttttaagcatgctttcccaaaaagaagaaaacttcttatcttctaacatttcaataactgcttggaaatctgatttaactgtaatattcacaccagcatcatttaactgctgtgtaactgctctctgtattgtatattttaattcttcagtatctacaatggagtacgtacctttaagcacaactgggaacaccctttccttctttcggaaattaataagcatccccttaagctgcggattagccaatttatcaatataatctgtaatatcatccaaatcgtcacttaataaatgcttaatcacagctgttgaatggctctttcctgtaccatacgtaccctgtacccaaatagacttgtgttgatcacctgttaacgaagtaaaggcattcacaatctctttaaggtttgactcaaatttttcatttgtaataaactgtttccaataattctccttctcctctgtcatattgaaggtagaatcaaagaaaggttcaatttctattatctctgagtacttcatgtcatcctcctaaataaataatgtgcagccttcttccttaaactgctcaattttttcagtcaatgtatccacatcggtatccaacacttctgccaaatgttctcggcagaaatactgtttaattttcttacccaatagttttttacacaaagctacatcatccttctcaagttctgtatcacaataataacatttctccatttttacatcctctttatcgctgcggcaagtgcttcatctggagtcatttcttcattaagatgaacattttcaagaccccccgtcaaatctgcagtaagtattcctgcctgcgtcaatcctcttagcgcagggataagattctccggagtcattccaaatactgtgtaaggattaatgccctctggaagaatcagatcgctaaccgtgatatcaaaacactttgaagcatgtgcctctttatataacaaatatgctaacgcatgcatagaaacatacgccggtgaaatcctcttaacacctttacaactatttccagacatttgaagttctgcaacatatatattctgcggatcttccggttctgtagaattatgtcccaatggggagtatctcaacatagtaatcaatgcgttagtaggatttttaattgtattatcgtttaatgtcgggaagccttccctcataatagccacaatatcatcccttgaataattcacatcaagctttattgatttcacaaaactgttaactattgccgaattatacgcaaggccaacccagataatctgccatgctgccaacctattatggtcatacaacctcttaaccatatcaaatttgtctgaaattttcttttctttatcatctatcatttctgcttcacggagccagttgatagcagctggtatcatcttgcttccaagattcggatatgatccaaaccaatcattgccgttattgaagaaaacatctacccattcatctcttaaaccaaatgtagaatatctatcaataccacttgttctcatattggaagatttaacaagcattccaccctcattaatctgtttcctgtgtgctattatgcagcctcttgaactaacttcaaggcacttatggcagtgaacacacatgtttttgtttatctctaccttatctcttaccgtaagagctcctgtcgggcattctgcctcacatacgccacagagttcacaaccagctgttttagtaagcacacgagaaagcattccatgtaaagcaggcttattaacagtaccttcaactataaatcttacagtcttaccagattcttctacactaaatctaaagaattctccattaaaattcagttcacccttggtaattccattctcaacggttgagatatattcacaaagagcagttaaccatattctccaatctgattttggctgtgtaacaacacactcaaaattcggttctttacttataaggtctacacgagacccatctggaataagtcctcgaccacctgcatttttctgccaattgtttgaactaatataattatttatcttttctttggaagtaagccccaagttttttgccatctgctcaataactgctacatactgctttgaaatttccggatatattcttcttatcaaatattcagaccaatcagatgcaaaaggacatactccgcatcctacacgagttaatcccattctataagcaggattcagttcaattcctcttgagaacatatataagaatacttctgaatcattccatctgaatatcggtctgcagttaaaaagatttggatgcttaacatttgcgccaattctttcatatgcagatctacgtgcgctttcatcagaacgaactccttcataaactgcaacctttggctgcttgtctgtattgtgtaattctttcattgttcttctaaaaactgtggtcttcattacagagcaacaccatctattaactctgctaggtggaccatactgcttccacaaatccagcgcatgtctatcactctttgcatgatacagtttgaaattagggaagcgatatttataatcttcttccgtatacgcaacaatgtcataagtacaaggaagttccatatcagtatcctgaaaaacagccttaaatgattctaccggtaaaactctagtcacaagatccagaataacctgagaatctttaccaccagaaaaagcaacaacataatcatcgacttttcctttaaacgtttcatagcaccccattatgaagtccattgcctcattttccattgtttcaatagcttctctattgatttcaagcatcttatctacatctactggttcgagagtactaaaagtaaaatccgaattataaatcacatctggcttgctatagatacctgcccctcttctctcaaaaaaaggctgacctttataataatatcgtgcatcaatattccagcaaattggtaaatccgtcttaggcattctatattttttattgacttcgagcatctgtaattcctgcaaatacacaggtcttggtgcaggaatagcttcatcatctgttatattgtcactcaaaataatgccattattctgaacattccatttaactttaaacatacttgtctccgtttctaatagccataagctattggtttattttttaatccaaaaactctttggcatcggatatatttttgtggccattatttttcatccactcgtcaacctcattcacgtcaaaacgccacaagcgtcctttttgatgtgcgggcataccctctttttttatccagttcattacagtatctctgcttatatgtaagtatgcgcaaacttctttcattgaaagccacttgttttcttgcattgtattaacctctctttagaattcagttcagggagtacacatattcaaatgtacataaaatacccataatataccgaattatatggtatcacaatttcacgtccttttcaagatttttcttgattaaaatcagttatagttgtataataacgtactttgcatatttccgatgttttttgtatttttttattgttttattaaggttaatttggtgtatttatccccatctgccacttatcatgtccctggatactttttaccgcttgtctcagtgtatttgctcttccatgctgatgatatggatgctgaaatctatgcttatgaaacaaaaccagcgattcatcctgcggatactctgtataatgcaaataccaataatgaccggtgttcctgctctgtattgttacatccttcccatcaagcataatcacattaaaatactgcttgtctatctgagataaatgttcctgattaaacatctgctctcccttctgctgcaaaccatgtagccaatgcctttttcaaaatacactccattgttttctggtcctttccctcgaaatatttctttggatatcttctctgacaccttgatattcataggtctgtccttaggctctactgtctttgtgagatatctactgaccatagtaaattaagattgtttctttgtctcgacctcttctctcgcatgatcaaccgtaataatcagctttctatcttcacatttcaccagaatcggagcttccaaattcttcaagccataatccctggatcctcaacattggggctgacttgtagccacaaccactgaaactacttactttcaattttctgtaatcttttctttttcttgtcataaatttacccctttcgttctatattctatgttgtttggaacttcattatagtacatagccgcatgtcccgtcaaacaaaatttgtatagtcgcatgtccattttaaaaacacatggtcttatgtccatttttgtgttatactatttttgaaaatttaacccataagggcagattgtgagattagataaatgagtaaagagaaaaagactgggaggaaattgacgcaggctcgcaaagaagccaatgccagatataatagtaaattcgtagaagtaaaagtccgtatgacgccggaacgcagaactgttgttcaagaacatgcatcttctatggaagaaagtaccaccgctttcatcaaccgtgcaattgatgagactatggcccgtgaccaagaaaaaaaatcaagttcttaaaacaaaaaagttggttcatcccactatttggggcaaaccaacttctcttatttcttggaaaaactgacagtttcaagtataacgcgcatctagttttcaaacttatcattccaaacctgtctttcactttttgtcttaactgcttctgaaatttggtcatccgtcaaacaataaccttgttcctgcatccttacaatttcctctagttctgctagtgcaagcctgtttgcatcttgtacaaaaccatcgcctatgtattcaacttttcttaatattcgaactttaataacatagcctttttcaagatattcttttattcgcttttgtacaccattcttcctaacaccacttaaataatcagaaatatgccctcctttaaacattctacagaaaatatttattgacttaccaacataaaatggtatttcttccatatcttttacggcataaaatccatatactcctctgatacaactgtcaggatttatttcctcttgtacatttatattaatagattttgccatctcgattttttgttcatacgtcattcttcttgccatttttactcctccgtaaacttcaaaagttttgcattatccatgcttcctaacaaatatcgcaaaatctaaatagtaaccgccacctttatcaccccagcccgtctattctcaaataaatcataagcttcttctatctgagccaacggatatgtgtgggtaataagcggtgtagtatctatcttgccctgttcaataagcgcaagagtttcagcacagtcacagccgtctactcctcctgttttaaatgtcagattttttccatacatttccggtagtggaagcatttgtgcattttcatagagtgcaactattgtcacaacagcgttaggtcttgcacatttccaggcaagttcaaaggtgctatctgctcctgcagcctctatgacaacatctgcaccaccgtgttcactttccttttctacaaaatccacgcagttctcaggctttacagtaagaacctcaggataatgcttgttgataaatgcaatcctgctgtcatccgtttcgcatacgatgattttctttggatgttttagcataacgcacagaagtgtacatatgccggtaggtcccgcaccgataatcaaaacggtatcatcctctgtgatttcggaaatgcgggctgcccaatatcctgtagcaagcacatctcccactagcaaagcctgctcatctgatacagcatcaggaatcttgttgagtccggtatttgccaaaggtacacggacatattccgcctgccctccgtcgattcgacagccgagtgcccagcctccatttttatcagtgcagttattgacatagccatttttacagaaaaagcattctccgcaaaaggtttccacattgacagttactctgtcgcccacattgacatttgttaccgctgagcctgtttcttccactatgccaaccatctcgtgtccaactgtaataccttttaccgcacggggaacagccccatgcttgatatgaatatcgctggaacagatgctcgcaagtgttactttgacaatggcatccgtaggttcaataatagtaggtttctctttttcaattagggcaaatttgcctttatctacataggtgtatgttaacatttctgtttcctttctgaatggtaaagtattctaccgcactcaggcagattgatattcttattgtaccatattcccgactatcattcatctacattttctcatataaaaaaacatgccaccataccctctcaggtacagtgacatgtctccatctccggctattttgcttcacgatacctcttgcaccaaagttcttttatccgaaaactctgcttgcaagtatgaacacatcttttgcactgctcaaagtaatctatcttaccatttccgttcaaaaaatatgcccagtaccttttctctttatccgtcataggatcacctgctcttcccctgcttaggaacattgggcgcctttacttctggcacctttgcctgctctccctttgcacaaacagccacaaatgcttccgcaccatactgatactcggaaggttccgcaacagcagatacgaaagatacatcttccataacctcttcggtatgtttctctgtatcaacttgcttatcattcatgcggttaatctctacatttcttgccaaatcctccaccttatcaatggatgcatccagacgaagtaccatggattcatacaccttcttctgccatttccatgatttcttgattacctccgtcttggaaaatctcttctcctgcccggaataatcctcctcttccctgtcggcgaaggttctgaacgtattcgccaccttctgtccggcttctctcattcccttaccaaatgcatcaatctttgagatagtatgctccgtatcgacaattccctctttgaccttattcctgatgcctataagtttatctttcaagcccacaaattcgcaaacacggtttaaggcttccttgcctcgcatcttaaaatcagccacaatccctccggctttatgcctgatatcctcctttacttcaaagagctggtatggataggttacaattaactggacagattttttaaggtcatataatctataataaatacacaaaggagcactcattatgaccgaaccaaaacaacgaagaaaacctcgtaaatatactgacgagttcaaacagcaactggtggaactatatcgttccggcaaacgcagatgcgatatctgccgtgaatatgacattgctacttctctgtttgacaaatgggtaaagcaggcatccaattccggctctttccatgaaaaagataaccggactccagagcaggaagaactgatccggcttcggaaagaaaaccagcagttaagaatggaaaatgatattttaaaacaagcggcgctgatcttaggacgaaagtaaatgtgattaaagcaaatgcccacaaatactctgtatcagcaatgtgtcgcgtcctacaggtaaacagaagcacctattattatgaagcagcagcaaaaaaagatgaatcagaactcactgcagacattcaggaaatttttagaaaaagccggaaccattatggtacacgaaagatcaagaaagaactggctgattgcgggaaacaggtattaagacgcaggattggacggatcatgaaacaggaaggtctgatatcaagctatactacagctcagtttaagccgcaaaaagacagatgtaatgaatcaaaagtggcaaatgtgttgaactgacaatttcaaaaccagccataccgtaatgtggtggtaagtgatttaacttatgtaagggtaggaaaccactggaattatatctgtgtactgatagacctttttaacagggagatcgttggatacagtgcaggagaacataaaacagcagagcttgtaaaacaggcatttcggaaggtagaaggcaatctgtcggaaatccaatccatatcttccacacagaccggggaaaagaatttaaaaatgagacgattgaggaactgttagaaacgtttcaaatagaacgttctctgagccataagggatgtccttatgataatgcagtggcagaagccacgttcaaagtcattaaaacagaatttgtgtggaatgaaaaatttcacacactagaagaactgaagataaaactatgggattatgtaaactggtataatcatcaccgcatacattcttccttgggatatcaaacacctgtacaatacagggaaaataacccaaaaaaatttgtctgaaaaagtgttgacaatccagtttactccgattattaaataagtgcaacctcaatatttttgtctattcgacctacttcaatattcttatctacccaaccttcaaaattcatcgattttatacggctttcagggcattttttagtttcaaaaactgtaggtcataaagtgcggaaaagccttattttaagccgtttttcacacttttaattatgtactttagtcaacaatacgacactctcaacgtggctcgaggcgatagcaagtacgtcaggcctcctcggtcgtaagcggaaactgctcaaccgccaaaatccgctctttggtcattcgtggtaactggtcaaggcgttttttcggtatttggtcgttaacgggaagtggtcaacgaagagccctttccagttcgccctcactgtagccaaaggtataaccctcgtccttaccattagaagcccagatcaaagcagcgtcatatacgctgaggctctcgccgtcatcgtcatcatccgattccccgaaaggaatcactctgccacacttcgggcattcccagtttccgtctccgatgtactccatatctacaccgcatccgtttccacatccataaggaattataatctcgtacctccgatttttatttttgcatcttcttatttgagttcttccggattcgcagtaagccagttacggatatcgttctttttgtctttgaagagctgctccctgctgccctggaatacaattatcgtggactggcccttgcgtctcaattctgcaaagtaagagcaataattcaggaacatcgtatcgtgctcggcaataataaaggccttcttgttttttgaaacctgactgtatatcagtccgagcagtctcgctgtctcccgtttgcccagtccttttgccggttcatcaagtcctatcatggagtacttattatcgtttaatgcctcggcaagctttattctctgattttctccgcccgacagagtttttactttctggctgagcttcaaatagccaagtcctaaatcagagagaagcttcagcattttatccgctttagcggaaatattcataccggaagcaataagctcatcaatggtcatttgctgtatgtcatatatattgacaccatcgactttccactcgagaacctcctgcagatatccggtaccattacatttatcgcaggtaccaaagagcttctcctcataaaaactgccgatttcaattacaccagtgcctccgcatttatcacaggcacctttgcctctctgagaaaaataacctttatccttcccaagtgcttttgcataacaggttcgtatctcgccaaggagcttcgtgtatgtggccactgtagtaaatgagtttccttttaacggcttctgcgaaacatacaggtaatcctcataatacttggggagaatttctctgagaatcgtcgtcttgccgcagcctgacattccgcagagacccagtacagatccatgcggtatttccagcgcgcttcctgcataatcgacataatccgaatccagcactcgggtgtcacaagatgttctcttgaaaaactggtaaggcagagaaccttcctgaagcttcatatactcgtttttactgatcaggtaaccgccgttcttgcccccgtcatgtccaagatagatattgtgatcagctttttcgatgaccttatcgttatgctctaccacaagcaatgtattcttcttgcgcatctcatccatgatgcctatcgtaaagtcaacctctgcgggatacaaggatgctgtaggctcatccagaacgataagtaaatcatgcatctttcctataagaagctgtgcgatgcgaagcctttgcagctcacctccagacagcgaagctattgatcttgtaaggctgagatatcctaacccgaccttcttgcatgcggtaatgaaggtgagaatattatccagagcgggctgaacattcttgccggcactcttcttcagtttcagcaaatccttttcaagagtatcaagatcttccgtgtagaggctccccacggaaaatccttttgacagttctttcgctgcagtcttcgctcttagcctgctgccagagcaacaatcacacttcttttgagcacagtactgttcccgattatgagagaacatatcatcagactttttctccaaaccggttatcggtccgatatagcagctggtcttggatcttgacctttctccggctttgtacttaaatgtctgtttaagatttcccgtgccgtacagtaatttctccttctgtttctcggtcagctccttgaagcgcttattactgtctattccgcattcatcacaatatgcaatcaaaagctgtctgaagaaatctacataggttttctgccagcaccggaaaggaacctctgaaatctttttgtcataatcaataatactgaccggatcaggctgtagcttatagccaagcccctggcattcccggcatcgtccatccccgttatagttaaaatcacttagaggaagccccatgatgcttccggccacgtatataacaaacttctgcaaatcaaaataactcatgacagttgatctcggattcacattaaagttcagctgccttaaaggaaccgacatgatcacatcgtcataggaatccacatcataatcaacctcgaccttgttgtcgttggtcattttgtcgtactcagcctggctaatcccggaaatcgtgctgaaagcaagacttgatttgccgctgccactgacacccgcgatacatgtcataccgcccttatacaaatcgacatcaatgtttttcagattatgtgttctgattcctttgtaagttattttttgcatgttgtcacccatagataattgtcatccaattcatcttccattttttctattccactatagtctaatcgccttgcggagaaaagaagctccataccggcttcctccagcatttgctcaacctcggagataaatggaacgtgtaggtaaaattcactgccgtaatcctcaagctgttcatctcccagctccagctgctgttcccagctcatattaccggtatctatgccaagggtctctgccttttcgctccagtaggacttcttcaccttattatcaagatacggtgtcgtaaaaatgaacttcccatcatcctttaggagcctgcaaacttcctttactgcggagaggcgttcctcatagctttccagaagcatcagcccattgaaagaaaaaataacgttatcgaattcctgatcctcaaaaggcgcagagaggatatttccaacacggtagtcaattgcaccgttcacggcttttgctgcggcaatcatcttttcggcataatccattcctgtaatctgatagcctctttcgtacaggggaatagtcacacgccctgctccgcagcctatatcaagcgtcctaccttcggtcttaaagtatttctctatcagtatctcttcataatgaaacagtcctgccgcgttgaagtctgtatagtaattaacgatttctgtttcattatagcttttcttgtttgaatttactgtactcatcctgtctactccaaataatccagcaacaacttcctgtactgattctccttgaattcaggattgcagtctaccgcaagcatgtcgccatgccggttcatataatctattctgcagccgccagcgcaaatatatctgagctcacatttactgcatttagctataaagtccgtagatgttttccggttcagctcgttaaaatcctcgaatatctgaaccatatcctcaccaagaccgcgatagtatgatgaaaacttattgcacggataaatcctgccattggcatctataacaatatttgttccgataccgcagtttttgaaccggacattccttccgctacttgacgcctttgaaacacccctgtcctgaagctggctgacaagcaaaatcatcagtttatcagcctcatacttattgaatccggtaaaatccattgtcagagcgtttccggtcatctcaatgtcatcgttaagacgtatctcaagattctcatattcaaatgaatcgacaaagtttattaagttttcgcggatatcatccaccgtagaagggaggatggtgattgccagggtaattttaattccggtagttttcaacaggtcgatggcgtgcagagctttggcatagttgcctctgcctcttatcctttcatacggctcctgtgtaaccccctcaaagcttatctgtatctcctgacagcattccgctatggttttatagttgttttcgtttatcagcgtaccattggtgaaaagagatacattatgatccctcaatccctcaaggagctgtatggtgccggtatggatcagcggctctccgccggatacgacaatatccgtggagccgtttatcttctttatcctttcaacaacggccaaaatctcatcaaccttcaattcctgcttatccactataccagcagacacaaaacaatgagggcagcgcatattacagttgttggtcattgtaatgtgcacctttttctttatggactcaaccgggtcttcctcttcagaagtggcatcctcataaaactggcaatcctcaactttcgtcaaaaagtccgtaaatgcaagaacgcagtcatcctctgtatttccagggaatgctgcgtaatactcattcaaaccgtctattattgtattctctgaaagtatcttaaaaatctcgtactcctgatcatcgagtacaatccagttcggatattcaggagctatgacaatatgatagccatcaatatccttgcttacagtgttgtgaggaaaatccacttttgaattggcatcaaattctctactcatatattttcccgtatgtctaaaaagtcccgggaacttgtcccgggatcttctcggcttttagtatacccagattagcagtcttttctcttgtgagttgttctgcactgagatctctggcaatgaacacgaaccgagttttctttcttttccggaaccgtaatcgtttttacctgcttgaacatactttgcctcctattgtcatttttgtcttgaatcaacaatctttgcgcttgtgcgtcgtacggcactgcatacgctggccgacgacaatgacctgactcttgtttttacttggtaccacaatgtttttcagacctttgaacatcttttgcctcctatgcttttctaccatacaacactacgaaatacagtatagcaccaattctgtgattctgtcaacggtttcgcaaaataaaattttggcaaaaatatgttcaattttgccatatcaccataaaatagagcgttatcaatgtttgttgtggtcaagcttttttgtaacactatgacctaatttctgccacagggattatgtacccccgtagcgtgcctcataaggtgttttgtaattattataagaatgcggacgtacatgattatattgcacataagcaaattcttcgactgctgtgtagagttcatcctctgtacaataataatgctgatatataagatcatttttcaatgtattgaaatatctttccataggggcattatcatatggatatccagctttgctcatgctttgttcgataccaagctttccacagaatttcgtaaattcttttgatgtgtactgacttccttgatcggaatgcagcagaagtttactcaattctattcccggttgtgaatgaattgctttttcaagcgttcttttcgctaaatcagcggttattcttttatccgttatacttgcgataacacttctgtcatgaagatcaataatggtgcaattataacgcttgctaccatctgttaaaaatagataggtaaagtcagtacaccatttttgatttattgcatttgcatgaaaatcctgattcagcttgttttcataaaccttgtgagcaataccatgttcatacgccggtttcttttttctggatattgaaaacagctgcatttcagtattcatatatttgtgaaccgttaaacaactgatatcgtaccctttacgaataagataattataataagcatttggacatatattaaactttctgaggaaccatctcagtccaaatttattgttgaatttctgaatgaatcgataatcctctaatcgatttccttcgcaaagaatgccgccgtttttttaagaagtcgttttccttttggagttctgcaagctgtcttttcagtttaaggttctccttcatgaaatcataatcggcttgggcttcttcatttatctggcattcttcacgaaattgttttgtccagttggatatacttgcttttgatactccgtattcagctgcaagtccttttatggagcgtcccccctcaagatgaaggcggacaatcttcttcttgaattctggttcataatgttggttcatctgtaacatacctcgtttcctcctaagattatatcttattaggtcggtgtgttacaactatagtttagcacaacagtccacgcttgtatgaaccagccatccagcaatagggccgacttttggtgaacttgcatatttatataagctttcagcatcgttttcttcccacggacgcaaaataagtctttctgtttctaaaaccactatgaacctccaatgtctcgttttttatcccatttacttctttgtcttttcttccaactcaagcagatacctgtcatagtccgacatgaacaatctgtcttgaatgatacgatatttttcaaactccgtttctgcgtgtagtttggctatttcagcagaaacctttccggcatcctgcaaaatgccataatcaaacatttcaataaagctgttgagtctcttttcccaatcctccatagtaagaggaatacgccttaaggtcatgttttcagcaaaatccaaatatgccgttaccatacggttcaactgatgcaattcgttttcactgagataattctttgcaatcgttacatcactctttttaatcttgccatcgggagcatctgcccatgtagtaagtcccatatgctccttttggtggtcggctcgctctacaatcaattcagcaaccgtgtgaccgtgaaccgcaaaatgcattttgttctggacggtcgcataaaaccttttcgttgttgcagcggttttgtcatagtctatggcagtggcataaatatctgtgattttctgatagaactttctttcgcttgcacggatttctcggatgcgttctaactgctcatcaaaatacttgtccgtaagataagtacctcgtttcagacgctcatcatccataacccagcctttgatggtgtagtcctttacgataccgtttgcccacttacggaactgcacggcacgttcattgtttaccttgaagccgacagcaataatcatctgcaggttataatggttcacttctcgctgaacctgcctggaaccctcggtttgaactatccgaaattttcggatagttgccgactcttctaactcgctatctgaatatacttttttaatgtggtcactaattgtacgcacatcaacatcataaagcgtagccatcattttctgtgtcagccatatattttcatcttcgtagcgcatttcaatgctatcttcctgtcctccgacagaagcaacgtaggtaagatactctgctgcacttgaacgaatgcttatttcatttttcttctttgccaacgcaaactacctccgattgtttagattgtgtcaacagtggtgacactttttatacagagtcacaaattcgaactgaacattacaccttttttatcggatgtctaattacggttttccatttttccgcagcaacctttcttgcatctgacatataaatctcatgatgtaatctttcattattaatatcggtaacatacccattctgctctaagtaagcatccataagcgcaacagttgccggctcatcatcgaatgggcctaaatgcataatttgaacgcaaagtccttcatcgatagtgagaaattctgcagagaaacaatcaagttttttcttcttcgttgccgtttctaccgcccaatcaaaatccgctttagtaacaaaatcaggcaatcgaataacagaaatccagttgaaagcagatttatttgcataatccacaccatcaacatcatcttgccaccaaaagccttcaagcggcggaacaacatactcaaagaaaccctcgattttgtaatctgtcttatagctcatttttaatgtatatgcgacagcatacagcacactaatggcttgctgatatgctccaccttcttcatttggatttcccttacctctgacagcaatatagtttgcctttggaacatttactatctctggcttgttcttcggcatataaaattctttatattctttcttaaaatcaaaagccat

SEQ ID NO: 198 - DNA, 5372 bp, unidentified
  source 1..5372: mol_type = unassigned DNA
atgaatatagcgattgtaggaaccgggtatgtaggacttgttaccggaacatgttttgccgaaactggcgtagacgtaacttgtgtagatgtaaatgcggataagattgctaatctgcaacagggtattattcctatttatgaaccgggattggaagatatggtcttgcgtaatgtaaaggctggacgtcttcatttcaccacctctttagagagttgtctggacaatgtggatattgtgttcagtgctgtgggcactcctcccgatgaagacggaagtgccgatttgcgttatgtgcttgaagttgccaagacgattggtgctaatatgaagaaatacaccttggtcgtgaccaagagtacggtgcccgtgggtacggcccggaaagtaaaagcggctatccgggaggaattggagaaaagaggggagtcgatagatttcgatgtggcttctaatccggaattcttgaaagaaggtaatgctatcgatgactttatgagtccggaccgtgtggtagtgggcgtagagtcggaaagggctaaaaaactgatgaccaagctttataaacctttcatgctggttaacttccgcgttatcttcatggatattccttctgccgagatgaccaagtatgcggcaaactccatgttggccacccgtatcagctttatgaacgatattgccaacttgtgcgaactggtgggagctgatgtaaatatggtacgtgacggaataggttccgacagtcgtatcgggcgtaagttcttgtatccgggatgcggttatggtggatcttgtttcccgaaagatgtgaaggcgttgattaagactgccgagcagaatggttattccatgcaggtgttgaaagcggtggaagatgtgaacgagaatcagaaaggcattttgttcgagaaactggtaaaagtattcaatggagatttgaaaggcaaaacagtggctttgtggggacttgcattcaagcccggtacggacgatatgcgtgaggctccggctttggtacttattgagaaattgaaacagtcgggttgcaatgtccgcgcatacgatcctgctgctatggatgagtcccgccgccggataggagagtcggtttattatgcgcacgatatgtatgatgcggctcttgatgcggatgcgttgattctggtaaccgagtggaaagagttccgtcttcctacctggggagtaatcaagaaggcgatgaagcagcctgtagtgcttgacggacgaaatatttatgatggtgacgaactacaggaaatggggtttgtttatcattgcatcggtcgataaataaaaaaatagagagaataaccatgtacaaacgtttttcgataataatgttggctgttgcgctgtcttcttgtggaactccgcaacaaaaagcatccgctctggaagaaaacaaggaggcaaaatctttgttggaaggtatatggttggacgataatacggaaacggcattactgagggtgaaaggcgataccctgttttatgcagatgccgctacggctcccgttgcttttaaaattataggcgattcgttgattacgtatggtgcacggactaatggttataagattgagaagcagggggagcatattttttggtttcattcggctgtgggagatgtgatacgcctgcataagtctgatacggagaatgattctctggcatttatccatactcgggaaatccctgtttataatgaagttattaagaaagattcggtggtgacatacgataatgtccgttatcgcggatatgtgtacattaacccgtcaaagattaaagtaatgcgtccgggagtttcggaggaaggacttggggtggataatgtatattatgacaatatcatacacatttgcgtgtatgaaggcaggaagagtctttatgccaaagatatcaccaagcagatgttcaagggggtggttccggatgatttcttgcaatgggctatattgtcggatatggattttatgggggtcgattcgaaagggtatcattatcaggccacggtgtgcatacctgacggcgcgtcttgttatatggtcaatatcactgccggcaaggatggaggacttgcattcgagttggtaaggtagtcgtggtggctatgtcattttttttatttcgcgattactatttggtcgctatcatgctctatagagaataccctgaaaaatccttcaaaagcttcagcctgctcgcaaatgccctgcccatcggtattccggctgaaggattgggcttgggaattcttcagccggagattggaatccttcagccggattggtattcttccgattcttggggaattggttttcctgaaggatatttttcggctgaaacatttcacaatgcatatccttcagccggaatgccgatgggcagggcgtttgcggaatggctgaaagatctgaaggaaaaataaggcgtttcggcatgtagatgccgttatgggaaaaaacaacaggtcaaattttaaaaagctcttgttctttcaatgaaaacgtcctgttcttttttttaaagaccttgttcttttcagaaaagaacaggacgtttgagaggttagtaacgtacatgccggaaggttagtaacgtgtcaccccatacgttactaatgtgtggggtgtaaggttagtaatgttacaggtgaaagattatatatcctacaagcaatacatataatggatgtttgtgattgcctcgcatctattttgcagatgagccatgaagtgaccctcttcataaaataaaattggaggaaaacaagtccgtcttcctccaatggtttttagatatcatctcttccgtctattcttttggggtgtttcttctattattggcattgggcttgcccgtaccgttctttttccccttataattgccttgttttctggagcctccacctttgtgattgctacgaccggcgccacttcgcgggttgtattcgggcgcttctcccaattcctcgggaaccgggattttatagatgttcctacccaggaaattttcaatagctttgaattgggtctgctctttctcactgacaaaagtaatggcgcaaccatcatggttggcacgagctgtacggccgatgcggtgtacataatcctcgctgtcatgtggtacatcgtagttgattaccaaacgaatatcgtcaatgtctattcctcgcgaaacaatatcggtagcaatcagaatattgattctgccacttttaaattcacgcataatctgttcccgttgggactgctccaagtctgagtgcatttcacctacgttcagtttcatccgcttgaatgcttgtgtcacctcctttactttcaatttggaagaggcaaagataatgacacgttcgggtgtttgatcctggaaaagggattgaataattcccaatttctggcgttcataacagatataagccgtttggataatcttttccgcaggttttgaaaccgctaattttatttctaccggattgtttaagatcgtttttgccaattgttgtattttagccggcatagtggccgagaacatgatggtctgacgttctttcggcagatatttcactatttgcataatgtcatccgagaatcccatatccagcatacggtccgcttcatcaagaataaagaaagaaactttagacaagtctacgtaacctaggctgagatgacttatcagacgtcccggagtagcaatgactacatcggcccccaaagttaaacctttcttttcttgctcgaagcgcacaccatcgtttcctccgtaaacagccacgctggatgccggtagaaaataagagaaaccttccatttgctggtctatctgttgcgctaattcgcgtgtgggtgacatgatcacacaattgatggcatcttccggatatccgcctttgcttaattgattaagaacgggcaaaaggtatgcggcagtcttgccggttccggtctgtgccactccgatcaaatcttttccttcaagaatgaccggtatggtatgttcttgtacaggagtgcattcttcaaatctcatggcatctaatgcctgaagcaccccttcttctaaatttagttctgaaaatttcatatatatagttacttctttctttagagtttgccgcgttcttccaggtaagagtccttgaagcccaggaaatagaggacgccgtccaatccgatcgtattaatggactgttgtgcgttagccactactttgggttttgcatggaatgctatacccagaccggcttcggacaacatgggcaagtcattcgctccgtctcctacagcaatagtttgtgctatgtccacacgttctacttgagcgatcagtttcagcagttcggctttacgttttccgtcaactacatctcccagatatcttccggttaatttgccatttactatttccagttcattggcatatacgtaatctatgccgaatttatctttcagataattgccgaaataggtgaatccaccggataggatggctattttgtaaccatatcttttcaacacgaacatcagacgttccacaccttcggtgatgggaaggttttctgcgatttctttcattacgctttcatccagtcctttcagcaaagccacccgttctgtgaagctttctatgaaatcaatttctccacgcatggcgcgttctgtgatttctcgtacttggtcacccacaccggcgcgttcggctaattcatctatacactctgtctgtatcaatgtggaatccatatcgaaacaaatcaagcgtcgcatacgccggtacatattgtccagctggaaagaaaagtccatttccaggtcactgctcagtttcattaacgcctgttgcatctcttccctttggcggggggtgccacggacggagaattcgatacaagcccgtacattcgcttttcgttcatccaatggaatacgccctgtaagacgtttgatagcatcaatattcaaaccttgttccgccaatattcctgtgactgccgcgatttgtttggctgtcagcttgcgtcccagtaaagtcaggatgtaccggttcttgccttgcatgtttacccattcctcatattcttccacagtaacgggatagaaacggatattgatgcctaatgcggaagctttaaatagcaactctttcatgatattccctgaatctttttcctggcttttgaataaaatgcctaatgacagggtgctatgaatatcggcctggccaatatccaaaatggtaacatcatattttgacaaaatttccgtaatggaagcggttaatcccggccggtcaagaccggtaattctgattaaaataagttcagtattattattcat

SEQ ID NO: 199 - DNA, 9794 bp, unidentified
  source 1..9794: mol_type = unassigned DNA
gtgatcgcgcaggtcaacacggaagaacgccgtgcccgctttgcaaacgcctgccggggcaaaccggtgctgggggcaacgctgccgctggacctcgcgctgttcggcaaaagccagccctggcggttctacgccgggcccacgctggcgctggaactgagcggcagtatggcatggcttgccgggcacgcaaaccccgaagaactggccagctttctggccttctgcgggtgcgagagcgtgattctggacgaagcggaatgcctgccgccaaacggctggcagaaagccgaaatgctgaccgtgttcggccttgcccccggcaggacgctgccgctgcccgcagcagacgaagctctctgggagcagctgacccttgaccgggagccgcctgccatggcggtggcccgggcgctctacccggcggatactgcccggcaggaggatttttactccgaactgtgctcgaagcgcgcccgcggcaaagcccttgcatggacgctgcagcgggggagcgagacggtctgcactgtgggtgcctatgccctcgccaacgggcaggcctacatggcctgcgggcagacggcccggcctttgcgcggcaaaggcatcggtgggcgcctcatcgtccggatggcaaatgagcttgctgcagaagggtaccgcccggtttttctctgcagcccggaacgagtgcacttttatacccggctgggatttgcaaagctgggggagtatgcaaaatataacaattaaggaaccactataatgtcaattctgaaccactttttcgattacaaacccgaagttctggcgctggacgaaaaggccatggaactgtgccagccctacttccgccatatggaggagatccgcgattttaaccagctcaaaatgctgaaagcctttgcggatacccagatgtcctccaccgatatgctgggcaccaccggctacggcctgtgggataccggccgcgcaaaactcgagcagatctttgccgaggtgatgggggccgaggatgccctcgtgcgcagccagttccagagcggcacccacacgctggccgtggccctgttcggtctgctgcgggcaggggataccctgctggctgccaccggccgcccctacgatacgctggaaggcgtcattggtctggacggcaagggcaagggcaccggcaccctgatggattacggcgtgaagtatgacgaagcacccctcaaggccgacttcaccccggactacgacctgatcgcccagaaagccccgggggccaaggtgtgccacatccagcgcagccgcggctacctgcagcgcaatgcctttgatctggacaccatcaaaaaaatcaccgacaccgcccgcgccgcaaacccggagattatcatcttcgtggacaactgctatggcgagttcacccagacgcaggaaccgtgtcagatgggtgcggatatcgcagtgggcagtctcatcaagaaccccggcggcggcattgcccccaccggcggctacatcgtgggccgcaaggaccttgtggagctgtgcgcctaccgcctgaatgctccgggtttgggcaaggagctgggctgcacgctggaaacgccccgtgatatgtatctgggcttctactacgccccgggcgtggtgtgcgaggccatcaagactgccatttacgcccagtgcatgctggaactgctgggcaagaacccggtgccccgttactgcgacgaccacaacgacatcgtgacctgctttgacgcgggcactgccgatgccctgatcggcttctgtcagggcattcaggcggccagcccggtggacagctatgccgccccggaaccttccccggagccgggctacaccgatgaagtggtcatggcaagcggcagctttacgcagggcagcaccatcgagctttcctgtgacggcccgctgcgtgagccctacacctgctacctgcagggtggcctgaacttcgccgccagccgtgcaggcgtgctgctggccatccagaaagcgtattttaaggattgagtcaagccgatcagctctccccggtgcgggagagctttttgcgtaaaacagtagaaaaggggaaagtatatgcctgttttaagtggccgtgtgggtacgtttacagattccgtcatccgccgcatgacccgcatcaataaccagtacgattccatcaacctttcgcagggcttcccggactttgacccgccccagcagctgctggatgcgctggcaaagaccgcctacaacggcccccaccagtacgccgtgaccttcggcgcgcagaacttccgcgaagtactggccaaaaagaccagccctgccctgcaccacgaggtggatcccaacaccgaggtctgcgtgacctgcggcggcaccgaagccatgatggcagccatgatgaccatctgcaaccccggcgacaaggtgatgatcttctcgccgttttacgagaactacggggccgacgccattctttccggggcagagcccatttatatcccgctggttccgccgacttatgagtttgatatttctcttatcgagaaaggctttgccgagggtgccaaggcactgattttgtgcaacccttccaacccctgcggcaaggtgttccgccgggacgagctggaagccattgcaaagctggcgatccaatacgacgcctttgtggtgaccgatgaagtgtatgagcacatcatctatgcgcccgctgagcacatctgcatggccagcctgcccggtatgttcgagcacaccatcacctgcaattcgttgtccaagacctactctatcaccggctggcgtctgggctacctcatcgggcccgccgaggtcatcgagggtgcccgcaaggtgcacgacttcctcaccgtgggcgcggcagcacccctgcaggaggctgctgtggccgggctgcagctgccggaaaactactataaggaactgcaggccctctacaccgcaaagcgcgaccacttcctggccgggctggaccgggtagggctgaagcacaatatcccgcagggcacctatttcgtgatgatcgacatctcggacttcctggccctgccgcagttcaagggctggaccgacctcgagttctgcgagtggatgatcaaagagatcggcgtagctgccgtgccgggttccagcttcttccgggagccggtgaaccatctcatccgcatgcactttgcccgcggcaccgacgtgctggacgaagccatccaccggctggaaaagctggcagacctgctgaaataaaagtgggctcgccctctccgtcattgcttacgcaatgccacctctcccagagggagaggcaagaacgtaacggttaggcttttggcttttcccatgggagagccgtcgagcaaaagcgagactgagagggcgaggacgcttacaataaaacattgtaacgacacaacagcgccgcaggagattcttgtctcctgcggcgctgtttctttcccttacttctctatacacaaaactcaggccgttacgcggcggggcatggctgcgggcattggctccacaagagcgggatgcatcccctcgcggtagtccaggtcgccctgatccataccgcgcagcaagacctcggcggtggcaatgttggtggcaatgggtacgctgtgcatatcgcacaggcggagcagattctgctcggtgatgctggcggcatccgctttcagcgggtcacggaagaacaacaccagatccacttcgtcgcaggcaacgcgggaagtgatctgctgcacgccgcccagtttgccggagagatagcagtgcacgggcaggccggtcgcctgtgccagcatccgtccggtggtgccggtggcaatgacggtatttctggacaaaatggcgctgtaagcagtgcagaactgcagcgcaagctctttgcgggaatcgtgtgcaagaatggcgatggtcataatgctctctcctttgttctcagtatagtgttgtgagcggcggacggttttatacgattgaatgaaaagcaggtgaaatcgttatcaaattttccgatatagttttaccgcaccgatatagggcttgtcaagaggttttttggcatttttaccgtgtaaaaccgtgaaagtaatactttaactttgtgataaatgcagaattgttggatacaatcctccatgcaacagagcaagattttataaaaaagtgaaaacatgatccaaaaattgtttttcggatgaatacaacttgcacgcgaaaaacaaaaaagcagaccgaagcgggctgcatcggtctgcaggagaaaaaacttttcaaaaaattgtatcaagaaaggaacaaatggacaaatgacgcacgcgccggtcagcggatctgtccgttgccgtggatgacgtacttgtagctgcacagttcttccagccccatggggccccgggcgtgcagcttctgggtggagatgcccatttcgcagcccaggccgaactcgccgccatcggtgaaacgggtggagcagttgacgtagacggcggcgctgtccactgcggcagtgaacaggtcggcatgggcctgtgtctgggtcaggatggcctcgctgtggccggtggagtgctcagcaatatgcccgatggcatcttctacactgtccaccaccttgatggccaggatgtaatccagaaactcggtgtcgaagtccttcggcccggccggggtgcccgggatgagggccgcagcgcgcgcatccagccgcagttccaccgggtgcaggccccgggccgcgcggtccgggccgagacgctgcgcgagacgcggcaaaaactctgcggcgatggcagaatgcaccagacacacttcctcggcgttgcacacactggggcggctggccttggcgttctcgatgatgtccagcgccttgttcagatcggcagtgtcgtccacgtacacatggcagatgccggtgccggtctggatgcaggggactttggcgttctccacgcaggcgcggatgagcccggcaccgccgcgggggatcagcaggtccacatagcccacagcggtcatcaaggcgttggccgaagcgtgggtggtgtcctcgatcaggcacaccgccgtttcgggcagaccggccttgcgcaggccctgccgcagagcggtgacgatggcgtgggcactgcgccaggcttccttgccgcagcgtaggatgcaggcgttgccgctcttgatggcaagggcagcggcgtcgctggtcacgttggggcggctctcgtagatgatggcgatcacgcccatgggcacggcggtcttttcgatgaccaggccgttgggccgctccacccggcgcagcaccttgcccaccgggtcgggcagggcagccacttcccggatgccctgggccatggcctcgatgcgctgtttggtcagggccagccgatccagcatcacatcgctgatgtgtcctttggcggcagccatatcctcggcgttggcggcgaggatggcggcctgattctgtgcctcgcacaaagcgtctgccatgcccagcagggcggtgttgcgtgcggcgttggaagcaagtgccagcgcacctttggcgctgcgggcggcttccaaaatttgctgtgttgtcataggtcagacctccttatggcctgcaaaacgggtgcctgcgggcttgcctgcagcgatgtcgtacaaaagctccgggtgtgcgccgttggcgatgaccatgtctgcgccgctgccggtcaccatgcgggcggcacgcagtttggtggccatgccgccggtgccgagggccgaaccggccccatcggccagcgccatcacctcaggggtgatctcctccaccagtgggatgagctttgcatccgggtgggtgtgaggattggccgtgtacaggccgtcgatgtcgctcagcagcaccaaaaggtctgccttggcgcagcaggccacgatggcggccagcgtgtcgttgtcgccgatggaggtgatctcgtcggtggcaacggtgtcgttctcattgatgatgggcagggcacccagctccagcaggcgggaaagggtgttctggaagttcacgcgccgctcggtgtgctccacgtccacgccggtgagcaagatctgcgccacggtgtggttgtaggcgttgaacagccggtcgtaggtgtacatcagctcacactgacccacagcggcacaggcctgcttggtggtggtgtccttggggcgggcaggcagcgacagcttgcccacgcccatgccgatggcaccggaggataccagaatgacctcgtggccctcgtttttcaggtcgctgagcactttgaccagctgttcggtgtggcggatgttcagccgcccggtggcgtatgccagggtagaagtgcctactttcacaacgatgcgcatgtttccgttaaccctttcccatttccttcgttttattgtacgacgcgatcactgcgtccatcacggcaccccgcaggccgtgctcctccagcacgcggacgccctgaatggtgctgccgccggggctgcacacggcgtccttgagctcgccggggtgtttgccgctttccagcaccagctttgcgctgcccagcaccatctgggcggcatattcctgtgctttggcacggggcaggccgcaggccacgccgccgtcggccagtgcctcaatgaactgatacacccatgccgggccgcagccggaaacgcagctggccgcgtcgatgaggctttccggcacagcgtccagacggcctgccggggccatgatcttcaaaaattcctgttcttcctcggcggtgacattggcagagcaatactggatcatgccttcgcccaccgaagccggagtgttgggcatgatgcggatgactgggaaatcttcaccggccatctcctggatgcgggcgatggaaaggcctgccgccatgctgcacagcacgaagcgccccgggcgctcgtccagcgtgaacttgagcggctggagcagcgcttccatcatctggggctttacggccagaaagattagatcacaccccccggccacttcggcgttggtggctgttttgcagcccagctccttggcaagggcctgcgccttggccgcggtgcggtttgccagaaagaccttcttcgggtcaacggccttgcacacggcgcgggcgatggcaccgcccatgttgccgcagcccagaaaaccaatggtatccatcataaatcataccctcccttatggcaggcatttcacgtctgcttgctcccattctaagcgcatggaggggtaaaatcaagggcctttgctgcatttttgctcaggctcgtggaattgacgattccggggccggaaggaaaggctttatttggctgaagtgccctttgcggcggcggaaaacagcatggcagccataccgatgccgtatggcacacttcacggaggaacccgacgttttgcgatgcagggtggaaaatcttacaaagaattcaaaaaacagcccaaaaggacacttgaaatactgtgcacttttgcggtaaaataagatatggacaatcttctcacgggattcaaccgcacacggcagggagacactctgccgggaaaggatggtttttgtgtcacagacaaccaaacgggcactggaggcatcgctgaaaaagctgctgctggaaaagcccctgaacaagatcacgatcaatgatatcaccgaggactgcggcgtgaaccgcatgaccttctactaccatttcaaggatatctacgacctggtggactggattctcgtggaggatgccgcgaaggcgctggaaggccgccagagctttgagacctggacggaagcttttctggacattttgcaccagatccaggagaacaaggtgctggtgctgaacgtataccgctcagtggggcgggagcaggtggaacagtacttttataaaatgttggacccgatgctgaaggactttgccgaccgcgagtgccgcgatatcaccgtgcaggacgatgacaagcagttcgtggtggatttctacaaatacgcgctggtgggcgtggtgctggaatgggtgcgccgggacatgaagaccgacccggcggtgatcgtggaacgtatggggcggatgctgcagggcgatatgcgccgggcgctgtgccgtctggccagcaacaaaatacacatggtgcaggagaactgaacgaaggcctgcgcggcaaaattttatcataatctgcgccgtgatgggttttccatcacggcgctttttctgtttatggcaggtttgccttaaaaatggtatgatgtcagcaataaaaaaggatttccgaacatatcgcttggaggaaaaggataatgaatacttcgattgagaatctgacacataaaatgcagcgcgccgccgtcggcaagatggtggacgtggtgctttctcatgccgataaagatcgtcagaagaccatgggccagctggtggacgtggcaaagcagttctacggcggggccttcagcgatgagacctacgagcacgcaaagcagaccctgaccgacccggacagcaagtggtccaaactgatcaactgcgtgctggaccagaccgaccccaatgtggcccgcaccatggcgctgaacctgggctacgaggccttcttccgcggcaccaagatgatccgcgagaaccgcgtcaagtaccagtgcaacatcccctggctgatcctgttcgaccccaccagcgcctgcaacatgcactgcgtgggctgctgggccggtgagtacggccataagaacaacctcagctttgatgatatggacaagatcatcacccagggcaaggagctgggcgtgtatctgtacatgctgaccggcggcgagccgctggtgcgcaaggccgatatcctcaagctggccgagaagcacaacgatgtgcagtttgccatctacaccaactccaccctcatcgacgagcccttctgcaaagaggtggtgcgtctgggcaacatcgcctttatgctgtccatcgagggcaccccggagaccaacgacgcccgccgcggcgacggccactatgccgctgtcatgcacgccatggacctgctcaaggagcacggcatcgtgttcggcacctccatctgctacacccgcgacaacatcgaggccgtcaccaacgacgagttcatgcgtttcctgtgcgagaagggggctcactttggcttctacttccactacatgccggtgggcaacgatgcggcgccggagctgatgcccaccccggagcagcgccagtacatgatcaagcgcatccgctacctgcgttcctctgagtgtgatatcccgttctaccccatggacttccagaacgacggcgagttcgtgggcggctgcattgccggcggccgcaactacttccacatcaactcggccggtgacgcagagccctgcgtgttcatccactactccaatgccaacatccacgaccagagcattctggagatcctgcacagcccgctgttcatggcttaccacaacggccagcccttcaacaagaaccacctgcgtccctgcccgatgctggagaaccccgagctgctgcagaagatggtgcacgagaccggtgcccacagcaccgacctgcagtcccccgagacggtggagcacctgtgcgagaagtgcaagagctacgccgccaactggcagcccaccgccgacgagatctggtcccacaccaagatccgtgagagccgctacgagaactataaggactggaagccctcgcagcccattgaaaagtaa

SEQ ID NO: 200 - DNA, 12484 bp, unidentified
  source 1..12484: mol_type = unassigned DNA
ttatttgttgtcccgtaagtcttttaccctgacggcttttccttcgctctgcggcaaggaacctttctttaccaaccgtaacttcggagttaccagaatctcgtctttcagctggcgggtaatggctttgctaatcttttgtagctcgatgtaattgtcagtagagaggtcgctaagttcaacttccacaatcatctcatcctggttattgaccgtttcgagcgtgatgaggtaattgctgcccaattcggggaattgtaccagcaccttttccacctgcatggggaagatattgactcccttgatgatgaacatatcgtcgctacggcctttgatgcggtctatacggatgtgggtacgtccgcaagggcacttgccgggcaggatgcgggtaaggtcgcgtgtacggtagcggatgaggggcatcatctctctgtccagcgttgtcagtaccagttcgccgatttcaccttccggtacgggttcgccggtttccgggttaatgatttcgaccaggtagcaatcttcccagaagtgcatgccgtcttgttcggtgcactcgaaggctacgccgggaccgttcatttcagtcataccaaagctgttataggctttgacgccaagcatgcgttcaatctttctgcgttgctcgtctgtgtggggttcggcaccgataacaagcgttttcagacttgtgccggcggggtccatcccttcttcctggaatacctctgccaagcggatggcatagctgggaatggcatgcagggcagtggtcttgaagtcggtgatgaactttatctgacgcttgctgtttccggcagcggcaggaacagtcagcgcacccagacgttcggctccatactgaaagcccagtcctccggtgaacatgccgtaaccggagctgttttggaaaacatccgtcttacggatacctaccatatagaggcagcgtgccactaagttagcccaagagtccaaatcgtgttgggagtgtacgatgaccgtcggcgtgcccgtagtgccactggaagaatggatacgtactccgtcctcacgcatatcgcctgctactaatccaaaaggataattggcgcgcatatcggccttggtagtaaacggtatcttacgtatgtcttctatagaccggatgctgtcggcagtgatgccatgctcttggaatacctttttataataaggagagttggcggcaatgctgacagtcttttttaaccgttgcagttgcagttcgcgcaactgctcacggggcatcgtttcaatctcttcttcccagtatttgttattcatggtatgttgaaatttagagtcaattatagtttacatcagtttttcagcaatctctttgccggcagccaacgctttgaggttcagctctacaatggcgtcgcccttgcgttggaagatttcgcggatgctgtcttgcacctttgcgtagtcgatgccgaggaaggggatggtggcgcccagcagtacgatgttcgctacgcggggagagccgacttcttttgccacttcgtttacgttcagcatgattttatgcggcagcttgttgatttcggccttgatgtcttcttctgccggatagttgggaatgttgatgaagggggcttcattggtcaccagccaaccttcggggctgaggtaggggaggtagcgcagtgcttccatcggttccagggagatgatgaggtcgcattttcctgtgggaatgaggtccgaagcgatgggttggtcgctgatgcgcaggttggactgcacgtcgccgcctcgctggctcatgccgtgtacttctgcctgcttcatgtagagtccgtccttgagggctgctttgccgattacggtggcgatggagaggataccttgtcctcctacgccggaaagtatgatgtcttttttcatggctttacttgtttctttttttgcgtgctaatgtttggatacattctctgcgggggatgatgacggatacgccgtggtgctcgatttcttcccggatgatttgcttcatctcttcgtagtttttcttcaagggcactacgacgcggatgtgttcgggagctacaccgatgccggcgcagatggcttccagacgtccggtgccggcagaatcttgtcctccggtcatggcggtggtttcgttgtcggagatgacgatggtgacgtcggcgttttcgttgacgcaatccagcagtcccgtcatgcccgagtgggtgaaggtggagtcgccgatgacggctacggcaggatgcaggccggcatccgaagcacccttcgccatggtgatggaggcgcccatatccacgcaagagttaatggcgttgaatggggcattggctcccagcgtgtagcaaccaatgtcgctgaacaccttataagtgggatattcttctttcaatacttgggtcagcaccgtgtacatgtcgcgatggccgcaaccctcgcacaaagcgggcgggcgcatctctaccagagaaggaacgctgaattcagccttgttctccttgcctacggcacgtgccacgctgtccgggttcagctctccgtctcgtgaaagagtgccgtccaaacggccttttactttgatgccgatgcccagatagcctttcagctgtttttctacgaacggttgtccgtcttccagtaccagaatctcgtcacatgcttctaccagctgcatcagctgtttcttgggcaacgggtattgtccgattttcagtaccggatattcgcaaccttcgggatagttctccatcaggtagttgtagccgatgccacatgccacgatacccagctttttgttggggccgtcggtatatttgttgtaagcggagttttcagaagctttgataaattcgtcctggcgttgcagcaatgctttgtaacgtttgcgtgcattacccggcaggaggatgaactgacgcgggtcttcgctgaaggaaatctcattctgcggttgttgctccttgcgctctacgccggaacgggagtgtgccaggcgcgtaaccatgcgcatcaggatgggttcgccggtctgttcggagaagctgaatccgttgtacgccatgtcgtatgcttcttgctggttgcttggttcgtacatcgggatgagggagaagtcgccatagaaacggctgtcctgctcattctgtgaagagtgcatactggggtcgtcggcagcaatgactatcagaccgccttttactccggtaatggcggaattgatgaaacagtcggcagctacgttcatacccacgtgcttcatgcacaccagtgaacgcttgcctgcaaaggacatgcccagggcagcctccatcgcagttttctcgttagagcaccagcggttatggatgttcttttcggcagtaatcggtgccatctgaatatattcggtgatttccgtagaaggagtgccgggataggcatatacacccgaaagtccggcatctaatgcagcttgtgcaatggcttcatcgccaagtaagagttgcttgctcatatctgaatatttaagtgttagtcatggattaatatttgacgcaaatataggattttgcttttattttatcagcaaattacttaaaaatctttctttcgtttaatgcattccaatattttcttgcatttttcatgtgctcggcataattggatgcaaagttatgggtgcccgagaagtcctctttggcacacatatagaggtagttgtgtttcgtataattcagcacagcatccagcccgatgggtgaggggatgcgtatgggaccgggaggtagtccggtgttgagataggtattgtagggggattctactgccagatgggcattcgtaattctccgcaagccgaagtcctgcaaggcaaatttgatggtagggtcggcttgcaggggcatgccggtgtgcaggcggttgatgtagagccctgccaccattggtttttcgggattgttgtttgtctcttcctcaacgatggaggcgagggtgcagacttccgtcagggtcattccgatggcggtggctttgtctaagcgttcctggttccagaacttctggtgctctttttgcattctttcgaagaactcttctgcactcatgtcccaatagacttggtaggtttcggggatgaagaggcagggcagggtctctttgttgtatcccagtttttgttggaatgcggagtcgttcatcaatccggctatttcggtggagtctatcatgagctgtttgcctacgctgcgtgccagccggtccagtgtgcgtacgctgccgacggtgagattcgtaggttcttgatatccgcggtacagacggctgaatacgtgatatacgttttcccccggccggatggtgtagcgtccggtgtgtatattttcggaatatttcttgtattgggccatccagcggaagccggtgaagcttcgaggatggccttgttgttccaccttattatatatggagtcggcggtgtcgtcgcggtctatatagatatagactgtctttttcggatggaattgcggggcaaacagatagtagtatactgttcctgcacaagctgctccaataagaatcagtgcgacgaatgttccgataatgattttcttcttttccattttgttttactgcatctttagtcgggcaaagttagtaaaaaatggagtgaaaaccatcaagtcatatcagttaattcgatagctgacaaaggctatgcgtttgctgtccggtgcccatgagttgacattgatggtgccttgtccgccgaaaagctttaacaatgtcttgggttctccaccgtttgcgggcattaggcgcagctctacgttcttgtttgccaggtgctctcccggttccaggtcacctttgtagtaggtgatgaatacaacggattttccgtcaggggagatgtgggggaaccaggagttacgggtttcgtcaaaggtcatctgggtctgttcggagccgtctgccttcatgcgccagacttgcatgagtccggtgcgtacggaattgaaccagatgtattgtccgcagggggaatattccggtccgtcatccagaccttcggcagtggtcaggcgggtttcttcacctccttccgccgggatggtatagacgtcatagttgccgtttcgttcggcgcaataggcaagctctttgccgtcggggctccaaccgtggaggtagctgggagccataggtgttattaaacggggagtgccgcccgtgatgggaagtgtataaatgcgcgatttatagtcttctttcgtcccgtggctgatggctatctgctgtccgtcggtcgagaggacgtggtcgttgttgcagttttgggcaaatccggtgtttatcagttccggttcggcaggcgaggtgggggaaaggcggtaaagctttccttcgctgttgtatagcagccattgcccgtcgggcgtccaattgggagcttcaatccggtagggaaattcttttacgacggtccggttaccgttggttacatccagtatttcgaggacgctggtaatctcgtttttttgttgagcggttgcggtcagtgcaacagttgcaaagaaggggattagatagggtttcatgttcatatcgtatttaataaatctccgcaagatacattttttattggaaactacatagtcggagcatgcttttttcgaagagaatctgtagtgatggtcgaatgcgtagtgcttatcatatgaatagtctccgggattcttgaaatagttgtccacatactgccagttgtcggtgtcgagcggcgtgtgcgaagtcatgtacgatagggagcttttgtctctactatcttgctgtccagactaatcaggtctttgcctaagcggacaatgcgggcatgtagtcggtgccgacttccccctttccgcctccaccgaatgacaaccatcctgtaccttcgtcatctatcacggcacccgggtcgaaaggagccctgcagtggcctaatccttgggtgaactggctcaccagcatacgtcttaccgtccgattccacccgcgatacgatggatggcgcccatgaggctataccccatggcgagagggcctttacgtcaatcagtccgtgataagtccaatttaccatgtcatcggtggacagcatgaccagtgaatgggatgtattggtatgtgtttttgccgtcttttcccacactgtccagttgctgggtgtcattggttccatacacatagagccttccgttgtattccaccgatgtcgggtcggccacaaaaatgaaatccaacagcgggttggcgtttccactgaagaattggggtgattctaccggacgcgtgtctttctttcttgaatcggaaagcgcccacacatcgtttcctgcggatatagccgccagcagcaaagccgctgtaaataatttgattcttttcatttgtttatagtatgttatagaaacctatggtagccttttgattttggcttgtgttcttcaatcacctcaatcctttatttaagattgaaaaatcgggttattgaaaagttgccgcaaatattgggaattactatgtataatataaggtgtattatgtttttaataatgtgcctatatgtttcaagttatcattgtaatcagatggtgctgttttaaacttgctttacttgctttgggataattatgcggctatggattaaactgtttggaagggcattatgttttatgcaaatatattggtagaagagcgtttttttattctaacgattcttgaaaagaaaaagcactgattattccagataatcagtgcttgaatatcgagccgctagccagacttgaactggcgacctacgcgttacgaatgcgttgctctaccaactgagctatagcggcaataagcttttgtttacggggtgcaaaggtacatctttatttgaaaaggcaaaaagaatctctgttttttttagaaatattttagtgggataattttctatttgaatgtcctgaactttattgccataaaaattggataataaaacgaaaagaagcatctttgtcgtaggtcctatagcaagtaagtctgatactgattatgaatttaagaatctattataaatatctttcttcacgcatagcgtccaaatggacggtgctgttggtagatgtaattatcgttgtgatttccatgctttctgcatgttttttgcaatataggctttcgtccgtatcttatgaaatttctttatatgtatggctgaccatttgggctgtcttgtgtaatatctgtttctttcatattctccgtacttatgtgggtgttatccgtttttcctcttttgtagatatttatcgtgtgttttggagtcttacgataagctatgctgtactgtttttagggaattactgttggtctgtttcggggcttggagaaactttgccgaacagcattctgtttatagcatatatgttcaccttctctctgatggcttgtatgcgcattgctgtgaagatgctttatgaagctattgcttttgatgcacgtcattgcgtgaatgtttttatttatggattccatgggactggagtcaatgttgcaaaatccttgagagttagtcgtaataatcattatcgcctgcgtggctttatttcggacgaacctgatatgataggtaaacatacgatgggatgcagggtatatcccaatgatgagcagctgtttgaccgtctaaagaaaaagaaagtggatacaatcattatctctccaagcaaggtgtcggatttggaaaattccggaatgctggataaactgttctctcatgatattcatgtaatgaccgttcctcccttaagcgattgtatggacgatggactgataaaggacattcaaatagaagattggctccgtagagaaccggtacaagttgacgtgcgtaaaattacggcccatatcgaggggcgtagagtaatggttacgggagcggcgggagctgtaggaagggaaatcgtccgccagttggctacactgaatccttatcagttgattctggtagatcaggcagaatccccattgtatgatgtacagttggaattgtctgatcattggaagaatctggaggtccgtgtattggttgcagatgttgctaaccgtacgcgtttggaggctatatttgaagaaacacgtcctcaacttgtttttcattctgctgcttataagcatgtacaactgatggatgattttgtgtcggaggcaattcaaacgaatatatcggggacagtgaatattgcagacctggcggtaaagtatagagtgtcccgtatggttatgatatctgctgctaatgcacgtcatccggaaaatgctatggaatatagtaagcgtgtggcggaaatatatgtgcaatcatctgattgcaggttgaaacgcgacacaggggaaactgatatgttcatagtacgtttgggtgaggtgtatccgacgaatactcattgtttgattaccttgtctgaagcttgtatgctcaccctggaagtgggagtcatgggggatgggggagaagtgtacattgtgggagggcctggggatggacttttggattctgtaatcagtgaaaagataaagcgtgaaaaggcatctgttgatgattatgaacatgtgcgggaagaagtgctggccttggtgcaacatagttatactgaaaaaaaggctattttgattggactaatgaaaaaaatagtgccaattttcccgctttcttctacccaatgaaaagacgtgaaagtgacagctttttaatgctttttctgaaacttagaggtggaataaatgtatattataaaaataatatattacctttgtgcccgatttatatttattacaagaactcaaaagattaatcagaatatcttatgcgtagattaataacactattctttttggtatttactttgtcaggggtagcttttgctcagcagatgtcagatgatcaggttgttcagtatgtaaaaagcgctcagcagatgggcaaaaatcaaaagcagattactactgaattaatgcggcggggagtgacaaaggaacaagttgaaagaattcagaaaaagtatgaaaactctaaatctggaagtccgcagagcaatacccaagatgagaagcgttctcgtcaacgtggtgaaatgagtggcgtagtcaaagggctgcgtacaacttcggaaacttattctgccagacaaacggatgttgcaggggattctttacaaatgatggataatcgttccttgtctcaagagaaggaaacagaggatccgacttcgcaaatttatggtcataatatttttactaacgataatttgactttcgaacccaatgtgaatgttgctactcccgagaattatcgtctggggcctggtgacgaggtgattattgatgtgtggggagcttctgaaacaacgattcgacaaacaatctctccggaaggaagtattcttgtgaataatttaggaccggtttatctgagtggcaaaactgtaaaggaagccaataattatttgaaacaagaatttgccagaatatattccggagtaaccggaaatgttccgtctacccaagttaaactgacattaggagaaatacgttctattcaagtaaacgttatgggtgaagttgtggtgcccggaacttataccctctcatcatttgcttccgtatttcatgctttatatcgtgcaggtggtgtgaacccgattggtagtttgcgcagtattaaagtgattcgcaatggaaatacaatagcggatttggatgtttacgatttacttatgaaaggaaaaatgaaggatgacatccgtctgcaggatggtgatgtaattcttgtggatccttaccagtcactggtacagatattaggtaaggtaaaacgtccgatgttttatgaaatgaaacccactgaaaccgtaggtacattattgaagtattcaggtggttttacgggtgatgcttataagaaagcattacgtataatccgtaaaagtggacgtgagcatcaaatttataatgtggatgagatggattattccgtattccgcgtagatgacggtgataagataacggttgattccgttttacagcgttttgagaatcgtgtggaaatccgcggtgctgtatatcgtgaaggtttgtatcagttggacggtacgatgaatacagtgaagcagctgattaagaaagcggaaggacttcgcggagatgcattcttaaaccgtgctataatcgatcgtgaacttgaagacttgtcgcatgaggttatacaagtagatgtgaaaggtttgctgaacgggacggctgcagatattcctttgcagaagaatgacattttatatattccaagtattcatgacttgaaggaagaagctacacttaccattcatggtgaagttgccaatccgggtacatatctctattctgataaaatgacagtagaggatttggtgttgcaggctggtggcttgttggaggcagcggctacgacgaaagttgaagtggcacggcgtatgaaagatacgaagagtacatctttcagtactacagtaggccagaatttctcttttgatttgaaagatggcttattggtgggagaaggaagccaggatttccatcttgaaccttttgatgaagtttatattcgtaagagtccgtcttattttaaacaacagaatgttatggtgggaggagaagttctttttagcggtaattatgcactatcgaaaaaaaatgaacgtttgagtgacttgatagctaaggctggtggagtgactcccgatgcttatgtaaaaggagcgcgtcttattcgtaggatgaccgaagaagaatttcgccgtaaagaagatgccctgcgtatggcgcaagcgggaggtggagattccatatctgtaaaaaaattggatttgtctgatacctattctgtaggtataaatctgggagaggctttgaagaatcccggttcagatgctgatatggtgcttcgtgagggagatgtgttatttgttccggagtacgtaagtacagtgaaaatcaacggtgctgtaatgtatccgaatacagttttatataaaaagggtgaaagcttgaaatattacatcaatcaagctggtggttttggtaatgatgccaagaaacgtaaggtctatgtaatatacatgaatggtacagtttctcgtttaaaagcagggaacaagaaagccattgaacctggttgtgaaataattgttccaagtaaagaacagaaaaagaagatgactactgctgaaattctgggaatgggaagtacgacagcttctattgcagcgatgattgcgactatggttaatctctttaagtaatttgaattatgagcgaagaaagaatacaaaacataacctctccacaacctgaggaacaagaaatagatttgatagaactggcccagaaagtatgggctagtcgcaaattggtttttaaggcgtgtggtatcgctgctcttgtaggactggttgttgcatttagtattcctaaggagtactctacaagtgtgacattggctccggagagtggtggcaaatctggtggtggaagtatgggagcccttgcagccatggcgggtatcaatttgggcacttcttctggtgaggatgctttgtcacccgaactttatcctgatattgtaagttctactccttttctgattgaactgttcgatgttaaagtcaaggatcagaaagcaaaagtagacacgactttatatgcttatttgaaagaagaacagcgttctccttggtggagtgcaattttctccgctccttttaaggtgttaggatggacattgtctttgtttaaggatgaaccggaagagggggacgcaaagctggatccttttcgtcttactagagatgagtctgccattgcagatgctttaagtaaacgtatctctgtttccgtagacaaaaagacaggtgtgacaaccttgtctgttactatgcaggatcctttgatatctgcttcgctgacggataccgtgatgcattgcctgcagaactacatcacagattatcggactaataaggctcgtcatgatttggcatttaccgaaaaactttatggagaagcaaaggccagttatgaggatgcccagaagaaatacgcaaattttgtagatgcaaaccagaatataatattactgagttatcgcgcagagcaagagcgtttacagaatgaaatgaatttagcctatcaagtatatacacaagtgtctcaacaattgcagatggcaagagctaaggtgcaggagattacaccggtatatacggttgtccagccggctacggtacctttgaagcctgcaaagcccaataaattgatgattttgatcggcttcatgttcttggcaggtgtcggcagtgtgggatggatattatttgtaaaagatttattaaagggatggaaaaagcaaacaatatga

SEQ ID NO: 201 - DNA, 12363 bp, unidentified
  source 1..12363: mol_type = unassigned DNA
aatcatagcaatgtcccgattgacgtcaaccatcttcagcacataaaacaaatagattactgtaatcgaaacagatataatcagatgcgccacataaatattccaaaacgtctggcttaccttttcccgatcatcccgaaccatagcaacactacgattgccatgcgtcgaaattccgagcattgcaaaaatcacaaagtagttggcgattgaataccgataggaatatacgcccaggccatcactacctaaaactctcgaaatatacggagaggtaacaagaggaaacaatactatcaacacctgataaatcagattatatataaagttcttctttattgagttcatctttttcatctgtcctcttccatcacttttagtattctctctgccactgtatcccacgaatattctttaatatatgcttctcgatttttcttcacaaactctttcatcgtatgattgcaaatggtttcatacatgatctttgctaattcctgtggctcatcacattctaaaaggtaaccattcttcccttcctgcacaaaataactcatctcaaaagcattccgcgcaataacaggaagcccatatatcaaagcctccacaaacacaagcccgtatgcctcataacgggacggcatacaaaagacatcgcagagattaaaataagttgataattttttgtaagtcaaatcaccaatatagtgaatatggtcattcagatcacactctgccggcttatcttttgggcctgcaacatatagctcagcttccgggaaatcattcttttgcagcagatcgaacgctttgcaaactgaatcgccgccttttcgcttaaaatcacggcccacaaagagaaatttgtttccttccttttgcgaatcgtcaaccttagatgcatcaatattcgtgccgccacctactgcatgaaccttttctctgggcaatttcccggtctgaatcaaatattcagcaagccatttgcccatcgtaaaaactcccgatgcgctttggtacacttccatctgttcgtttgcgcgtctctgcaagtccttcaatgcaatatcctgatatgtactatactccaaagccggatcgccttttattttcatctcaacaagagcttccacagccaaatcttgatatgtatagtacggaacatctgcttttccaaaacatccgacctgcaggataacggcatccttatcaacgcttttttctttctggctaaaattctttcgcaaaaaagatgacataaaaggattacagaatcccggcttatgaaagtctatttttccatttcgtatttcggcattgctcactttaattattaacttttccagatcacttagcgtcatatccatttcttcaacttttacaagttttttcaacgcagtaagcaatgaaagtgatgttcccgaccatgagtttgcacggttctttgcccatctacaagcgtatactattttatctactttctcttccacttacctaacctctcactttattcctcaaaataattctcgtaagaataatttaccacttcgtaaccagatgtttgcaaccgctttttcaaaagttcccgcgtatctcctatcactttagccggatttccaccaacaatcgcataaggtggaacatcttttgtcacaactgctcctgctgctaccagtgcgtcatgcccgattacaagatcgtataaaattatggcatttgcgccaatcatcacattatcttccactgtgatatatccaccataagataaaatttctggccctttatattttggatttccattccacatacggtggataatatcatgttcaaaaaaactcacattagtggcaatattcacattgttaccaatagatattctccatggacggttcggcatattcaaagtatgccagtaccccccccccaccatattttttgaataatccagaattgcgtaaaacttgtgcttttttctcatgcattcccagcattccaagtacacgaagctgaaccataacaacttttcgtttcaaaccgcgcttatccattctattcgtttcctttctctattgattatcgtttcagtactcgtttgagtactctcggaatcgttccaagtttatatcgtaccacatgtggcgtcccatactttttcattgcaaccacatagccatcacgtttatatacttcacggaatccacgacttgtttcattccactcaaatgctttttggaaactaataccccctgcaaacgcttcttctgccggatgcatttctatcacaatactgtcatccaagaactgcatgagatcatttccctttgtattattgggaatcatcaaggtacacaagttcttcttcaacagcgatgtttcatgctcaagcccaagaaaatcacccaaggtcaaatcgcctactcgctctttccgagggtagttgcaggtatggcaacttgctctcaaagagaaaccactataaaatcctgtcaggtattcattttttccgcgtggagccgcatactctttcgttccattcttccacaaacaaagccaatagtcttccgttgaacttactccgcgaaatgttatgttcgtcaaattattcttgtctttgtttttccactccagttcttcccacaaataagactgcgggtttactccatgacagacaagatcacaggtgtaaagattttcaacattctttccgcagagagcgcgcattcctgcgacttgacaaggtgtgccgataaacagggtttttccttgtttgacagcttctttgattttcttgaaactgtccccaacattgctctgaacataccgggagccttgaaacatttccaattcatccagagacttcagttcctttacttcaattttcattttctgatccagagccgttccaaagaccttccagcctgcctgaaaagctttctccatcagaaaagtagcgattcctcccgatgccactcttggctgtttttgcagatccttccgggccgcagcataacacacttcagcttttggatttaacagtgatttatatttctcatctacattggggcatactctatggcagctcccacaatcaatgcattctttctctacaataaagggctgaacttcaccatattcattttctttcatttgaatacagtttttaggacatacattataacaagccgcacagcctgtacatttttcacggggacaaatttcctgcattcgttatctcctcttaaccaactcaggaaattcctttcctgagtatttcctgacactcttttcgttttttatcaacaacatcattgaccttttcatagtcaatagctttcgataatagtttcataccattatcttcgtaatacctatttccaatacctgtccaatcaaacagctcatccagacgactgttctggctcttggcatcggtattcttaaatcttctaaatgcaataaattgcttattcaaattgattgaaaatgcacacgcatggaacgagtctgtacaaaccaattctgcgccctcaatcaatgctacaaattcatacgttcctgcggtttcacatcgcaggaaatcattgccgcagtccgtattttccaacggaaggacaacaacagacaaccctgtcgcctgtgaaatactctttacttcctcccaatgcgaaatattgtttccaacgaaatatgtcagaatatacttctgcggcaaatccctttccaagtgagctttccgagcaaacagattccatgaagtaccgtccagcaaaagtgtcggatcaagcaccacattaaccggcttattcactaacttctcaatgacatccgcagcctttgcttctctcacacttatggaatcgaaccgttttaagtattttttatatttgccttttagagtttctggaagctgctctacaccaatactggatgcgtaagaaattttacggatattttctgggacaaaatccagcagataaacctcatcaaagtgatctggattccagacttgatcgcttccaactacaaagcagtcaattttctcaaaggttttcctctgttcctcttttgtttttacactaacaaaagacagattttcgtcgatgcatctttggatattattttctttttcgctgttggtcttactctttgcgcctttttctgttcggaactttcttttaagttttctaagaatccgctcccagtcctttagcgtatatcttctgccataagccagcatataggcattatatcccattccttcaagagccttgaccaatgccaccgcctgcagacaggttccgaaattattcgacttataccatgttacgacacatactgttttcattttgtttttctcgccttctctccgctatgtaaattccctgaagaatcaaaaagacaaaatacaatccgggtctggtaatgtaatagcagagtgttgaactcgctgcaaatccaaaaatattgattcccataggaacaataagttcatattcatatcgcttacaaaggacaacttcctttatctgatacaacagcacagcaatggatatgatttcatatatagccagtcctacgatcccccaataataccggattgcaaaaattccaaggtcgcttgtgtaatatcccgacatatagaaattgtctcgtgcgaatccagattgctgtttgccattgtatattgctgcttggccataattttgattcggcgtacccacgcctaacaattcatgccctttcagcagattctcaaaataatttttttcgtaagttctgtatatgatatttccgccctctgtggattccgattcactaattgagtcaataataattccctgaaccgttgacgttgacagggcaaacagtcccacaacgacggcggcaaaaatgatccaaaacttatttttgacgctcggactgaacaatataataattccagccgtaagtgctgtacacaaaataaccattctggactggttaataaagataacttcaaagataaaaagtatgagccatcctattgttttctttttttcttcatccgtatttgttttcataagcgcaacaaggcaccagaaaacgcctaccatctgaggaacattggaagcatagattctgtaaccccatcgcactgtatgcgagaaactcgatatatctacgcccacatacaacaacaacagttggcacaaatatacgatacttatcgtctttataaacttaaaaatttctgataaaatatcttcttttgagattcgtcccatactatacatcattataagcggatagtatgccaaataaatatacatcggacgaagaaccatcaagcctgtaatgattccctgattatatatagagtatcctgtaaatgcaccaaccgctcttgacaccaggaaaaggaaaatcacaaaaccaaccttgtctttttttacaactacttttcccatgacgaaaaaaagccatattgcaacaataatattcaaatccgcccaggataaagtggaacttcccagttttacactaggcaacaaccccattgcctcaaacgaaaagaaaagcagtaccgtcacagaatatttcggcaccttataaatttccagtaacatcaacgccacaacagtcgctgataatattgtggaaagcgttgtactctttgtaacataaaacgtcaggcacgatagtataatcagtattcttatacacgctcgaccatttaatttcttcgtgttcatcttcttatctcatttcacttttataataaaagacaaagttctcagtttcagtatataaaattgaaacatccattttgccaaaagaatgtccaatttggaacaattcctatacttttcataataatacatttcggaatcaaagactctcttcctttttaccagaagattttcaattccggtctttgttctatctgtggttgaaatcccctgttcatgtatgattttaaccttattggtataccacaccttgtacccttttttccgaaatctctcagttaaaatcggttcttccgcatacaagaaagtatgttcgtcaaaaccgtccacttcaaaaaacggcttttcttttgccaacataaatgctccaataatgcgatagacttctccatcttgcgcgtcatttagcacatcataatttatttgtttcagctttggtattgctttatgcatcggccaaaggagattaggaatgatatgccttttatatatactcatgtattttccaggcgattgatctttctcattcaaacccacaactttaggcccaatcatcgccacatcttttctatcttccaaatcttttttcaagatggaaagttcaaatacttctggcagctgaatatccgaattactaaaaagaagatattcgggagcaaaaatatttttagctactttcgctcccaagttgtttgcaaatgcaaatccacgattgtcttcatccgatacatatacaaccgttatgccatttcgattaaacgtccgaatatgtttgaatttcatgtcatgtaggttataattttcagattgtgcaaagcccaatttaagcaaattttcacttatcacattcccattttcttcatttggggtattatctacgactacaaacgacacatctttatcgtcagaggttctacaaaaatcatttatatacttcacacatcgttctgccgttttataatcaactattatgactgaaatcatcttttctcccttagtagcaatcttttacaatctcatccacaatcgtattccaatcatatctcttattaacatattgctggaatttcttgcccatttgtgccaaagaatctttagtttctccattgaggattttttgtaagttttcgcaaatagctttatcgtcatttggaataacccatccacaaccatcatcaatatattcagccaaagatcccacattcgtacagagaaccggaattgcctccgctgctgcagtaagcataacgccgctcatactcgcatggcgatatggcaaaacaatcaaatctgcattcttcaagaaataattcaacaagttattgctaatatattgattaagaaaaataatatccgcttgactttttatatattcatccaactcatcaagttcaggataacttggttgtgtttttcctgcaatcaccatgcaacaatttttatgatcagcagtctccttccatgcccttatgattcgatccatgcctttatcataatagatcattccaaagctcaaaatcattcggtcatatttattgataaacttctcacacttcaaaatttctgcatcggtataatcaattttttctttcagtgtattcttttttccatgcctcgaaatataaacttttttcttatattgagggtaaagcctggtgaactcatcgtagatgctttgtccatgtacgataatcacatcagcgcagtcgtaaattttaccataggacttgatatacttttcactattgatatgtggcagaacattatgcgctgtatacaccaattttccgcaatatttcttgatttttctaaagaaaataggatcaaccttgctaataacactccagtgaatatgaacaacatcaggtttttctttttttatgatatttataagttttaagtattggtttatatattcagctgcgcgcacagcattacgtttagtagatggcaccattttttcgctattcttgaaaaaataacgatggcacttgtacggaatatcttcatctggaatctcataatagaagtttgtatacaacgacacatctatgtcgtttcttttgtatagtgctgaaaccattccattcagatattcttcatcgcccttaattcctcttggattgataacgataacctttttcatcttttttcgtcctctataaattttgtaatgtcatcaattatcacttgggtgttgctcttgtattcattatatgttgtactttttactgtttgtattgcttcttctagctttgcacaatcttgacattcgcaaatcaaatttaattccttaaactgtcccacaagttgcagttgatgattgtcaacgtgttccccatatttagcaagtcgtggaacagctatcactttctttccttttttaacagctccaataatagctcctgtaccaccatgggtaataacaatttccgctttatccataacctgtgagaatttttctctgtcaagaaattgttcatatttataattcattggcttataatcactataccctatttgagcgaacacttcatccttgattttccctgcggcaaccaactcatccacagcttttagaagtctattgaactggaatttctgcgatcccaaagttataaatatcatgcgctcctccactctagtaaatgccacctaaataaatcgcttttgggtaaaactgaagcattggtttccattgaacataaaatctatccgcaaatttatataaaaatcttcctgtttctgtcggagacgatacctttgcaaaagattctatgtaaatcaatttctttccaaataattttgctatcaagcatagcggaatcatcgccagcacaccggttgtgataacaacatctggtttttcccgcaaaaagataattatacttttcaacgcattcacaaccatccaaaacggaaaagacatctctttacggttcacttgatgcacataatacatcttttcatcttttatcgttgctttatactcagtatgttccgtcacaacaaaagattcatatttgctcatcaacggtcgcaacattgatatttgttcaaaatgtccgcccgatgaagcagcaaagcatattttagtttttttcatttcgactacactttccctctgccatcattaaacccctaggaaaaattcatcttccagcatcaagcacaagcaatgataaaccggaagatgaagctcctgaatcatgtatgtctcagtttgtggcactttgatgcatacatcgctcatctgttccaatttgctactttttgctcctgtcagaccaattactttcatgccttttgcgtgagcagttgttgccgcatacaaaacatttttgctgtttccacttgttgaaatgcccagaaatacatcgcctgtcttgccataaccattcacctgttgcgcaaaacaaagaagtggctcacaatcattcatgtatgctgtcgacaaagccggatgtccgtctaaagcaattgccggaagcgctccttgcaatttttcagctaaaacaactcctaattctgcattttcttgaattaacttctctgcaaaatctgctttcggctttcttggaagtttgaaccctttcatcagttctccgacgatatgttctgcatctgcagcagaaccgccatttcctgcaaccaacagctttccgccatttttataagaatcttctagaatccgatatgccgtagcaatatcagattccacaaccttcaatgcaggatagcgctcgcaaagaaaatctatatgtttttttatattctctttcaactcgttcattttcattctccgtaaattttctttataagcacttctttgtaaactccaacagcgaattcacagtcatcatttgattgaagttttctttgccatttcctatcagcacagctttgcaccctgcattgataccagccttaatgtcattttctccatcaccaatcatccaagattgtgatagatcaatgttaaagtcttcagctgctttcaacagcattccaggctttggtttccggcaatcgcagtcaatcttcagctctggacgctcacccgcataccccttatgcggatgatgagggcaataatagattgcatccaaatatgccccctctttgccaaggagtgtttccatcttgttgtgaatttcctccaactcatcaaaagatacctcgcccctagcaattacaggctgattcgttacaacgattgcaagacaccctgactcgttaattttacgaattgcttctgcgacaccatctatcagttcaaattcgtcaatgttccgaagaaatccaacatatttattgatagttccatctctgtcaaggaatatcgctttctgcttatttttcagattttttcctgtaacgcgaccctcacgataatcggcacacacagaatagtatctatctggcgttcccatatctttaacatactctgggctgtcgtaacagaacatctttcctgttccggccaaaggcttcaataactggcgatccaaatcaacctttacaggctttctgtcatttcccatcttccctatcgtttcggcatcaatcttacaaatttccaatatcttcgggttaataacatgaagtcccgcattcacgcggttacgataataccgtggtctttcatcttcttttgcaagccacttttctaccgttccacttttatctgcaacaatcaatccactgtcatacggatggctgttgggatgagtaaaaagtgttacaagaccaccgtgctgcttgtgatactcaacaaacctgttaaagtccacatcaaacattgcatcagcattgagaagaagaaaatcctcagtcaatttatctttaattttgaacaatgctcctgcattacccagcggttcattttcaaagtaatattcaatatgtacaccaaacggctgtccggtcactggcgaatttccagagccatcgccaaagtaatccatgataatatttcccagatggcttactgtaataatgatgtcatcaaaaccctgttctttaaggcattcaatttctcgttccagtacgggaatgccctcaatctttatcatcggctttggaatgtcactcgccactgaagagatgcgagtgccctttcctcctgccataatcactactttcatattgttaatccttcggtgtataatcttcgggtgtataatggattactctcgtgccaccatcctcaaacttgaatggaatatacagcaagtccctcatcgcccagcgcacagcatcctgacgttccggctgcacatagaacacgaggaaccccccgccccctgcgcccagcaattttccgcctaatgcaccagaagctatgcctttcgcatacagttcatcaatgctatttgtagagactgcggaacccgtttgccgtttcaatttccaagtgtggtcgagcaatcgcccaaaatcgtccaaatcactttctttatcagtcaaaactcgctctgcatcgtctactaaagataacatttcttttaactgtgctgttttatccgttttgccagctgcatttgctttctgtacatcagaagaaaatctggtaaatccagtaaagaacatcatcagattctgattgagttgtttttttctctctggcgaaataattaccggaagaacctcataaccgtcagcattgaaattgatacggttgaagccgccaaaagatgcagcaatctgatcctgccagccaccagcttcctggcagagatttcgttccaggtaaatcgcatcatctgccagtttcttcttatcagcatactttccttttagtgcataaaaggcattcaacattcctactgcgaacgagcttgatgtaccaagaccagaacgtgcaggaagatcagcttcataagtaagacggatttcgtgcatatccagcatcttcattgcgtttcggattgccggatgctgaatatcgttaatgtccgtcacgcgctctgtctttgaatacgacagctcagtggaatagtcaaagaaacgcggcaaatgacgcacatttacatagcaatatttgtcaaaagtggtagagagaaccgctccaccatattccttaaaaaaactttccatatctgttccgccgccaaaaaaagacatacggaatggtgtttgtgtaataatcatgttttctcctgccttatcaatctctctggaaaatatctctcgtgtaaactttctcttttacatcatccaagcacttgtcatagcggtttgcgatgatagcgtggctcatttccttgaacttcgccaaatcgttgaccacggtgctgccgaagaatgtttctccatctttcagggtcggctcatagataatgacagttgcaccttttgccttaacacgcttcataacgccctgaatagaactctgacggaaattgtcggagtttgacttcatagtcaggcggtaaacgcctatcgtgacagatttctccttatcctcatcgaactcattttctgcatcgtagccatagtagccagccaactttagaacacgatctgcaataaagtccttacgagtgcggttggattccacgattgcttcaatcagattttctggcacatcggcatagtttgccagcagctgtttggtatctttcggcaggca

SEQ ID NO: 202 - DNA, 6612 bp, unidentified
  source 1..6612: mol_type = unassigned DNA
ttcctgaatccgctttacatcacaggcacgatagcagtagaacggcggcacagccagatttccttttggttcctttggcttttcctcatagctcgtaatcagatccgagttatcgagcgtgatgattgctgttttctgctgctttttcagttcgttttcctcatggcacatcacacaggaagtattcttttccttggcaaaatcaacgaactttgaaaggctgaaatccagcacattatcgccagccataaccagcaaatcatcagccagattcagcttttctaccgccagttgaatatctttgactgctcccagacgagtttcattggtgcttgtaccatcgtcgatcacagtaatctcataaggccgcgtcttttgcttattacttttccaatcctcaaaatgctgtgcaaacttgtggttggaaatcaccacaaattcgtcaatgtcggtggtgtccaccagatcatccaccaaccaatcaaggatggatttctcgcccactttcagaagcggtttcgggaaattctctgtcagcggataaagccgtgtagcatagcccgctgccaaaatcaaacatttcatctatgtactctccttatagttccacgccatcggcactctcacacaaatggaaactatactttccattcagtgctgggaacgctttcagatactctgctgtcaccctcgcttcaatatcttcggccttgtccgggtcaatcaatgccatgcagcaacccttgaagcccgtaccagagaagcgcccaccgtagataccatcggtatcggtcatgatctcatacagttttttcagttcatcgcagccacactcatagctataaatagaggattttccgctttcaaaaacaagctgaccgtagccctccaaatcacctttacgccacagttctgcacccttttcggcacgagcgaactcactgtaatagtgctctgcacgtctgcgccacaactctggcaaacgatctttataggcttcaaagacctcaaacggtacatcacggagccgggtgtttgcaaaggtatcgtagtccatccctgcatagcccatcagtgcataggccgctgccttgcactcatcttgccgcagattgtacttagagtttttcaaagaacgttccaaaccagagaagaaaattgcaaccttgtagggcttcatcttctcgctggtagggatcagttcatagctgtcatctttcgtgtcgaggtacagtagatggtttttcttagaaagaacttcgcagctctggtcgagcttgccgcaagaaacgccaacatactggttttctgctgcctttgcggtgagaatcatttccatcggcttcaaatggatgccattcactttgcacagtgcagacaagaagcaaataatgaccgaagccgacgaggacaaaccgccaatcggtaagctgccttcgatgatacctgacagaccaactttcaggcggtacttttctcccagcatctttgcagcaccacgcagatgatcagcccagtcaccctgcttttcatccggcactgcatttacaaagaactgggcacgcttcgggaagttcaacgactgcagttccaccacaccattctgtttcgggtggtaggccatgtggattcccttgtcgattgccagaccattgatttttccgtactgatggtcgatatgcgcacccagtggactgatgcggtacgggcagaacgccacatcaaacggttcttgatgatataattccttgtaaacctcaacacacttcatcagacttttctatcctcaacaaattcagtataagattggcggctgccctttcttttcaacaacacatcggacatagccttcccacttttgaattatttgtgtccattctttagatgcaaagtacgcgtctatatcactatccaaatcaaattctggcatataaacgcccagcacacctttttctaatatgccttcttctactacgcccttttctcttataattaataccggtagtcccaactgaaaagccatcgctggttcaatttggcaatatggactcgtcagccactgatttgtcaaatcgtacgcattttcgcctatatcgctatccggttttcccgttcctttcacaattaagcttcttctgaatgcgattgctatcaatccatttgattccagcaacaatcttcttattgctgttagtggggcatccatatcataatccgtcacgcctaatgttcttggttgcagccctctattttctaaataactgacaactttttctataaactgcttttgcttttctaaataaggctttggatagctcaaaaagacggaatctttcatttgcgtcctccagttacatcttataaaaatttgcataccactcagcaaacttccgcaagccctcgcgcaaactggtagagggcttatatccgaagtcacgctccagcgcactggtatctgcataggtcacaggtacatcaccaggctgcatcggaaccagtttcttgtgtgcttcaaagtcgtaatcttccggcaggacaccagcacggatcagttcttcctgcaaaatctgtacgaagtccagcagattttccgggttctgattaccaatgttataaactgcatacggaggaacgggcagaccatcttcaccatttttacgttccggcgcaccctgcatcacacggacaacgccctcgacaatatcatccacataagtaaagtcacgcttgcagttaccgtagttgaaaatctgaattgtttcgcctttcagcagcttgttggtaaagccgaagtacgccatatccgggcgaccagcagggccatataccgtgaagaaacgcagacccgtggaaggaatgttgtacagtttagaataggcatgggccatcagttcatttgatttcttggttgccgcatacaaagataccgggttatccaccttatcatccgtactgtaaggcacttttttattactgccatagaccgaagaactggacgcataaaccaggtgttccaccggggtatgtccttcatcgtaagagtgacggcaggcttccagaatgttatagaagccaattaggtttgcttccacataggcatcaggatttgtaatggaataccgaacgccagcctgcgcaccgagattcaccacgatttccggcttatactgctcaaagatagcttcaatcacagacttgtctgccagattaccttttacaaaactgaaattttcaaactgctccagttcattcagtcgagcctctttcagccggacatcataataattattcatattatccaggccaacgatcttgaccccctccactgtggagagcagccgctttgcaaggttcgagccgataaatccagccacacctgtgatgaaaacgctcttgtttttcagatcaattttggtcttattttccatcataattttcttatcctcccttgttgaatcccccacttatttcattatacggcaacaagcctgtatacagattgcagccacaatccatacgcaggcctgtctttttattctccacgccccaacaagcacaccttaaacgtcttaaaaataatcttccaatccactaaaaagctacgttctttcacgtatttcacatccaaatccatccactcctcaaaagagaggtcattgcggtgcggagcgatctgccaatagcagctcaggcccggcgtcacatacaaacgctgcttctcataatccccatactgctccacctcgcggggaagtgccgggcgggggcccacaatactcatgtctcccttgaggatattccagagctggggcagctcatcgatgctggtcttgcggataaacttgcccacacgggtaatgcgcgggtcgtccttgattttgaacaccggaccatccatttcgttctggtccagaaggtcgtccagttttgcctctgcgttcggacacatggaacgaaacttgtagaacctgaacggtttgccatctcgtccaatgcgctcctgcgaaaaaataggcccggcagaagggtcatctaccacgatagcgatagctgttgccagcatcactggcgacaacaccaccagcgccagtgccgataagaccacatcctgcgtccggcgtccgacccaatataaccgatgttcccgcagattctgctttcggtcgatgacgaccggcttttcaattccaattacttctgtactcatttttacctcttcacactctgtattttctcgcacgatccccgctgcgcgcattcttacccagcctttgctacgggttccttttccattaccgccccatcaaacaattcttccagtaattgtttctggtccgcacttaatttgggagagttatctcgcagcagccgtttttggtcatatacccaccggctcaaccagatgccatccgcagttttgtacttggccgggattttcagatttccatgagccttcttatatttctgcgccagtttataccggtgctgccacgggtcaggcttgtcccactgcatcccaatagcattcagccgtgcgatgcgttccggtgtcagcacaccacaccctttatcggggttcagccgcgtgtaccgctgccgcttgacccaattcccgaggttgtaaccgcccggtgacacatattctgccgggacgttcagatcaccgtgggcatcaaagtagcactttgcctcctgatagccttcgttccactggcgatcattgcggttgccccagtacatcccgatccggttgagtcgttcgacctgctcgtccgtcagctttcctttcgggtacgcccattgctgacttgtgacccattgccccagccgttcaccagccgctgtcacataggaacgtgggatattcaggttgccgttttcctcatagtaggccgcagccagcgcataagctttttcccacttggcatcaaaaacactccacaccatgccgatctcatcaagctgcgcaatgcgttcttccttcaaattgccattcagcttctgctgccgtgttttgatgagccacttgcccagagggtagccgtccgggtccacatactttccagctaccatcagattcccataggtatcatgatattttttcgccttctcaaagccacgctgccacgcgctctctttctgatttccccaggccataccaatgctgtccagccgcgcgatctgctgttccgtcagatttccggagactctcccttcgcgcaccccgcgctgtgtgacgagccacaccccaaggctcaggccagcaggtgtcttatactgcttcggcacttttaagtcgccgtgttccgcatagtagatgcttgcctcagagaaatagtgctcccaactggaagaaaggctttcctgcagccgttcaaacagtatccggcagtcatgcacctgctcgatgacctcgaaccgctcggtgacgatcttgtcaccctcgccgttggcatacagacggtggacggcctcctgcatctcgctttgcagaccggaaatactggtcaagccttcaaaattgttgaccacatcgagaatcagcggagctgcggtatccccagcggtcagggcgcgtccgatctgctgcttgtagataatgggcgaaatcgtgggcctgaacaggatgaccccggaaatcccctccacatgaacgccctcgttgagcatgtcgatgcagaacagcagcttcagccggttgctggtgtccgttttgaagtccacaaaggccttatcggtgttcgggtcatccgagtaggcttcgtacaccacaacatctggattgacccctgcgaaccactccggcacgtgggataccatctcgtccatgtgctctttgttggcgcagaacacgatgtattttccagatttgtttgtaatatgatgggcaaagaccctgtccaagccgtctgcctgctccagtgcgcggcgcaacgcgtccagatatttctggttcacatcctgaatgcccggtgtccgcaggttgtccacccgtgcctgatactttgcaagcgctttctggtactgataaacggtcgtcacgtattttggcgcaggcaaaatgcccctgacgactgcttcgccaagggtcatgtcgctcgcaacacggttgtcaaaaagctcttcggccatgtcgcggttattatccaaatatcggatgtttgtcgccgtcagcccaagaagttttgcgtccgggcataactttaatagagccaccgtgctttcgccccagcattccgcaccggcacggtggaattcatcgagtataatataggcgggcttctgcgctgctatttcgcccagctgcgcctgcgtacagcacatcagtttggcgtaggtgtaaaagtgaacattttccaacggaaactccgggtcgttccttttcaggctctctagctgggtcttaaagatatactcactgggagaaagccagatcacgaccttctccgggttgtcctcgatcagcttgaacgcaatatagctctttccggtgccggtgggatgaacaatggcagccttgccatactgctccatcatccggatcgccgcacgatatgctttttcgttgtgctcaaacagacgcaatgccactctgctcaccccttcccgcaa

SEQ ID NO: 203 - DNA, 21782 bp, unidentified
  source 1..21782: mol_type = unassigned DNA
atgatgtgatcttcatagcccagcttctcccactcttcctgttccgtggcacggggataaccggtaatgatacggtcaaccagagtagaggtgaatacgcatgcctcatctacccactttttgaattcatcgcccaatccccacagctcgatcagctgcattacacacttctttaacataataccgttgtcatcgatcagctctacgggaagcattaccaggcctttgctcatgtcacccttgaaagtctcaaatctgtgatataagaacttggtcagcttgccggggaaagtcttgggaggctctaattcaaacttatcggtatcatcatatacgatacctgcctcagtggtgttggatactacgaaacgtaaggtatcgatctcggcaagtcccatgtacttgtcatattcattataagtgtctactgcgtctgcaacgctggttacgattctattgatgatcttggcttcaccgttcacattaccgcgaagagatacagtgtactggcagtcctgcttgtggaacatatccagattgccgaactcgatgggtttgatcagaacgatgtctccgtcgaacttaccctgctcgttagcgatatcgatcatgtaatctacgaatccacgtaagaaattaccctcaccgaactgtacgaccttgataggtctctcctttttaccggtctttgccttgtttaagatatccattttgtcctccattctacgcttagcgtatcctatctgcaccgtcttacggcactctgttacctgcacttaccttcccaatcgcctttgagcaattaagttttcaacgctcgttggtgtttttgtttctgaattgtacggagtttatgtaagtactttcataaattattctacttcaaaaaagctatttcgtcaatcaccaaaaacagaaacttatttttttctcaaaccattgattttatcagcaatatttcactttgataattttttggcatatgaaaaattgaaaaagcatcttgaaaaaagagaagtctttcgttataattcagatatagctttttatgtaactacttacagttttcttacaaattctgttacatagaagcggagaggaatccgcagatgacaatttacgatatttctgagaaggccggtgtctctattgctactgtttcccgcgtattaaatggaagcaataatgtaagcgagaaaaccaagaaaaaagttctggacgtaatcaaccagtatgagtacactcccaacgcatttgccagagggttagggctcaacacgatgaagaccatcggtattatgtgtgccgacagttccgatctgtatttagccaaggcgatctattatatcgaacagaagcttcgtgccaacggctatgacagtatcctgtgctgtaccggttatgatctggctaccaaagccagctccatgaaccttctgatcaccaaaaaggtggacggcattatattggtaggttccaactttatttatgaaaaggaagaagacaacaaatacattacagatgcctccgcgcaggttcctgtaatgctgttaaatgcagcgatggatgctccaaatgtatacagtgttgtctcggatgattttacttccatgtatgacgctaccatggagatgatccgctccggtgtggaagatattctgtatttctataattctacttcctacagtggtaagaaaaagctggcaggctaccgtgccgccatggaagaaaaaggacttctcaccaacggaagcttcctgcagctctatcagggatcccacgaggatattcccgccatggccgatcagttgaaaaagctccatgcaaaaggaatctctttccacggtgttatcgccgctgacgattccctagctctgggtgctctgaaatacggccgggaaatgggacttcgcattccggaagatctgtccattatcggttataataattccatgctggtaagctgctgtgatccggaactgaccagcatcgacaataaattagagacgctctgccagcatctgatcacaactctgatgggtgtcctggaaggaaacgagatgccgaaaaagactgtgttctccggagaactggtaaaacgcggcaccacaaaataatttttttctttacagcaatgacagcaataggggagctgaaaataccctttagtatatttatggaggattttaaaatgaaagcatttatggacaaggactttctgttagagactgagacagccaggaagctgttccacgactacgcagaaaaaacaccgattctggattaccattgtcatattaatcccagggagatcgctgaggatcgtcagttcgacaatatcacccaggtatggctgggcggtgaccactacaagtggcgtttcatgcgttcctgcggtgttgacgagaagtacatcaccggtgatgcatccgattacgagaagttctgcaaatgggcagagtgcctgggcaaggctatcggcaaccccttattccactggagccatctggagctgcagagatatttcggttacaatggcgttctgaacaaaaacagcgctgacgaagtatggaacctgtgcaatgaaaagctccatcagccttccatgagcgttcgtaacctgatcaagcagagtaacgttaccctgatctgcaccaccgatgatcctatcgattctctggagtggcacaagaagctggctgcagatgatactttcgatgtaaaggttctgcccgcatggagacccgacaaggctatgaatatcgagaagcccgattatctggattatctggagaagctggctgttgctgccggcatgaccgagatcaactcttttgcaagcttaaaggaagctctgaagaaccgtatggcatttttcgcatccatgggatgtaacgtatctgaccatgctttagagtatgtaatgtactatcccgcttccgatgatgagctggaagagattttcttaaagagactgaacaagatggttctgaccaaggaagaggaactgaaattcaagaccgccttcatgctgttcgtaggccgcgaatatcataagctcgactgggctatgcagctgcactacggttgtaagcgtgacaacaacaccctgatgttcgagaagctgggtcccgataccggttacgactgcatcaacaactacgctccttccgctcagatggctgacttcctgaacgctctgatcgtaagtgatgagcttcccagaactgtcatctacagcctgaatcctaacgacaatcaggcaatcggtaccatcctcggatgtttccaggattccaccgctgttgccaagatccagcagggttctgcatggtggttcaatgatcacaagaccggcatgcaggatcagatgatctccctggctaacctgggtaatctgtccggatttgtaggaatgctgaccgactccagaagcttcctgtcctacaccagacatgagtatttccgccgtatcctgtgcaacctgatcggtaactgggtagaaagcggcgagttccctgcagattacgatactctgtccgagatcgtaaccgatatttcttacaataacgcaaagagatacttcaagttccctctggcataagagataaaacaataagcccccggtgatgagccgggggcattctttatttattgaatcacgaggttggagtatcccatcaggctctcatccacagcatgtgcagcttctctgccttcgcggatggcccatacgacgagggactgtcctctgtgcatatcgccggtgacgaatacattttccacactggtctggtattttccgggagctgtttttacattggtgcgttcatttaattccacgccgaaagcatcagcaatgtatttctgggttcctaaaaatcctgcggcgatcagcacgatctctgcatccaggatctgctcgcttcccgcgatctcctgcatcttcatgcgtccggtagccggatccttttcccaggacagcttcacgatcttcacagctttcagtttgccgttcttatccttgataaattccttgactgtagactcatatatcctcgggtcatgtccgtagaccgcaatggcttcttcctgaccgtaatcggtcttgcagaccttcggccattcgggccagggattattctctgctcttttgtccggagccttgggcatcatctcgatctgggtcacagattttgctccgtgacggatggaggttccaacgcagtcattaccggtatcaccgccgccgatgataaccacatttttccccttggtctccacatattttttatcttcaaaattcgaatccagaaggctcctggtattggctttcagaaaatccaccgcaaaatagattccctcggcatctctgccaggagcattgatgtctctgggattagaggcaccgcatgccagtacgacgcggtcaaaatcatgcaaaagcttggatgctttgatgtccttgccgatgtcggttcctgtgacaaaggtgacaccctcttccttcataatattgatcttgcggtcaatgatctgtttttccagtttcatgttggggatgccgtacatcaacagtcctcccacacgatcggaacgctcgaatactgttacctgatgtcctctctggttcagcagatccgctgctgccagtccggaaggaccgctgccgatgactgctacctttttaccggtgcgtaccacagggggcttggctgccgcatagccctcgctgtaggcgttttcaatgatggcatattcgttctccttggtggagaccggatccccgttcagtccgcaggtacatgctgcctcacacagggcaggacacactctggaagtgaactcggggaaattgttggtcttcttcagacggttgtaagcctgctgccagttgccggtatataccagatcgttccactccggcaccagattgtgcagggggcatccgctggccataccgcagatcatcatgcccgactgacagaacggcacaccgcattccatacatctggcaccctgtaaacgctgcttttccttcggcagatgctcatggaattcattaaaatgctgtattctcttcttaggatcttcagccacgctgacttcccttttatattccataaatcccgttggttttcccatggtgacttacctcctactttctagtgttggcatagaatgcttcgatctgtgcctgctctgcgctcagtcccttttcctccatctgtacgatggtcttcaggactctctcatagtcatgagggatgatcttcttgaacttaggcagatactctccaaagttatccagcacttccttaccctttgcagagttggtcagtgccacatgctcctggatcatggatttcagctccagcacatcatatttggatgtgatctcgctggaagataccatttccttattcagacgcttatacagatcgttgccttcatccagtacatacgcgatgcctccgctcataccggctgcaaagtttttaccggtgggacccaagactaccacacgtccgccggtcatgtattcacaaccgtgatcacccacaccttcgactaccgcaatggcaccggagttacgtacgcagaaacgttcgcctgccacaccgttgatgaatgctttaccggaggttgcaccgtacagtgccacattaccgatgatgatattttcttccgccttgaacttgctgccctgtgggggatataccaccagcttaccgccggataagcccttgccgaagtagtcattgctgtcgcccaccagctccagggtcaggcccttggggataaaggctccgaaggactgtccgccggcacctttacacagtacatgataggtatcttcttccacgtcatcgcccagttttctggtgatctcacttccgaggatcgtaccgaaggcacggtctgtgttgctgacatccacttcgatactgcgcttctgtcccgcatcgatggctttgcccagctgctttaacagcaccttctcatccagtgtcttctctaactggaagtcatatacctgcctgggatcgaaggttaccttctgcttgctgccctcgtaagggttgcttaagatctgggtaagatccacttcttcctggcgctcggtcagatgctcttttctcttcagcagatcggttctgcccaccagttcatctacggtacgcacacccagggctgccatgtattcccgcagctcctgtgcgataaatttcataaagttttccacatattccggcttaccgcggaagtttttccgcagctccgggttctgggtagccacacctaccggacaggtatccagattacatactctcatcatgacacaacccatcgttaccaatggagcagtagcgaaaccgaactcctcggcacctaaaatcgctgcgatggctacgtctctgccgctcataagcttaccgtcggtctcaatgcggactttattacgcagtccattcatgatcagggtctgatgggtctctgccagtcccagttcccagggaagtccggcattgtggatggagtttctcggtgccgcaccggtaccgccgtcataaccggataccaggatgacctgagctcccgccttggccacaccggctgctacggttcccacaccggcttccgaaaccagctttacggagattcttgcctgggtgttggcatttttcagatcgtagatcagctgcgccagatcctcaatggaataaatgtcgtgatgagggggcggagagatcagggacacaccgggtgtggagtgtctggtcttggcgatccagggatatacctttcctccgggcagatgtccgccctcgccgggttttgctccctgtgccatcttgatctggatctcctgtgcactcaccagatagcggctggtgacgccaaaacgtccgctggctacctgcttgatggcggaacaacggtttaagccgtccgggcctacggtcagacggtccagatcctcaccgccctcaccggaattgctcttgccgtgcagatggttcatggcgatggccatggtctcatgggcttccttggaaatggagccataggacatggcaccggtcttgaatctggtcacgatggattctaccggctctacttcctcgatgggcacgccctttttcggatagttaaagtccatcagtcctctgaggttcttgatggaatcttcgtcattgaccatggcggtgtactgcttgaacatctggtaatcaccgcgtctggtggattcctgtaacatatggatggtaacgggattatacagatgctcgtcaccgccgctacgcatcttgtgatgtccggggctgtttaaggtcagatcgtttttcagtcccagcggatcaaatgcctgagagtgcaggtcgtctacctgctgctcaatatcttttaaggtaatacctcccacacgacatacggtgttggagaaatacttactgataacttccggcgcgataccgatagcctcgaagatctgggaaccctgataggactggatggtactgatacccatcttggatgcgatcttgacgatgccgtggaggacagcattgttgtaatcatccactgctgcatagtaatccttatccagcatattgctctcgatcagctccttgatggtatcctgtgccagatatgggttgatggcgcaggcaccgtaaccgagcaacgtagcaaaatggtgtacttctctgggttcgccggactccaggatcaatgcgactctggttctcttcttggttcgtaccagatactggttcagggcagatacagcaagcagggaaggaatgggcacatggttctcatccacgcctctgtcggacaggatcagaatgttcacgccttctctgtaagctctgtccacttccacgaacagtcggtcaatggcacgctctaaactggtgttcttgtaatatacgataggtacgacttctaccttgaagccgtctactttcatgttcttgatcttcaagagatcagtgttggtcaggatcgggttgttgaccttcagaacgttacagttcttcggagtctcctccaggatgttgccttcggtaccgatgtatacggtggtggaggttacgatctcctctcggatagcatcaataggcgggttcgtcacctgtgcaaacagctgcttgaaataatggaacagcgggtgattcgtcttgctcagcacgggcagtggggtatccacacccatggctgcaatggcttcgctgccgttctttgccatcggcagaatgctctgcttcatttcatcgtaggtgtagccaaaagccttctgcatccgctggcgctcttcgtaggtgtattccggtacacgatagttcgggatatggatgctcttcagttcggtcagattgttgtccagccattctccataaggctgtctggaagcatatttttctttgatctcctcgtcatcgatgactctgccctgtacggtatcgaccaaaagcatcttaccggggcgaagtctttcttttactttgatcttcgtgggatcaatgggaagcacacctacctcggaggacaggatcagggtatcgtcatccgtgatcatgtaacgggaaggacgcagaccgtttctgtccagcacagcacccatgatatctccgtcggagaacaggatggatgcgggaccgtcccagggctccatcatggtagcgtaatactgatagaaatctctcttggtctgggacattgctttgttgttcgcccagggctcggggatagcgatcatgactgccagaggcagctccatgccactcattaccaggaactctaatgtgttgtctaacatcgcggaatcggaaccggtcttgctgatggcaggcagtactttgtgcagctgtcctttcagatgctcggattccatgttctcctcacgggccaacatcttatcggcattgccgcggatggtgttgatctcaccgttgtgtaccatcaggcggttcggatgcgcacgctcccagctggggttggtgttcgtggagaaacgggaatgtaccatggcaatggcagattcgtaatcctcactctgtaagtctgcaaagaaggtacgaagctgtcccaccaggaacattcctttatatacgatggttctgctggaaagagagaccacataggtatcatcggaagactgctcaaatacacgccttgcaatgtaaagtctgcggtcgaagggcagacctttttccacatcgacgggctttttcacaaagccctgcatgatataaggcatgcactctactgccttatgtcccagcacattggggaaagtgggcacttcacgccagccgaggaattccattccttccttttccacaatgatctcgaacatcttcttcgcctggttgcggcgcagctcttcctgagggaagaagaacatgccgacaccgtattctctctctccgccgatatccatgcccagagcctttgtgactcttgcaaaaaatttgtgggggatctgggtcagaataccgacaccgtcaccggtcttaccttccgcatccttaccggctctgtgctccagattctctacgatcttcagcgcattctcaacagtagcgcggcttttctctccgtgaatattgacacaggctccgataccgcagttatcatgctcaaattcttcccgatataacggtgccttgggcagctcctgttttacatcaaacatatagttctcctttccgggtttttatttctctcttcttaatctgtctgttactattcagaacctcattcgcaagaccgtaatagtaacaaaaaaggtcgcaatgagactctttcgagcgcctcattgcgaccttttctgtactatacacctatttttctcatttgtaaatatagatttttctgcaaattgtcagataatttgtcaattctattatttgcacgcctgttatctggaaattgtattaattttctctttaaaagcgcattttcagcacaactttttgtgggttctcccctatttttcctgtttccggccatacgccttgctcatcagtttctgatacattgcagaaaagtgtttactctctgccagtgcagtgcgaagaggtgccagtgtcagtgccattactgcccgatagcggaacagttcgccgggattcatgtattttgctgtgatctccttatgttctgcagcgctgcgcttcaggttctccttggtctcagagtagccgccgccctcgtaggaggacacggtaagtcccagatactgcatgggtgctttggcacgataatagcaccagaggaaatgttcgtaatctgcacggatcttatatttgggttcatagggcttctgtctgcacaggtctgcagcataaaagcaggactgatggcagggaatgttgcggtagcagacgaaaccggtgatgcgtggtggggaagatatcttcgtctctgtcttcgcgctgtaggtatcgccgtagtagatgccctgaagtttcgccgggtgctgttccatgaactgtgcggtgtgggtcagaacttcgtcgtcatagaagaggtcaccgcagtttaggaagagaatgtagtcgccggtcacatgggagactgcctggttcatggcttcgtagatgctgtggtcggattcctggtataggtggatgcgtctgtcctcgcgcatgatttctatggagccgtcgcggctgccgccgtccttgacaatgatctcaaagctcgggtaggtctgggacaggatgctgtccagagtctgattcagtttaggacctgggtttaagcagactacgataatgctgaatttcatgtgttgctcctatttttctataaaatctccgtagcctcgacagagggaagaaacgcgacacgttcgcactctgtcgcagagcgtagcggcacataagcgtggaaagtacccacgctaagtgccgacgtctgcttacggtctgcttattcttccctctgtcggggctactgggttatggtaaccatccagagatatcttatcgaatatccagaggatggctaatatactttattagtgcttagaatatatttttctgtttatgaagtgttccaagggaggctgctgccactgccaggaaaatcacgcatacaggccagctgacaaagccggtgacggcgatggcggtataggacaggcagtaggcgagtacattggatgccacatggacaaagactgccattttgaactctccaaagtattcgtaagcatatgccatcaggcagccgatgaggaagccgtacacaccctggacgtagttcatgtggtagacaccgaagatcagggcggacagggctatggcgagtttgatatccatgaatctgcgaaggtatccgtagataactccgcggaacaggagttcctctgctatgggggagatgaagccgaatacgaggattcctacgataaagtgtgcggaatattgctgagctgccacttcggtataagcttcagacttattggtcactcccaggagttcaaacaggagattgcatccgatgacggcaccgatggtagtcacagtcagtaagacatatttgctctttccctcttttttcaagtggcttaagtgcatgtcctctttatttttatcaatgagcatcttcgctgtgggccatacggcaatggcaccgccgatgaatccaagagccgcaatgatactggagacatctccggagtagccgttataggcgccggtctcatcccgtaggattaaaagatccaccagtccaccggaggctccggactgtgccagctgatataacagtgccagcagcgcatactgcactgcattgcgcaccaatataaacatcagaaacgaatacaccatggtccagatcctctgatacatggggtttttctttttattgtccggatttccgttcagtaattcttcactgccacggagtaaaaatttctccagttcttccacggattgtacaatgtaatccgccttcgcttcctttaactcttccttacttccgtagccgtaggtcacgcccacgctctccacaccgagagccctggctccttccacgtcgaactttctgtcaccgatcatatagacctgcgccggatccacgggattctctccaaagagctgacgcagagtttcctgtaccacctgatccttggtttctcttctgccgtccagttcactacccaccactacagaaaaatattttttcagatcaaaatgttccaggatgcgctctacgtatacctggggcttactggatgccactgccaggaaataccccttcgactgaagcgttttcagcatctccggaataccatcatagacctcattttcaaaaagtcccgtatcctgaaagcgctctctgtattttgccacagcttcttctgcctgttcggcggtgaaaccgtagaattccataaaactgtctcgtaagggcggtccgataaagggttctagcttgtccagatccggctcctcgatgccaaaggagtgcagtgcatactgcacacaggtagtaattccgattttaggatctgtcagggtgccgtccagatcaaacagcagatatttcttcattcttatagttcctttttctttctattcttatatgttccgcagatgattagaagctgcggatcttgtctccgtcatcctcggtgtttttcaatgccttgatctccacatcatagcccacattagcattgacctgcacatggaccacatctcctacttttttgccaaggagcgctttgcccaggggggactcgttgctgatcagaccttccagggaattaccgcggacggtggtcacgatcttgtaatcctcttccgtgccgtcatcgataaattccacggtaacggtgttgttgatacctacctcatccgctgcggagttctcggagatgacctttgcagtcttgatcattctctccagataacggatgcggctctcattctgattcttatactttttggctgcatagtattcaaaattctcactgagatcgccgtgggctctggcttccttcacgtcctccaatgccttgggacgtaccaccagcttgcggtactcgatctcatcttccattttcttaatgtcagtgggtgttaattcgtcgtacataatataatccttctttctacagctgcatcgcatagatcactgccaaagacagaatgatctgaatgatcgcaaaacggaatacggtctgtgtattggaccaatcccacaccttacgcacatgatcgtgcaggggggtacgtacatttttcaaaatatggatcttcaggaaacgaagcagggacaccttaagaagtcccagtcctccgtccagaatcagcaccagtgccaatgggataaacaggaacgggcagccgctcttcaaaatggcgatgctggtgaacaatcccatggcccgggaaccggcatcccccatcatcagcttactgggtgtcgcattgtaccacagatatcccagaatacatacggcaaataataggatcaggaaggaataggtctcgtcgacctccttcatgcggtctacaatatagatggacatgatggtaatgatcgacagggttccggacagtccgtccacaccgtcggagcagttggtcacattcacggaggtccataccagaatcaccgtgagaatggcgaataccacaggcggcagagtgaactttacatggaacagcgccagttccaccacgttggaattatatttcagaaaagtgatggctaccagtgccgccacgcacagatctaagaaaccttttttgtactcaccccatggagtcttggaagcatcgtccagaaatcccgtcatcatgcataccacgatcagcagcagatagatcaccagctctgcgcttaaaagcgaaaacagtagaacagatgccacaaatgccaggacaaaaataattccggcgcctctgggtttccccgcggacaattttccatcatgggcaaattctcttccggcatccttgggcagatacggacttaatttcgccgttgccagtaccgtagcactaaaagcaaaaagaattccaaaaaaagcaaggagagaactgcttccctccggcaagatcatctgtaacatacgaatctccattcctcacaacactctcatgctgtattttctgataaatttcataactgtccgtcggggtcttcgtggaatgaacgtcccagaacagttacaaaacattttaacacaaatataccggaatctcaaataatttccacaacagttcagtcgaactgttgcatttgacagtcccctcacggtggactactatattcttatgaacactttctaaaaaatagccataaaaggagaaatgccctatgatgatccacaagattgaaccgcataaatattatccggaattccgaaatcaggagccaaagccttccgattatctgctgttatttgatggagagaaggtatatctgccctcccctgcagagaatgctgttgctgcggatgcttccatgaatgcagatattgtgaagcatcctcaggtatatcttcctaccttcgaggaggttcataaattgcttggtgtaaagcagcccctggaacgtttctttttggattgcgaatatctcttttctattgatgacagggcattctttcgcaagaccgcggaggacaccggtgctctcatgctcccggaggaagatctctatgcttccggcgtgttccgtaactttgaaccggaatatctggcattcgctgggatcaccgctacccagatcaaccgtttccgtctggatcggaaattctgcggccgctgtggtcatcccacaattcacagcaccacagagcgggcctgcatctgcccggagtgcggtcagatcgaatatcccaagatctctcccgcagttattatcgccatcgtggataccgcgcgggacaagatcctgctgacccgctacgccggcggttcctaccgtcactgggcactggttgcaggcttcgtggaagtcggcgagaccttcaaaggggctgcccgcagagagatcatggaagaggtcggcctacgggtcagtgatctggtctattacaaatcccagccctggtccttcagtgattccgccatgatcggcttctttgcaaagctggacggtgatcccacgattactttgcaggaatccgaacttggtgaagcaaaatggttctccagagaggatgtaccggatctaccctccactatcagtgtcggtcaggaaatgatcaccttattcaagaatggcggagatccgttatctcaataagcggcacttcttcgccacctttaccaacagatatcccttcgggaagctgcgaagctcctgctccgtgatgccccgcatcaatatcagcatgacaaaatagactaccgcagcgatcatgatcgccggaatgacagagatccgcatggacttcgtcaccatatacagaccttcgtagattgcccaggctgccgctcccataaatgcagaggcgaacaccggaatgacaaaagtctttacgatctcctgtcggtagcctaccgctcttcttaccgcccactggttcagcacacacatcataccggaatacagcgtattggcgatggcaatgctgtacagatccagactcgtgaacatcaaaagcaatactgctgccaccgtctgcaccaccagcgagatccccgcattgatgatcggggtattgactttgcccagcccctgtaaaatggaactgtttaatgtcgacaatgcataaaagataaccgacaatgacaatgtcatcagaagggctgctgccaggttcagttcctctgccgtcttgttcgtgaacagcagactgatcaccggcttcgctaatacaaaaagtcccacagcgcagggaatcgagatcaccatggtagtcttcactgccaatccgatcttctctctggctcccttcacatcccgggctgccatcagctgtgctacggaagggatcatagcagatgccatagcagatgcaaaggctatgggaatattggacattgtcagggactgtccggagaaaataccatatttttcataaatagataccgtatccagattacgaagagacggataccatttggtgtagatactgttgttgaccgtactgcttaagttatatacagccgtactcaaaataaatggggtcaccaccagtgtgatcgtcttgaatatctgtccgtaggaatccacatgttcatgcctgtcacgctgcactctgcgcaggatcattccacgattcagagcatagactcccgccataaaaagcaacgccactaatacgccgacgccagtacccagtgcacttcccacggcaccgtaggttgctctcatcacctgccctgcctgatcagccggaacctccatcgttcccataaacatttggatcagaagatatgccgcgcctacgctgactaccgcattggcgatctgctccaggatctgtgatacggaggtctgcgccatgctcttatgtgcctgaaaatatccccgcagaacacccaggataccatagacaaagatcgtcggtgcaaaggtacgcagtactgtgactgctgctccggacacgaataatcccgctccgaaaaacagaaaaaggctggctataccgccaaccaccagtacatagatcatggctccgtggaacaatctgtgggcgttgcgatattccttctctcccagcttctgtgcgatagctttggaaattgccgagggaatactataagaggaaatcaacagaatgatcgtataatagttatacgctgactggtaatagccaagtcccagattcccaatgacactctgtaaagggcccctgtaaaggagccctatgattctgctgatgattccggctgccgccagaattcccgcctgcatgataaaattgttcttggaactgttcttatctgccatatgttatcttaccttatttcagttctttatccgatcagccagtcatacatctcctgatatttcccggcagataccttccaggagtagtcagtggccatggcacgatccacgatcttattccactctctcttcctgtcatagtaaatatgctccgcatagcggattgtattcagcatctcgtgtgcattgtaattcgtaaagctgaagccggtaccggtgctctcatactcattatagggctgtacagtatccttcagtccgccggtctctctgacgataggtacggtaccgtagcgcagcgcgatcaactgactcagaccgcagggttcgaacagggacggcatcagataagcatcacaagccgcatagattttatgggacagtgcatccgaataataaatgttggcagacaccttgtctccatacttccagtcgaaatgacggaacatattctcgtaacgttcctcaccggtgcccagtaccacgaactggatatcatcctggcaaagttcatccatcacataagcgatcagatccagacccttctggtctgtcagtctggataccagaccgatcatcatcttcttatcatctacgcgaagtccaagctcttcctgcagggcacgcttattcttcaccttttccttgcggaaattcactgcattataggcttttacgatatttttgtctgtctccggattgaactctccatagtcgataccattgacgataccgcgcagatcatgacttctcgcacgcagcagtccgtccagaccctcaccgtagaacggcgtcttaatctcctccgcataggtatcacttacggtagtcaccgcatccgcgaatacgataccgcccttcagcaggttcgcatccttataagcctctaacttgtcagaggtaaaataatactccggcagtccggtaatgctctgcaccgtcttcacgtcccattttccctggaacttcaggttatgtatggtgataacggacttcatgttgcggtagaaatctccaccatggaaacgctccttcaggtatacagggatcaggcctgtctgccagtcatggcaatggatcagatccggctggaaattcaaaagcggtaatgccgacagcactgccttacagaaatatgcatacttttcgatctcatatctgggatcatccccataaggcttgaaaccaccaaaatagctctcattatcaatgaaataataatgcaccccggcttcttccgcttccagaacacctacgtacacattctgccagttgaaatccatgtagaaatgtgtcacatacttgagtttatccttcatctcctgcttcatacaggtatacttcggaataaacactcttacatcaaaatactccttgtcaatatacttcggcaaagatcctacgacatccgcaagtcctccggtcttgataaaaggtactccttccgatgcggcaaaaagaatttttttcatgtaaaccctccacatatgctacggcttgtatttcaaaacatagattgattataccatgtttacgattcatagaaaagagggcagcgataatttacaaatcttttagagtctgcggttttgcctcagtttctgtaagaaagtcggatcctgtcagcgatcaacgcgataaattccgaattggtaggtttgcctttgcccgtgtcgatcgtgtaaccgaacatggcatccagggtctccatgcgacctctgctccaggcgacctcaatggcatggcggatggcacgctctacgcggctgggtgtggtctgaaaacgcttggcgatggtgggatacaggatcttcgtgatggaactgatcatcgccggatcctccaccgacatcatgatagcttcccgcagatactgataccctttgatatgtgccgggactccgatctcatggatcatatccgtgacatccttttccaagtcatggatgacttcctgggtctgttcccttttttctgtcgcttttactgtgctgtctttggcatttttcgtagaaggaaccgtgatcataatttggaattccttgttggcattcatcagatcccccaggattttgtatactttttcattatcctttgtagttgtaatgtttaatttttccattaaactacctccatgactacaaaactacttttttcacgtaccgttctattataaatagatatgcgtcatggcttcaagcagaacccatcgcaagatttttccaaatttcgcagtataaaaaaggtaaaaaaaggcgcccggaatgacccggacgccaataagagggaaaatgtataagtagaaaaactacgagtaaagcaaattaaattaatgatgctctgccagagtgtgaagtgcttccttgatggctgtcttcacagtctcatcctgttcctcattcagtctgtgcagcagataggtcttggcatattcggtaccgatgctgcctaatgcttttgctgcttcgacacggatcttcggatccggattgtcgatcatgtgggcaatgctgttcacgctgtcctcatccttgatccggctcagagcttccagtgcggctaccaccacggtgtcatcggaagagctcagatatttgatgatcttgtcggattttcctttctcctgtaatttctgaatcttacttaaatcatgttgttccataaacacgcgcctctttctttctgccagcgcgggggcggtaaaatcgtctccggatcatcactgtatgtcgcctgtggtgattggcttctcttgataatgttatgataacaccttatctgtcagaaaacaattatagtaaaatgaaggatttctaaaaattctataacctagatccacttgtcccatcacgctttttatactatactgatatcatcaaatcgaaagaaggtactctcatgacaaaacaggaaatcagcgagatcaaaaagctgttcaccccgaaaaactgctccatcacaagaatctgtggatgctacgtggatggagagaaaaataagaagacggaattaaaacaggcgtttctggcactgccggaggaggaaatgttcaagtatttcgagattctgcggaagagtctgtccggcaccattggaaaaaatctgctgaatctggaattcccgttaaagagtgaaacggagggcggcacacaggaattcctgctgcgtctcagagacagccgtctgaaggacgatgcattgcttgagcagttctacgaccgtatcatcgaatcttatgaatatgtgggcaattatctgatcctgctgatccatgatgcctacgatgtaccgggacgcaccagagacggtatcgagatggaggatgcttccgatgaagtctatgactatatccttacctgcatctgccctgtggatctgtccaagccggggctaagctacaacgcagtggaaaacaccttccagaaccgtatccgggactgggtggtaggtatgccggacgctgctttcctgttccccgccttcaatgaccggagtaccgatctgcacagcactctgtactattccaaggatgcggaggaattaaaggagaacttcgtggatctgatgttaggctgtcctcttcctctgtccgcaggcggtcagaaggaaaccttccagtcactggtggaggagacgttaggcgatacctgtgatatcgagacggtgaaaaatatccacgagaaaatgaatgagattgcccaggaacataaagaagatcccgaacctgtggtattggataaaaatgaagtaaagaccatttttgccagcagcggtgtagccaatgaccgcatggaggtcttcgaccagtgtttcgatgccactgccggtgaagctacttccctcatgatgaccaacgtctacaatccccgcagctttgaggtaaagacaccagatgtggtcatcaaggtcaatcccgagcgcacggatctcgtcaacacgaagctgatcgacggcagacagtgcctcgtcatcgaactggacggtaatatcgaggtcaacggcattgccgtacgggctgccggaagcgaagcatctgataattccatagaagattaaaacatctttactatattcatgaagtcaggggcaaaaacccctgactttgttgcctacgaattgttccgtgctgcgcactcccgcttctccgctctgtttcggtccgtgctaagcatgtgggcttagaccttttgaccctggtatcatatacattgcattatgatgctctcgcacttaggatatccgatctgagagctgttcagggacaacgtataattatctgccatcccccatttctgatccgtataaaaattgtagtttgttctgcgccttttatctgtatcatttatcttttttactgcatcagcttcactgacattgtatagtttgcagatgcgctgtaccttttcctccatattaccgtgtatgaaaacattcagtacatcatctctgctttttaagataaaatccgcatttcttcctatgatcacacagctttccttttcagcaatttccaggatcacttttctttgtgcctcatacactatgtcctcaatcgatttcccggtaatgtcacgtcctgtaaaggcataggcaaacatgcctttcttaggagataactctgcattttcctgaatgtatttcggtgaaagtcccgactgttctgcgatctgtcctatgatatccttatcataataagcaataccaagtttttgggccacttcttcaccgataaaacggcctccgcttccaaactctctgctgattgtaatgatcctttttgtcatagttgcttcctccttaacctaagctttctactttgttcctttcgattttctttaaaa

SEQ ID NO: 204 - DNA, 13628 bp, unidentified
  source 1..13628: mol_type = unassigned DNA
gtctgtctgtctgtctgtctgtctgtctgtctgtctgtctgtctgtctgtcatgattgtccccctctgccttttattgtcaagctttttatttattgcacactttcttcgccttatcaattacttgggtcactatttccagaactaaaggctcatgcgcaatgagaagaaccagaccatagcttccgaaaaacaaaattgccgacaaaagcagcacaaagaaactattccagcccagcatttttacccataccgaagcaacacagccaatcaccagcgctaataacatttgtggatattgaattttcttatacgctggtataatgtcttgctttaatgcaccaaactgtacaacccacactacaatttccgccgcaagcgttccaatcgcagcaccaacagaagcatatcttggaatcaaagcaaaattcacgatcaaatcaaccacggctccggcgatttctgaataaagtacgattttctcttttccaagcggcacaagcatttggatgcccatgacattggttagcccaataaacaagagcgttggcataataacctgcatcggaagaattgatttttcataggcactgccggacagaaagaaaatgccttcttttgcaaaaatcataaaatagagcatcatcggcaacgcaatcagaaacacaaaattgattgctttgtgagctatccgataaaactcatcaatcatcttatgctcgatataatacgaagctcttggaagaagaactacaccaagcgaagtcactatactgacgagaatcgttttaatttttacagctgcattataataaccaacatccgcatctgttgtcataaagccgagcatgaccgtatccaaatgcgtgtaaattgtcgtagcacaggacattgcaaagaaaaccgcaatcggcttaaagtgtcgcttaaaatggtattttcctaccggtcgcatatcaatgaacttgtgcgcattgataaagttaaaaatattggaaccagaagcggcaagtatcgtaattgcaccataaaaaatgtaatccgatttttgatgcacaaaaacaaacattacaataagtgcaacaaatttgaagataatggaacgaatcgtaatataggtatactgttccaacgccttgtacatccactccataccaatcacattaaatgcaatcgtaaggcttacgataatatataaggctctttcttctctcaatcttggaacaagcattaaagcaaccgctaatgctgtatacgaaataacactcatcacaaaattgataatcaccaattcctgtgtcgttctggtcaattcttctttatcatctcgcacctttgcacaagcgcggatgccgtatgtagggatgcctaactgtgcaaacatcgaaaaataggaaatcaatgatgttgcaaatgaaacctttccagttccttccggcagcaaaattctggaaacatacggaaatgttatcagtggaaaaatgaatgacgacattgttaatagcgcattcattataaaattcagtttcaatgatttttgtttacgcatagagtcaccttttgaggattagtcccaataaaattgatatggaactgttgctgcataattcaacagcacataagctctgtaccatgttgcgaataatatagcaatcaaaatccatgcccaaatgtttttagatttttccgaatagcaagtatatgtattacttaatcctatcatttgcaatggaataaagaaataacttgacctcgaaatatattctgcaaacaaaggacctaatactgtaaacataaagacgacgccagatgcaaatatataaaatagcccttgcatttttcttctatttaagtatctaaaatgcacaaccaatatcaacagatatgttgcctgtattaacgcaacaatcagtgaaattgatcttccttctgataaagttgaaaactgaccaccgctcaagtaattaagatagttttctctgaaaattcccatattaaccagaagccgaacaagattgttaattgttactgatatcgcaccaacaactgcaactgcaaacattcctttgagaaactgctttttttcacttgtgccaggtttatcttgtagaaacagatacatcggaaatatgccaaatcccaatatagccgatgaatgcatggcaaatgctattaccataaggacaaaatacggtttatattgtttatcaaacaaatatgtaactgccaatgtaacaaaactgaccgcaatcgtttgtctcataatattcagtgatacattgtacatactaaaataatacaacagcatcacaagccacactggtgttccatacagcttctcacatctgcaaaaagctatatacactaccgttactgcgatcaattcgtagacaaacaaactccagtgataatcatttgctactttggcaaccaaatatactattaaattaaatcctatatctgcatttccaagaattgattggtttttcaaaaaatcgattatgctatcactttgttttgctctttcaaaaaatgaaatagcatagctttttacatctactcctatgttttcagctctaagtccagcaagaatcgccggtagcaacaatcctattataatcaagagtttctgtatactcttattctttgttgttttagctaaataaatgcaaagcgtagacagtccaaacacaactagatatatcgccattcaattttccttcctttgcattgcttattgcaactacattatttttgcaaagacagttcattcgcaatatattcctcaaacttttttctctgagtaatagaatccaaggttccaaggaaaatcactttagctctgataaagtcacctttaagcaatttctgaagtgcaaccttaaaattgtgaatgaccaatttttttctttgcttctgacttacaaaaagcccctcattgatggttgtattacgataatactttcggaacatttccaatcgttttgtgtcgttttccatcataatatccaatttctttgcgttgaatctcttgtgcaaagctacgctagcacctacaaaataggccggcgcataatactttgatattctcatggtgtattccgaatcatcgccccatataaagtagtccttacaagggagtccgcacttcttgattgcatcatagggaatcaaaatggaaacaaaagtcgctcttgaaatctgaacgatgccctccgacagatatttataccagtgcggatatccattttttgcaggacgcatatcaatggcaggcacattcattggctcactatctggtccaataatcgagcttgccaaatatcctattttcccctcgattttagatcgggcagacatcagcttttctaagcaatctgtatacggaatcgtatcatcatccataatccagacgtaatcacattccatatctctgcaaatcttaattccctcgaaaaacccacctgcaccgccaaggttggtttccattctgcgataatctattacgtctttgtcatactctccgccttttataaacaaatcggcggttccatccgtgcttgcgttatcaattaaaacaatcttatgtactttatatgtctgagacaaaactgcattcaagcattctttcagcagtttgattctattataagtaactataaccgcaataactttttccatcgtttacgcaatcctcatttctcttctaccaactttttcacaaccgtagcaggtactccacacgctacacacgctgccggaacatctttcagaaccactgctcctgctcctacgattgcattgtctcctatctctaccccccccactattactgcattagctcctatctgaacgttatttccaatagtaggaacaccactctgtccttttccgccaataacgacattcgcttgaattctggcattctcaccaattaccgcattctcatggataaccacaccgattgcacgatgcggaaaatacgcatttttaccgatttttgcagtaaatggaatatcacatgcaggaaaaaagattctgcttacaagcttcaaaacagccgggagcaccggaacgtgatgttgaaccagccaatttccatatttataaatcgaataataattcttcaacattttatacctcaaatcatcttagaacgtaccatcttttctttttactataaatctaccaaatgccttcagaagaattatattttttccaactctgtacggctttgctgccactatttcaaaatagcacttaatcgcttcacccacctgtttcgattgaatgtacagtctcagttcatattctctacgcgaaacaagtacatctttatcggttgtcaatatatctttctgcttttcatcgagacggtgcaatgcgtccaatctcttcatcgtgtttccagtaatgcgctctcccttatggatataataatgaatgagcgaatcctcggtatagtctatatcataaattttgcttatacgaagccatgtatcccaatcctgtgacgctaccattttagggtcaaatcccccaaccttctcaagtgcttcgcttttcagcagaggaaatgaacaggagcctataaaattatcgcacgagagctgcttatatacagatcccctatacggtgtatgtcgatcaaatacgcatctggtgcctccatctccttcatgaatggtcgcattgcaataaaccagtccgatattatttttggactttctaaacacatccaactgcttttcgattttatctttcacccattcatcatcgtcatcaagaaaagcgatatacttgccgttgctattagagaatcctgtatttcgagctgcacaagcacccatatttttttcatgctgaatatatttaaccctggaatccgatatattttcgcagtaattttttacttcatctcgatattcatattcatttgggctatcatccacgataatcagttccaaattctcatgggactgattcaacacactatcaatagctgctttaatttgagacacacgacgtttatatgttgtaataacaacacttaccaattctttttccattctattctccagatgtattactttgtttgaagcacaccatcgtacaactccaccaatgaatttttctttgttgcaatttcaaacccagccttggttgcacaatccttaaattcatctctttgcaaatgaggagtttcgcatatacgttgcgcccatacttttggcgattcattcaagctgatataattcatattaggacttatattcacgtccttcggcacatttgttgagctaaaacatggaagccctgctatttgtgcttcaacaaacaccaagccaagcccctcaaatttcgatggcatcaataatacgtccattgcggaatacaatttattcacatcatttcgtgagccaagcaatacgactttatcctcaattttgttcttctttatggtattgagaacaagaggctttagttcaccatcacctgcccaaatcatcattgccgcaggattcaattttgctatctccgaaaatacgcttattataaatgccggatttttcggttctgacattcttcccactacaccaactacaaatttattttctatttcaagactctttcggagttgcattcttgcatcaggatcaaagtgatattgcgaggtattcatcgcatttgttataatcgcaaatggtttatttccgaacactgattttcccgcggattccgaacaagccacatactcatttgcatctgctacgcaagccgtgtcatacagtaatgatcttattctcgctttcatagaggatgtttctctcggagcatgggtatgatatatccgtctactcattcccatactttttgcagcgtgcaaggacattacagcatttaacccgctgatattaacgtgcagtatatcataccccttattcaataccgttttgatgtaacgataatttgaaacattgggttttcctgtgtcatgcggaagtaggtaaatcttgctattatgtttttttacagtatctacaaatggagagtctatatttctattcagcagaaaatcaatcgtgtacccttgttctactgtgtattcgtaatatttcataatgcaggaagcaatcccactccctacgcgcaaatccctcatttgaatgagaatctttttctcctgcatccagtttcctccaaaaactattttttcaaacgcgcaccgctcaacctttttagcgactgccttccattaaccaaaatccttagaatgccatatgctctctttttcaaaaagaaaacaaaaattctttggctttgcgtgagcgttgttctatcaacttttttcagtgcaacattatatgggtatttatctaacgtctgatttaattgctcgtttacaagtttccgactcattttattttccgggtggaaataaaatagtctcatacaagaatataaccgcgttagtactcttgcatagtatgctttccaatactcttctggcaacgaaaactttttgattattctttcatagttttcaaaagccacttcgttataatactgagctttttcattgaatctatttgttacggattcttgcaaatatcggtaatgatataatgcactatggatataataaaatttatccgtcaactgtaaacactcggcattaaaaattacatcctgtccttttctcgcctttgggtcaaaccacatctcgttatctttcaacaaggacgcacgatacattttattccaaatcgtatttgtttcgtattcatacgctcttccgttgactgataagaaattaaaaggagcaattttcagattatgtacccattctttgtctaaaactccgctactgtcttttagatatttaacatttgactttccatcaaattcctgaacataatcaaaccagaatatatcgaaatcattatactttttttgtgcgttatacaatgttgacacatgatttgattcaacccagtcatctggatcaacgaatgttatccattctgttgaagctgcttttattccagcatttcttgcgactgacacgcctgcattttcctgatgaataacgataacacgctcatctttctgcgcatattcatcacaaatatcaccactttgatctggcgatccatcatctacggctataatctggaaatccttcatatcctgcgctaatagactgtcaaagcattctcgcagatagctttcctttattttatatatgggtattataatacttaaaaaaggtgtcatatacttacctttcgtactttcgattgattacatcattatagaaagcaatgtattttttcttcattacatccgtgttataaatttcaagtacatcttgatatgcacgttctggaagttttgaagggaagtctttcattgctacctttatgcgttccgcatattcttcagccgtattgcatacatatccgttgacaccatcgtgaataacgcttttattacccatcgtgttactaacaagaatcaactttttgatatacatattctcaatcaagctcattgcaatagcttcaccaaggctacacaaaatgaacgcatctgcgcctttggccatagccaaagcttccttccggggtttccatccggtcacttcgatgtttggagcagtcagttcattttcaagttcaccgttaccaatccaaataaattgcgcctctggaaccagttccgcaattttgttaaaaagctgtggctgtttctgaacgcaagctcttcccaaggtaaacaccgtaaacttatcattttttacaggctcaattccatcaagagatgccgaaaggtctgcgagattgactcctgtttcaacataagccgttctcctagagaacttctttgcttcctcatcctcactctcacagcaagtaagtgtaagtgccttgtttcccagcactttttcagcaaatttatagattttgctctttttacccggccccataagaatatgtgcatacccatgaggtgtataaacaacagtgttatttttacccttgtatgcaagtcgtcctaaaccacctgcaacagaagaatgcagatgaattacatctggttgcacatctttttcaatttgacgtaattctttaatagctgcaatatcactttttaagttggtcaatcctttaacaccaacattttccatttcaatcaaatgtactctttgatctaaaaaatccgtatagtttttgggtgtctgtggtctaagcgaatatgcaaggtaaacatcaaactcatctaccatgtcattgcaaagctgagaaacgtatgtaaatacacctccaccaaaggcctcacagaccatcagtattcttttctttttcattacgcttctcccaactcacttgcacatttatccaatacagcggcaatgacctgatccatgtcatagtacttatattcacccaagcgaccgccaaaaatcactttgccctctgcatctgccaacttcttgtactcagaatacagcaagctattcttggcatcattgaccggataatacggttcatcacccggtttccactcactgctatattcacggctgataatggttttaggcagatcattgccgttctcatccttgccaaactcaaaccacttatgctcgatgattcgcgtccaaggtgtttcacgatctgtgtagttgactgcagcattgccttggaaactgggcttatcgagaatctcattttcaaagcggacagagcggtactccagtgtgcccaacctatagtcaaagtaggcgtcgatggggccggtgtagacaaccttgtcggccagtgcatccagctcaaccttgttttccagatagtcagtattcaggcgcacctcgataccatccagcaagttggcaatcatcttggtgtagccaccaataggaatgccctgatacagcgcattgaaatagttgttgtcaaaggtcaagcgcacgggcaggcgcttgatgatgaaagcagggagatccttgcagtcacgcccccactgcttctcggtgtaacccttgatgagcttctcatagatgtcacgacccacgagagagatagcctgctcctccagatttttcggctcaccagtgatttccttgcgctgctcctcaatttttgcagcggcttcctccggtgtcacaacgccccacatcttgttgaaggtatacatattaaaaggcaacgaatacaattcacccttataattagcgaccggagaatttgtaaatcggttgaactcggcaaactgggtgatgtagttccagacttttttattgttggtatggaagatatgcgcaccgtacttatggacattgataccctcaatattctctgtgtaaatattgccagcaatgttgggacgcttatctacaaccagaacagattttccatgcgctttagcttcatgtgcaaaaatggcaccatacaggccggagccaactaccaaataatcgtacatcataattttcccttccccccacttgcttttttcaattagtctctctggaaaatatctcttgtgtaaactttctctttcacatcgtccaggcacttgtcataacggtttgcaatgatagcgttgctcatttccttgaacttcgccaagtcattgacaactacggaaccaaaaaatgtttcgccatccttcaaagtcggttcatagataatgaccgttgctccctttgccttcacacgcttcataacaccctgaatagaactctgacggaaattgtccgagttagacttcatggtcaagcggtaaacgccaatcgtgacagatttctccttgtcctcgtcaaattcgttctctgcatcatatccatagtagccagccagcttcagaacgcggtctgcaataaagtccttacgagtacgattggattccacgattgcttcaatcaggttctccggcacatcggcatagtttgccagcagttgcttggtgtccttgggcagacaatacccgccgtagccgaaggacggattgttgtaatggctaccgatacgcggatcaaggcagacaccatcaatgatctgctgggtgttcagccctttgctttctgcgtaagtgtccagctcattgaagtaagcaacgcgcagagccagataggtattggcgaacagcttgaccgcctcggcctcagtaaagcccatgaacagggtatcaatgttctccttgatcgcaccttcctggagcagaccagcaaactcatgtgcggcttctaccaatctttcgtcagccaaatcggtgccgacaatgatgcggctcggatagaggttatcgtaaagagccttagattcacgcaggaattccggactgaaaatgatattcttgctgttgaacttttctcttacacttgccgtatagcccacaggaatcgtggacttgataaccataatggcgtttgggttatattccatgaccaacttgattacagcttcaaccgcagacgtatcaaagtgctgggtcttgctgtcatagttagtaggagccgcaatcacaacaaaatccgcatcgctatatgctgcctttgcatccagcgttgcggtcaaattcaagtccttttctgccaagtatttttcaatataatcatcttgaatcggagatttcttgttattgatcatatcgaccttagcctgcacaatatcgactgcaactacctgatgatgctggctcagaagcactcccagcgaaagccctacgtatcccgtgccagctacagcgattttataatttctcatagttctattctccttcactattttttgattttataaaaaacaaacaagcccacggcggattactcaatggcaatccaccgtaggctcgattcgttctccttaatattttacttgctgctcattttgtgggtcaaaacagagctgcaccaaagcctcccacctataacctctggatttcagcttctccgcagcctgtcagcaaataaatacttttgttggacgagtcgagccgttgaaaccctttatttatcgtggtttttcttggttgaccctattatatctctagcccccttcttctcaatagtcggaacaaccttttgacggatgccatcatattcaattgttttgtcatactctgcaccgcttacatgatggcctgctctattgtagcaagttatatcacaaccattctgtgccattcgggtgcataactcttttacaacaatctctatcccgccttcacgcgaaagacgtttctgcccgaaaaccgcaagtctgattttttcttccattacttctctccaaccgtcattccatagtttctattcttgtcctaggcttatacacaatcccagcagttcttttccttaaattgtcatgctcgtctttcactattcacctttcctacttcatagcacaacaacaagcctgtatacagattgcagcaacaatctatacgcaggcttgtcctcgtacctccttattctgttttctgctctatcagctttcgctgtggtgggttaagtatagagcgcaaccagaagccattaacccccgaaatcacgccggaacgcaacacaccatggtaaacagaaacaagttaaggtaaaaaaggtcaagccgcgcaaacccgcatgaaatcaggattttttctggttactaacattatttcacaggttccatggacggtaactacaactcttttaccaaacatcttcggcagccatgtaaagaagaccggcccctctgcatcgggtactcaacaacagttttacgaagcaggtgataaactcatggattctcattgttttctcttgtttttcgccatctcctcaaaacttctgaaaaagctgtgccaattttgtgccgcaggggccaaaagttcggcgttttagttcatataactgtaaaacacgaccggttttagtgccccatatagtgtgcaaaacaggttctttttgatgatgctacgtcagtatggtttatcgaccacacatttccctcttccttatctccaacagcactccggtcaaaatcaccagcgagcaaagcagggtcagccaccagttttcggtaaagccggcgatcaggtagccaacagcacacacggcaatgaccacaaaggcgtactgcatctgggtttgcacatggttgatatggttggactgggcaccggagctggacatgatggtagtatcagaaataggcgaaatatggtcaccgcagacagcaccagccaggacagccgctacagaaatgatcatcatggtcgggtccagttcagcaaacatgttgaccacgatgggcacaaaaatagcaaaggtgccccagctggtgccggaagaaaaggcaataaaaattgcaatgcagaagatgaccagcggcacaaagttcatcaggctggaattcagattgatggccgaacgtacaaaggtaccgatacccagggcgtccgtcatacctttcagagtccaggccagcactaaaatcaggatggcgggcatcataagcttgccaccttcgggaacggaattcataaaatccttgaagccgatgacacggcgcggcagatacagaagcagcaggaatcccactgtgaccaaaccggcaaacaccaacgcttccgaagaagaacagttggcaaaatcctccaccagattctggccgccgttcaggtggccggtccagatcatagctgcgattgccgttgcaatcatgacgaccatgggcgcaatcagatcgatgaccttgcctttggcgtatttgccgccctcggtcgggtcttttgtttcctggttctggaactcttccccgccggaggtgaacagatcacctttggccgcgttctcttcatgctttttcatcaggccgaaatcgaagcctacaatggaggtgaagaacaccatatacagggttaaaattgcatagaggttgaacggaatggttttaacgaacatctcaaaaccggacatggagctgcccgccggaacgtaagagttgacggctgccgcccaggaagaaatcggcgcaatgatgcagactggcgcggcggttgcatcaatgatatacgccagcttggcgcgggaaaccttgtacttatctgtgacagggcgcatgacagagccaaccgtcaggcagttgaagtagtcatccacaaaaatcagcgcaccgagcagagaggtcgttaccaaagcggagcgcttacttttcaggtggctggaggcccactcaccgtaagcgcgggtgccgccggattcctgcatgagcataacgatcatgcccaaaaggatcatgaacatcagaatggaaaaatccacactatcgatcattgtgttaaacagcgtatcaaacgcaatccacgggtggaattctgccgccaacagtgcgccaagggcacaccccgcaaacaatgacaaatacacttctttggtcagcagtgccagcgcaatcgccacaatgggcggcatcagtgaccaccatgttcctacaaacatcctttattcttcctttcctcttttgatctaatcgaagttattttaacatattgtccatgccgattcaatacgtaaaaaataatatatcctagggcaataccgcataattctaagtgccgatacggcgagcgaggtgcggcagc

SEQ ID NO: 205 - DNA, 8873 bp, unidentified
  source 1..8873: mol_type = unassigned DNA
ccgcagccgccgaagcggtgcttaagccgctaggcgggaattatgcggtattgccttagtctatttctacaaacacggccggattttgcgttaaaaagccttaaattctgcttgtgtttgcgaaatatccgtcattttctttgttttctgatacaccttaaggaggaaaacgcatggaacttaaaaaggcagccactgtcggcacgctggaatacggacccgctgcgtttgaaaaaactgaccgctgaacgggaagacgctgtcccgatggcccacctgtttgatatggattattgattttggcgagattgttcttttgtaatgtcctgtatggctggcatccatctgttcaaaaggtccaagagttaccaacagaataatcatataaacacaaaatgcgaaccacgttgtacgaagtggttcgcattttgttatcataatgtatattttatttcggcagctgaatttccggcatcagttcatcggatacgatctgcagcatttcttccagcttggccaggtcatcggggctgaaccgctgtttggcacgctccatgaccagatgcaggtaagaatagctgatgttatagtaatcaatgtacttttgggtcggccgcaggcggtattcccgcttatcggtggtggattggatgcgctccacatagccttttttgaccagggagttgatcttataagctgcgttgggggtggaaagattcatcatgtggctgaactgcgcaatcgtgggttcccccagtgccatgatgacttccatgcagaaagattctaccgtcgtcagcgtggcttcacggtcttcaaaacggctgaagatctgtttataaaaatgcagcttgaattttgtgtatacctgcccgaatgtctgatccagcatggcgagaatccccctgtaggttaatgaatttattatagcacaatccaccatgcaaaaccagccctcaggcatccgtgataacaaatgtcagctcggcgttggccgcgcgcacaccatccacccaggcggtggctttgccgatgcccaccgggccatgctgctctaccagctcacattccaaagtcagcacatcgccgggcacaacctggcggcggaaacgggcattttttaccccgccaaacagggcaatttttccacggttttccggcaggctcaacgcggccaccgcgccggtttgggcaagggcttccagaatcaatacccccggcataaccggatggccggggaaatgtccctggaaaaacgactctgtgcgggtcacgcacttgattccgcgcgcccactggccgggggtatagtcaagaatcttatccaccagagcaaacgggtaacggtgcggcaggatcttttcgatttccgccgccgtcagggtccggggcggttcattgggtgtatagttcatcctcattcctcccaacgcttgaacaccacacaggcgttgtggccgccgaagcccaggctgtcgctcatggcataatccacctgtaacgcgcggccctggttgggaatatagtcgagatccagttccgggtccggctcctgcaggttgacggtagcgggcaaaaaggcatcgtgcagggccagcacggtaaacacgccctctaccccgccggcgccgcctagcaggtggccggtcatcgacttggtcgaggatacggccagcttatacgcgtggctgccaaaaaccgacttgatggccgcggtctcacagctgtcattcagatgcgtggaagttccatgggcattgatgtagccaatctgttccggctccactccgccatcagccaatgccagccgcatacaggacgcgccgcctgcaccgcccggtgccggggcggtaaaatggtaagcatcgcagttagcgccatagcccacaacctcggcgtaaatcttagcgccacgctctttagcggtctccagttcttccaacagcagcacaccgctgccctcgcccatcacaaaaccgctgcgccgggcatcaaaggggatcgaggcccgggccgggtcgtctgcggtgcagagggctttcatgctggcgaagccgcccacccccaacggactgatgcagctttcgctgccgccgcagagcatacggtcctcgtatccatcgcggatacggtggaacgcatccccaatcgcattggtaccgcctgcgcaggcagtggtggggcagctgcacataccctgcaggccaaagcggatagccacctgccccgccgccatattgccgatggacatggggacaaagtaggggctgaccttttcaaagccccgctgctggccgcgggtgtgttcttcctcgatcgtgggcagaccaccgatcccgctggacaggatcacgccgaaccgtgtgtggtcgatattttccagtgcaataccgctgtcgtggatggcttcgtcagcggcggccacggcaaactgggtaaaccgcgccattttgcgggcttcgcgccggtcaatacgttcggcagggtcaaaatctttgacttctgcggccagtttcaccttaaaatccgttgtatcaaaagccgtgatcggcccaacggcgcagcggccagctttcacggcggcccagctttccgccacggtattgccggttgggtttaccgtgccaaggccggtgataacgacccggcgtttcttttctatcttcatagctgcacctcacattcccattccgccgtcaacacaaagaacctgcccggtgatgtaaccggcctgttccccggccaggaaagccaccgccgcggcaacatcttcagcacggccgattctgcctgccgggatggccgctgcggctgcggcgcgggcagattccggcatagcggcggtcatatcggtttcaataaatccaggtgccaccgcattggcggtaatattgcgtgcggcgtactctttggcaacgcttttcgttaggccgatcagccccgccttgctggcggcatagttggcctggcccgcgttcccgtgcaggccgaccacactgctgatattgatgatacgcccataccgctggcgcatcatcaagcgggaagctgctttggtgcagaaaaacgtccccttcaggttggtaaaaagcacattgtcaaagtcggattcggtcatgcgcatcagcagtttatccgcggtgatgcccgcattgttgaccagcacatcgatccgcccaaaagcggcagcggtatcttccaccagattttggcaggcttcggggctgcgcacatccgcttgcagcgtgatggcctgcacaccaaaggcgcggcaggcagccgctgtttcctcggccgcggctgcgctgcctgcgtagttgactgcaatgttcatgccgttttcggccaatgcaaggcagacggcacgaccaatgcccttggcgccgcccgtaaccagagcggcacggcgcatgctttcagtttgcggcatggtcaggctcctttcatagtgcaaagcaactgctgcagctgtgcagcagtttccaccggatagcacgagatagcatttcccaccgtctttttcacaaatccggtcaacaccctgccggggccgatctcaatggcggtatccacccccagttccgccaaacggcggacggtggcttcccaacgtacgccgtactgcacctgtttttccagcagcgtggcgaccgtgtcattctctgccatttcatgcccaaggcagttgaacagcaccgggaactgcatcggcgcaaaatggatggattggaacttttcccgcagcgcatctccggcggggtgcatcagcagcgtatggaacgcaccgctgacgttcagcggcaggcagcgccgcgccccagcggcaagcgccaggtcggcagctttgtctacagcagctttctcgccgccgataaccagctggccgggacagttgtaattgcagatctgtacaacgccctcttcggcggctgcgctgcaacatgcctgcaaggatgtttcatccaatcccaaaacggctgtcatcccacaggtgcgtccggcagcggcagcagccatcgctttgccacggaaagccgttaaagcgaccgctgtctgcatatcgaacacccccgcacaggccaaagcggaatactcccccagggacaggcccgccgcataatccggcataatgccctgctcccgcagcacagcggtaagaccggcggcaaaagctgtcatacaaggctgggtgtattgcgtttccttcagtacgcccgccgcgtcggtaaagcagacttctttcaaatcaaaatccactgctgcggcagcttcatcaaaggcggcgcggaaggcaggaaaggtttcataaaggtcctggcccataccggcatgctgactgccctgcccagcgtataaaaatgctagtttcatcagatggtctccttgtacaaccccgtgatgcaggtctttgcctcgcttaccattgcggcaaaaatctcttctaccgggcggacttcatgcagcagccccgcggcctgtccggccatcaggcttccgttttctgtgtcgccgtcaaacacagccttgcgcagactgccaagcgtaaagcgttccagcgccattttgtcggccccggctttttcctgccggacatactcgcggctcattcggtttttcaacacacgcaccggggtgccgccgatccgcccggtcacaatggtatcgctgtcgcgggctttcagcagcgctgccttgtagttttcgtggatggggcactcggtgctggccagcagacaggtgccgacctgcacaccgcaggcccccagcgccagcgctgcggccaaaccgcgcccgtcagcaatgccgcccgcggcaatgaccggcacgtggacggcatcagcgacctgcggcaccagcgccattgtggtcatttcccccacatggccaccgctctctgtcccctcagcaatgacagcgtcaatgccaagcggttccaggtgtttggctaagattgcggcagctaccaccgggataaccgtgatgccggctgctttccacattgccatgtactttcccggatttcctgccccggtggtgacgatctttacgccttcttccaccacgattttggcaaattcatctgcctgcgggtgcatcagcatgatgttgacaccaaaaggctggtcggtcagcgcacggcagtggcggatgttttccctcagggcatcggcatccataccgccggaaccgatcaggcccagcgccccggcgttagagcaggcagcggcaaattcgcccgtggcgatattggccattccaccttggataatgggatatttcgtacctaaaatttcattgagcagcttcattttctaccctcatacgtcagcagcattccgccccaggtcagcccgccgccaaaaccgatgcaggccagggtctggccggggtgcagtaaatcattttccaccatttcatgcagggcaatgggaatgctggcagcactggtatttccatggcggtccatatttttataaaattttgacggttctgcgtgcaagtgtttgatacaatggtcaataatgcggctattggcctgatggcagacgacccaatccaggtcagccaaggtcttttggctgcgctccaacacggtttgcaggcaacgcggcatggtttccaccgcaaaacgaaagaccgccttgccatccatcgtgatcggggccgtatcgcaggctgcggggccgccgacacggatggcttcgctcccccgcgcgcccaacgtgacggcaaacggcacatcttcggccagttccagaatagccgcaccagcgccatccccaaacagtacgcaggttgtgcggtcggtcgggtccaccatgcgggacagcgcttcgcagccgatgaccaacgcatagcgtccgccaagggtgttcaacagcccgtgggccgcagcaatagcataaataaaaccggaacaagctgcatttacatcaaaagcgggccggttctccggcagccccaaggccgcttgcacacggcaggcaacactgggggtagccgttggagccgaaagcgttgccgcaacgcagcaggcaatctcgcttgctgccagcccgctacgcgccagggcctggcgggcggcggcaatggccagcgtggcggcatcctcactttcggtgcagtaataccgctggcggatgccggtgcgggtcgtgatccattcatcgctggtgtccacctgtcggctcaaatcctcattcgtcactacacggccgggcagtgccccgccggtggccagcagctgtaagcctttcatgctcccctcatttctccgatacggcggtattttttgtatctctggtcggccaatgcctttccgctcatcttgcacaaggcggcaaggtgcgcggcaatggcggtatccaaccggctgaaaagcagctgccgcccgcgctgtgcaccgcccagcggttcggcgatgatctcttccacaattccatccgtatacaagtcctgcgccgtcagtttcatcatggtacaggcttcgccgctgcgggaggcatctttccacaaaatgctggcaaatccttcggggctcaacaccgaatacacggcgttttccagcatcagaatatggttggcaacgccaagccccagtgcgccgccgctggagccttcgcccgtaacgatggccagtaccgggacggtcagaccgctcatctccatcaggttgcgggcgatggcctccccctggccgcgctcctcggcatccttaccggggtaagcaccgggggtatcaataaatgtgatgatgggccgcctgaatttttccgcctgcttcatcacgcgtagcgccttgcggtagccttccggtcccggcatgccaaagttgcagcgcaggttttcttccagcgtcgttcctttgcggtgccccaaaaccgtaacgggcatcccatggaatcgcgcgataccgcacaaaatggccgcgtcctccttgcattgccggtcaccgcactgctcaaaaaagtcggtaaacaggttgtcgatgatttctccgatatgcgggcggtcagggcggcgcgccagaaaaactctgtcctccggcgtcagtgatgtgcagcgctgcaaaagcatgttttcctgcgcggaaagctctgccagctcagcggcatgggtagtcgtattcgccatttcggcatcatcggtgctgctacacaatgcatcaatctgcgcgtccagcggttccagctgctgcaaaacctctttgatcatctgcatttcctcccctgtgtatggagctgcaaaatccgcgtcaaaacctcttttaattcagtgcgcggcacaacctgatccacaaagccgtgttccagctggaactcactgcgctggaaaccatcgggcagcttttctccgatggtctgttcaatcacacgcggcccggcaaacccgatcagcgcacccggttcggccagcgtgatgtctcccaggctggcaaaactggctgtgacaccgccggtggtggggtgggtcagcacactgacatacagcccgccgctgcggctgaaccgttccagcgcggcactggtttttgccatttgcatcaggctgaaaatgccctcctgcatccgcgctccaccgctggcagaaaaaataaccagcggaagccgtttatcagcagcatattcgattgcacgggtgattttctcccccacggcagtgctcatgctgcccataaaaaaccggctgtccagcacagctgccaccgcctgcacgcccccgatcctgccggttgcggtgacggcagcttctttcaggcccgttttgaccgaagcagcggccaacttttcctgataatcgggaaaatgcagcacatcgttgggggcaaggtctggattcagttccttaaaggttccgtggtccaaaatcgtgctgagccggtaataggctccaatgggcagatgtaccccgcaattggggcatacatacaggcttttggtccagacctggcgggtggcgcggcggccgcattttttacattcaacaaattgcggctgcacccagccgggcgcagccgtaccagcatcgcggcggactttcagctggaagctgcgctcctgctggctgaccggaaacaacttttcaatggcattcatccctaataccctttaggctgcccgcgcaaccagatagttgaagatatcacccacagtcttgagcgttcccaagtcctcatcggcaatcgtgatgccaaacttgtcctcaaacgccatgttcagctccaccgcgtccaggctatccgcctgcaggtcctcggtcaggctggcttccatcgtaactttgtctgcatcgcagttcagggtatcaacaaatacttctttcagttcttcaaagctcatgatttatacctcgtaattatttatctaaaaatattgactcaattgtcaacaaggctattatatcacatttgtcttgtatgtcaatattgttaggtaaaaatatttatctaattatgctgatctcttattctctctaccagaagcgaacatcatgcaaaaattcgcacagcatcatcccctgcagcgctgccattgctgctgacaggtagacgcaatgcaatactttgggtgagggcactcccccgctccgtctattgacaattccgccacctatagataaaaacgcctgcaaactcaggcgtaaatccgcctttatttgcaagcgttgaaaaaagtatttggggaatttcctcttagtgattgggatgatatttaaagtgttgactgctcttgtgccggattggcttttattgtataataatgtgactaatttcaagcattggtttgctttcgtatgcggcacagcatttgaaattgaaatttaggcaataccgcataattctaagtgccgatacggcgagcgaggtgcggcag

SEQ ID NO: 206 - DNA, 6539 bp, unidentified
  source 1..6539: mol_type = unassigned DNA
gcaggctttagagaagtctgcggaatggagtacgatatgaaaatcctgttggtaattgaccagttcgatcagggaaataacggaacaacgatcagtgcgcgtcggtttgcccaggcgctggcggcggatggcaacgaggttcgggttgcagcggcgggaaagcctgcgagaggcaaatatccgatgccggagatccattttctgccggttgcggattctattatcagaagtcagggcatggtgtttgcaaaaccgaaccgcagcgtactggaacaggcgattgcatgggcggacgtggtgcattttatgatgccctttgcgctttcccgtgtcggactgcggattgcaaaggaaatgggcaaaccggtgacagcggcattccatgtgcagccggaaaacattacatcgacgattcatcttgggaaaaataaaaaggccaatgagcttttgtatgaatggttccgagatgatttttataatgaatttacgcatatccactgcccgagcccgtttatcgcggggcagttaaaggaacacggctatcaggcaaagcttcatattatatcgaacggtgtatcggatgaattttatccgcgcgtgcgtcaaaaggagccggagctggcgcataaattcgtcattttgatgattggacgttattcagaagaaaaacggcaggatgttttaatagaagcggtaaaacgatctgcacattcccacaggattcagctgattttggcaggacagggaccgaaggagcgcagcctgcgctggcagggaaggtcgctgcgctatcctccgatcatgggattttttgatacggagcgactgtgcgaactgatggcgatgagcgatttgtacgtccatgcggcggacgtcgaaatcgaggcgatcgcatgcctggaagcggttgcgtccgggctggttccggtcatcgcggattcgccgctttcagctacctcgcagtttgccctcgatcacaggagtttattcgaagcgggcaacgtagacgatctggcggagcggattgactggtggtatgagcatgcaacagcacggcatcaaatggcacgtgtctatgcggagagcgccaaccagtatcgtctgaaaaacagcattcggaaagcagagcagatgtttgcggaagagattgcggagaccttgggataaatggaatggaggcaacacagggatgattttggtgaaagaccgtacaggatcaaaaaacggcaccgcagacagcaccctggtcggagtgtttgactccaaacgtccgttgtaccggatcgtaaagtggctgatcctgcacatttttccgccggtgttccggctgttgtacggatttcgggtggtcggcaggataccggaggaaaagatgcagaacggctgtatcagcgtctgcaatcatgttcacaagctggactgcgtgatgctggcatgcgtgtttcaggattatacgatgcagtttttatcgttggaatctaatctccacattccggtcgcaggcgcgattgtgcgtctgatgggcggaatcggactgcctgcaaagctggacgggtggcgaccggttttaaaacgcataaaacaggggctggatgagggtcagatgctgcagatttacccggagggagagctgatcgatggctgtcggacgctccgggcgtttcagccgggcgcgtttcagatcacgtgttggttccggaagccgatgattccgtgcctgctgcggttttatccgcgtttttccaaaagcggcagacgaaaaagggacggaatggagctggttattttagagccggtggacattccgaccgataaaaagggcaagcgcgcggcaacagagctggaaacgcagatccgatgtcagatggaagcggcacggcttgcagttggtagagagggtgcatgaggattgtgcattctattgtttagatagagcaggaaaatcctgcggaaatggagcagaaagtgaaaattacctggcttggtacggcagcaattcgtctggaagcggacggtgagacagttttattcgacccgtttgtacagctggtcggtggggaaaatccgaactgtctggatgactttttacaggatcagacgatctgtgtgacccacgggcatctggatcatatgatggaggttccggaatttctggatccggaaagcgatgcggaggcgaccgtttactgcggagaagtggcggcagagacgctttccgatatggtggagaacaccagcaacgtagtaaaggtgagaccgggcgacgtgatccgactcggggacgtacggattcttgtaatggaaggaaagcatgcgaagcctggaaaaagtcaggtattccagaagctgttttcccgcagatttttgcagtatttcagaaatgcgctggcacttgcatatttgaatccgaaatttccggagggcggacagacgctgatgtacgaggtgcatgcggagggcaaacgcgtgcaggtgatgggaagtctcggactgcaggaggatcaggaatacccgcagggtgccgatcttctgattctgccgttccagggaagcgaatttctggatgcagtagcgctggaggtcgtagagcggctgcagcccaagcggattttgctggatcattttgacgacgcattcccgccggtatcggagcatgtcgatacgagacggtttaaaaagctgatggatgaggaatatccgcagatcaaggtcgtaaagccgacggcaggaaaaacggtggtgctgtaacgggattttataacgtatggagaaacaccagtgctaccggtttgcagtttgagatacagcatgatataataagtagaaagagcggcttttcgtgcagatatcactcaaatagccgtataacattttgacaggtctttgcaacatggaagaattgcagctgcgggggcttatgttacaataggagggaacaaatggaaaaaccgacattagtaattctggcagcaggaatgggaagccgttatggcggcttaaagcagatcgatcctgtagatgacaaggggaataagatcattgatttctcgatttatgatgcagtcagagcgggattcggcaaggtcgttttcatcattaaaagagagcatgagcaggatttcagagagtgcatcggcaatgcagtcagcaaacatattcctgtagagtatgtattccaggagctgacgaaggttccggaaggatttcagattccggaaggccgcgtaaagccctggggaaccgcacatgcaatcctgtgctgcaagggcgtagtgaatgagcctttcgcagtgatcaatgcagatgactattatggaagaagcgcttttgaagagctgtaccgtttcctgaccacacatcacgacgatgaaaaatatcgttacgcgatggttggctatcagctgggcaacactttgacagacaacggttccgttgcaagaggtatttgcgtaaccgacgaaaacggctatctgcaggagattgcagagcgcaccaagatcgtgaagaccgaggatggcgcggcatacacagaggatgatggtaagacctggattccggtaggattaaagactccggtttccatgaacatgtgggcattttctcccagcattatcaacgagctgcagaatgcagtagatcgtttctttgcagaagaagttgaaaagaatccgctcaagtccgagtgctttttgccgatcgaggtagataagctgttaaaggctggaaaagcaaccgttgaggtgcttcattctgctgacaaatggtttggcgttacctataaggaagacaaaccgtttgtgatggagtcgatccagaagttaaaggatgccggtgtttatcctgatgttctgtggtaaaacaataagaaaagtcagcaaaagaatggaggaaacgaaacatggcaattttagttacaggcggcgccggatttatcggcagtcataccgttattgaattacagaatgccggatatgatgtcgttgtagtagataatctggtaaattccagcgagaaatccctggaacgtgtagaaaagatcacaggaaagaaggttcctttttacaaagtggacattctcgacagagaaggcctgaatgaagtttttgcaaaagaaaaaatcgattcctgcattcatttcgcaggcttaaaggcagtcggtgaatccgtacagaagccctgggaatactatgaaaacaatattgcaggcactctgacactggttgatgtaatgcgcaagcacaatgtgaagaatatcatcttttcttcttctgcaaccgtgtacggcgatcctgcgatgatcccgatcaccgaggaatgcccgaagggacagtgcacaaacccctacggttggacaaaatccatgctggaacaggttctgacagatatccagaaagcagatccggaatggaacgttgttctgctgcgttatttcaacccgatcggtgctcacaagagcggtctgatcggtgaaaatcccaatggtattccgaacaatctgatgccttacatcacacaggttgcagtcggcaagctgaaagagctgggtgtttttggtgacgattacgacactccggacggaaccggcgtcagagactacattcatgtcgttgaccttgcaaaaggccatgtaaaagccctcaagaagctggaggatcattccggtctgaacatttacaacctgggaaccggacacggctacagcgtgctggatatcgtgaaaaacttcgaggctgctaccggcgtgaagatcccgtatgtgatcaagccccgccgtgcaggcgatatcgcaacctgctactccgatgcgagcaaggcagaaagagagcttggctggaaagcggaatacggcatcaaagagatgtgcgaggattcctggagatggcagtcgatgaatccgaacggatacgacgactgagaataaaagcagcagaacccgaaatagctaaggcaaagaaggaacaagaggcaaaaattagtagataatactgatttttgcctttttgaatatattttatcgcacatattaaaggaacgatagaatggtaaagtttacttgtaaatagccctatgataaaataattagaagtagtgttgggcacttgtaaaaggtaaaatatttataaggggtgtttatgaaattagaacaactgatcggtgaagcaaccgaatatgacaaaaaagcgatgctggagataaaaaagccgaaaagttggctgaaaagtgtaagtgcttttgctaatggcgttggtggtgtgctaatttttggcattgccgataatgattctgtggtgggagttgacgatgcaaagaaagctatggaagttattagtgagcagataaagacaaaaatggatccaattccagaagttctgctaaaagcacacgaaatagatggcaagaagattataacactggaggtatatcggggcgatgagactccttactattatgtaggagaaggtaattatacggcttttgttcgaatcggcaatgaaagtgtaattgcggctgcgatggatttaaagagactggttttacggggaaagaacagaacttatgatagtctcgttacggattataattttgatgattattctttttccaagttaaaggcagcatattataaacagacgaagaaaagtatggaaatcaaagattttgaatcatttggtattattgacaggaatggtatgttaacgaatgcaggagctttgtttgcggatgaatctcctgtttattgttcgagattattttgcaccagatggaatggtattgacaaagcatcaggagttattgatgcactggatgatgaagaatatacaggcagtcttatcctgcttttggaagagggcatgaattttgcgcgaagaaattcaaagaaaatgtggaaaaaagagtctgatcggagagtagaatatccggaatatccagagagaagtatttttgaaggattagtgaatggattagtacatcgtgattatttagatatgggaagcgaagttcatattgatatttttgatgaccgtttggaaatatattcccccggtggaatgtatgatgggacgcttattcaggacagggatattggtaacgttccatcaaagcgcagaaatccagtggttgcagatatttttagtcgacttgattatatggaacgaagaggaagcggttttaaaaagattatgcaggcatatgaagtagaaccgaactatacggaagacaaaaagcctgttttttattcaaatgcaacggaatttagagttatcctgaaaaatcttaactttaagaatgaagttttgaacgaaaaaaatgaagttttgaatgaagttttgaatgaggttttgaattctggcagaacagaaatggaaataaaagtaataaagaaaatactatattcgccaagaattaaacagaaagaattagcggaagatgtaggtgcttctgtaagtactgttcaacggattataaaaaaattagtgaaagaagaaaagatagttcgtatgaatggaaaacggaatgggtattggaaagtcttttag

SEQ ID NO: 207 - DNA, 13122 bp, unidentified
  source 1..13122: mol_type = unassigned DNA
atggagaaaagaggatggtcagaggcagactttgtatttgtcataggtgatgcctatgttgaccatccatcatttggtccggctatcataagcagattactggaaagatatggatataaagtgtgtataatagcccagcctgattggaaaaacgacaaaagcattgatgtttttggaaagccaagactgggttttttggtgtgcggaggaaacatggattctatggtcaaccactactccgtatcaaaaaagagaagacagaaagatgcatattcaccaggcggagaaatgggactcagacctgattatgcaacaaccgtgtattgtaatcttatcagaagaacatacaaggatgtaccgatcataataggtggtatcgaggccagcctcagaagaatggctcactatgattattggtctgacaaacttaaacattccatacttgtggattcctctgctgatattctgtcatatggaatgggcgaacacagtatgatagagatagctgaggctcttgacagtggcatcaatgtcagtgatatcacatatgtgaggggaacctgctataggaccaaggatatatcaggtgtttcggaggatgctatattgcttccggattatgacagccttacacgagacagactggagtacgccagaagcttttatacacagtatataaatacggatccatactctgcaaagacactagttgaagggtatggtaacagaggatatgtggtgcagaatccacctgcttacccacttacacagatggagatggatgatgtgtacgatcttccttacatgaataactatcatcccatatacgagtcaaaaggtgggattcctgcaatctcggagatcaaattcagtctgacgagcaatagaggctgttttggaggctgtagtttctgcgcacttacatttcatcagggaagaatcatccagactagaagtcatgaatccttgataagggaggctgagcagatgacgcacgatccagatttcaaagggtatatacatgatgtaggaggtccaacggcgaatttcagacataagtcatgtgcaaaacaggatagatatggcgtgtgtacaaataaacaatgccttttcccagaaccgtgtaggaatctgaaggttgatcacaaagattacattgaacttcttagaaaacttgaggctattcctggcgtgaaaaaggtgtttataagatcgggaatccgatttgattatgtaatggcagatagcagtgatgagtttttgaaagaactctgtgagaagcatataagtggacaactcagggttgccccagagcatgtgtcagacaatgttctgaagatgatgggaaaaccgaagaatagtgtatatgagagtttcatagccagataccagaaggtgaatgcgcgtacaggcaaaaaacagtttgtcgtgccttatctgatgtcgtcgcatcctggctctacgcttaaagaagcagtggagcttgcggagtatgtgcgggatatagggtatatgccggaacaggtacaggacttttatccaacaccatcgaccatttctacatgtatgtattatactggagtcgatccgcgtacgatgcagccggtatacgtgccgcataatccgcatgagaaagcaatgcagaaagcactcatgatgtatagaaagcctgagaattatgaccttgtaaaagaggcactcataaaagctggaagacaggatcttataggctttgataaaaaatgtctgataaggcctagaaaaatggaaaacagttcaggacatgaacatagaccttccaagggtagaaatcagagtagaaattgcgtatgttcgaataatacaaggaaaaataatacaaacaacaaaaattataaagaggcacctcaaaaaaacaaaaaaattaaagataatgtcagatctgtgggtgaaaacaaaaggcataaaagaaaataagcagtaaatggtgatattcatttttggttgcgtggtacatgcttttgtgctagaattatggcagattgtgtgaacctttagattgtcgtgtactgttttgggtgaacaacgtgaatatacaatatatggcgatcaaaaagatttattatatatgtagtcttatgtcacactaaaatttttaaacaatattttttaaaatggaggatttgaaaatggcaaagaagattgttttagcaggcgcatgtcgtacagctatcggaacaatgggtggatcactcagcacaacaccagctgcagagcttggttcaatcgttatcaaggaggctatcaacagagcaggagttcctgcagatcaggtagaccacgtatacatgggatgtgttatccaggctggtcagggacagaatgtagcacgtcaggcttcaataaaggctggacttccaatcgagacaactgctgttacagttaacgttgtctgtggttcaggtcttaactgtgtcaacatggctgcacagatgatcgaggcaggagatgctgatatcgtagttgcaggtggtatggagaatatgtctatggctccttatgctatgatgaagggccgtttcggttacagaatgaacaatggtgtacttgtggatacaatggtaaatgatgctctctgggatgcgttcaatgactatcacatgatcaagacagctgacaatatctgtgagcagtggggtcttacacgtgaggagattgatgagtttgcagcaaagagccagcagaaggctgttgcagctcaggagtcaggtgcatttgatgctgagatcgttccagttatggtaaagaagaagaaagagatggttgagttcaagaaggatgagggaccaagacctggtactacagttgagacactttcaagactcagaacaatcaatcctaacggatttgttacagctggtaacgcttcaggtatcaatgatggtgcagcagctatcgttgttatgagtgaggagaaggctaaggagcttggcgttaagcctatggctacatgggtagctggagcacttggcggagttgatccttcaatcatgggtattggacctgtagcttcaaccaagaaggttatggctaagactggtctcaagattgaggacttcgatgttatcgaggcaaacgaagcatttgctgcacagtcagtagcagttgctaaggagcttggatttgatgttgacaagcaggttaaccctaacggtggtgctatcgctcttggacatccagttggagcttcaggatgtcgtatccttgttacacttcttcatgagatgcaggcaaagggtgctaagacaggtcttgctactctctgtatcggtggtggaatgggttgctcaacagtcgttaagatcgaggactaattcaaagcgatatatataattcaaaacggagctgactacattccatgcagccagcttctgtaaatcagtataaaaaggagatacatcatggagtttgtaacatacgaacaggatggatacgtaggaattatcacaatcaaccgtccaaaggctctgaacgcactcaatagtgcagtccttgaggagcttgatgctacattcaaggcagttgatcttgatacaacaagatgtcttattcttacaggtgccggcgagaagtcatttgttgccggagctgatataggtgagatgtcaacactcacaaaggcagagggagaggccttcggcaagaagggtaacgatgtgtttagagctatcgagacatttcctatcccagttatcgcagcagtgaacggattcgctcttggcggcggatgcgagatatcaatgagctgtgacatcagaatctgctcagagaatgcaatatttggtcagccggaggctggtcttggaatcacacctggttttggcggaacacagagacttgcacgtcttgtaggtgcaggcatggctaagcagcttatctacacagcaagaaacatcaaggcagacgaggcatacagaatcggtcttgtgaatgctgtttatccacttgaggagctccttccagcagctaagaagatggcagccggaatcgcagcaaacgctcctattgcagtaagaaactgcaagaaggctattaatgatggcttacaggtagatatggatcaggcaattgttattgaggagaagctttttggtgactgtttcgagacagaggatcagaaggcaggaatgggcaatttccttgagaaagacaaggagaagaagcttaaggttgttcctttccagaataagtaataattaacagttctgatattaacatttagaatatgtgtcagtttttctgtgaaaaactgacatgtagcaccagccatttgccgtaggtaaattttgtatggctggtgttcaacagggtggggaatctgataaaggtaaaccatcctaaatgtgtgatataagtattatggtagcatgttaaacgaaacgtatatgaatttctcatgtttaccggaaaaaaagatttaggaggacataaaaatgaaggttggcgtaattggtgcaggaaccatgggtcagggcattgctaaggcatttgctcaggttgacggatacgaggttgcactctgcgatatcaagcaggagtgggctgaaggcggtaaggacaagatcgctaagggttatgcaagactcgtagaaaaaggaaagatgacacaggagaaggttgatggtattcttgccagcatcactccaggtcttaaggaagacttatgtgcagactgcgaccttatcgttgaggctgctttcgagaacatggaagtaaagaagacaacatttgctgagcttgacaagatctgcaagccagagtgtgtattcgcttcaaacacatcatcactttctatcacagagattggaaatggtcttacacgtcctatgatcggtatgcatttctttaatccagctgacagaatgaagcttatcgaggttatcgcaggtgttaatacaccagctgagactgtagagaagatcgttaagatctcagaggagatcggtaagactcctgtacaggttaacgaggctgctggattcgtagtaaacagaatcctcatcccaatgatcaacgaagctgcattcatcaagatggaaggtgtatcagatatagctggtattgatgcagctatgaagctcggtgctaaccatccaatgggaccacttgagttaggtgatttcgtaggtcttgatatctgtcttgcaatcatggatgttctgtacaatgagacaggtgacagcaagtatcgtgcatgtccattacttcgtaagatggtacgtggtggcaatctcggtgttaagagcggcagaggattctatatatacaatgctgatcgtacaaagacaccagttgatgctcagtaatagtgctaagtaatataatatatttatggaggaataattagaatggatttcgctttagacaagaagtatgaaatggcgcagaatttattcagagagttcgcgcagaatgaagtaaagcctcttgctcaggaaattgacgaacagcacagatttcctagagagacagttgagaagatggcaaagtatggtttcttaggaattcctgtttctaaggagttaggcggacagggctgtgatattctcacatatgctatgtgcgttgaggagctttcaaaggtttgcggtactacaggtgttatcgtatcagcacacacatcactctgtgttgatcctatcgtaacatttggtacaccagctcagaaagagaagtatgttcctgatcttgcttcaggcagaaagcttggtgctttcggtcttactgagccaggtgctggtacagatgctcagggacagcagacaaaggctgtacttgacggagacgagtgggtacttaacggatcaaagtgcttcatcacaaacggtaaagaggctgacgtatatatcgtcatcgccgttactggtatcgttgagaagcgtggcagaaagatgaaggagatatctgcattcatcgtagagaagggtacacctggatttacattcggtacaaaggagaacaagatgggtatctgtggttcttcaacatatgagcttatcttcacagactgccgtattccaaaggatgcacttcttggacagaagggtaagggattcaatatcgctatgcatacacttgacggtggacgtatcggtatcgctgctcaggctctcggtattgcagagggcgctctcgagacaacagttaactatgttaaggagagaaagcagttcggcagatcaatcgctcagttccagaatacacagttcgttcttgcagatcttgcaacaaagatcgaggcagctaagcttctcgtatacaaggcagcaagaaagaaggatgagtaccagagcggtgctaaggtttcttactcagtagaggcagctatggctaagctttacgcagctgaggttgctatggaagttactacaaagtgtgttcagttacacggtggttacggttacatcaaggagtacgatgttgagcgtatgatgcgtgatgctaagattacagagatctacgagggaacttcagaggttcagcgtatggttatttctgcaaacttattaaagtaatataggaggtacttaacgtgaaggttatagtttgtataaagcaggtacctgatacaaagggtggagtacagttcaacccagacggtacattaaacagagcagcaatgcttacaatcatgaaccctgatgataaggcaggacttgaggctgcacttagattaaaggatcagtatggtgcagaggtaacagttcttacaatgggtcttccaaaggctgctgatgttcttcaggaggcaattgctatgggagctgacaagggcgttcttgtaacagatcgtgtacttggtggagctgatacatgggctacatcaacaacaattgccggagctctcagaaagcttgattacgatctgatcatcacaggtcgtcaggctatcgatggagatactgctcaggttggaccacagatcgctgagcatcttggaattcctgtaatttcatatgcacaggagatcaaggttgacggagacgcagttatcgttaagcgtcagtatgatgacggatatcatatgttaaaggctaagatgccttgccttgtaacagcactttctgagttaaatgagccaagatacatgactccgggtggaatcttcgatgcagttaatgcagagatcacaacacttggcagagcagaccttgttgatgttgatgattcaaacctcggtcttaagggctcacctacaaagattgctaaggcttcagataaggtaagaaagggcgcaggcgagaaggttgttcctgattctccagatgaggcagttagctatattgttggcaagttaaaggataagcatgtaatctaatatagtaaaggaaaagtggtgaataaaatgggcgcaatgaacgcagaagaaatgaagaactacaaaggcgtatttgtctttgcacagcaggtagataataagttaagtggtatttctttcgagcttatcggcgaaggaaagagacttgcagaaaagcttgatgagaaggtaactgcagtacttatcggttcagatgttaagggtcttgtagatgagcttgcagagtacggcgcagacagagttatcgttgttgacgatccagagctcaaggattacagaacagagccatatgcacacgcacttgcatcagttatcaatgagtacaagccagagatcgttttagttggtgctacagcaatcggtagagatcttggtccaacagtttcagctagagttgctacaggtcttacagcagactgtacattacttgagatcggtgatttccctcttgttgcacttccaaatcaggagcagaagcacaatcagcttcttatgacacgtcctgcattcggtggtaacacaattgctacaatcgcatgtcctgacaaccgtccacagatggcaacagttcgtccaggtgttatgcagaagcttgacaaggtagctggtaagaaggcagaggttatcgagtataatccaggattcgtaccaaacaacaagtatgttgagatccttgagatctcaaaggctatctcagatatcaaggatatcatggatgctaagatccttgtttcaggtggtcgtggagttggctcagcagagaacttcaagctccttgatgatcttgcagaggtacttggcggacaggtatcatgctcacgtgcagttgttgattcaggctggaagccaaaggagcttcaggttggtcagactggtaagacagtacgtccacaggtatacttcgcaatcggtatttcaggtgctatccagcacgtagctggtatggaagagtcagacatcatcgttgctatcaacaaggatgaggatgctcctatctttgatgtagctgactatggtgtagttggagatctcaacaagatcgttccagctcttacagaggctatcaaggcagagcttgctaacaagtaattaacaggctgtttgctatatagataattttgaaattatcaactatgagaaaaacgcttcgcgagtttctcaagttatcgcggcagtcgccaaggtctcgtgcaagcacggactttggctcgttgctcgcgtaaattataaagtccccctcttggatttgatgttcaagagggggactttttgacgtggaagattttgatgtggaagattttgccatggaattttttggagagtagattacatagctaacaataatggcttgtttttgtattttggttagttttaggcgtattttccacaaaattatctctttttaatcagtttcataggaaatgtgacaatatcatgtaagtttgtatctttttgcattatattttggatttgggtacaattttgtgctctaaaaaataaaaaggcaaaaataaaaaacaaaaatctgcaattctgttacaatcagaaattgggaatccaatacaagtgtattgtaaataatacaaaaataatgtaatattaattagtttgaatatagtagataaagagagtatgcatgtgaagataggtacagtacatgcgaaagcaagtgcaaatgaggataaacacaaatggcaggtacagtaagtacggtatgcacagtagtagaacatgcagaagagaggtacatatgaaagagaaagatagcgttattgataacgtaaaatcagctgatagcaggaaaacatctgataaaaaaataatatctgataataaaacaatgtctgctactggaaagccgtccgctggcgagaacagagagaataagatgggcgtgatgtcagagggaaagcttctgatgtccatgtcgttgcctatgataatatccatgttgttccaggctatgtataatgttgtagatagtgtgtttgtatcaaggttcagcatggatggtcttactgctgtgtccactgcattcccgatacagaatctgatgataggggttttctcgggactgggagtcggttttaatgcgtttatatctaaggcccttggtgagaagaagtttgacagggcaaatgaggttgccagacagggaatattccttgaggcgataggatatgtgatatttctgataataggactattttttgcaagaacatttatggtgagccagacaggtgatgcgcaggttatccagtacggaacggaatatctagaggtgtgctgctgctgtgcttttggtatagctttccagatgacatttgagagactcttgcagtccacaggtcgtacaatgtacagtatgataactcagatacttggtgctgtcatcaatcttatacttgatcctatcatgatatttggactccttggatgccctaggatgggtgttaagggggcggccatcgcgacagtatgtggtcagtgcatagctggaactttggctatgatcttcaatatcaagaagaatccggatctccatatcactctgaggaaattcagaccacatggagagataattggcaagatactcggcgttggcgtgccgtcggttatcatggttgcaataggttctgtgatgaattattttctgaatcttatactgttttcgttctccaagttggcagttgctgtatttggagcttacttcaaggttcagagtatggcgtttatgcctgtgttcggattaaataacgggatgataccgataatttcatacaactatggagcgcaaagaccggacaggatgaagagaactatgaagctgggagttatggtgggctgttccattatgctgttctgccttgttatcatgcaggcattccctggacagatactcaagatatttgatgccacagatgatatgctgtccatgggaatccctgctgtcaggatcatgagcacagcgtttatatttgcgggattttcagtaacatgttctggaatgttccaggccgttggaaagggtgtatacagtatgatagtgtccatggcgagacagctctttgtcatacttcctgtagcgtatttcctttcaaaggcaatgaacagtgtgaatggcgtgtggacggcgttccctattgcagaaatcttcagcgtaattatatcaacatttcttcttctaagagtgtataaaaagatagtaaaacctttggaaagaggacagatagagtaaaataagagaatgatatacggaggaaatgcaataatatagacatagcgcgtggcatttgtattgtgatagaatactatatagtagtatagttttcatatgatgaacgcagttttgcatttgtcgcaaatagatggcagaaaagaaatggaaagagagcggatatgggaaaaatgatatatatggatcatgcggcaacaacggcggtgagacctgaagtgctcgatgccatgctgccttactttacagaaaaatatggaaatccctcaggcgtgtatacatttgcgtccaaaaataaggacgtaataaatgtggcaagggatataattgccgattcccttggggcgaagcctgaggagatctacttcaccgggggaggctctgagtcggacaactgggctcttaagtccgttgttgaagccttccaggataagggaaagcatataatcacaaccaggatagaacaccatgccattcttcacacatgccggtatctggagaagctgggttttgatgtgacataccttgacgtggacgaaaaggggctggtgaatacggataagctgaaagcagccataagaccagacacaatattgatatctgttatggcagccaacaatgagataggaaccatagagccaatcagcagaattggagccatagcacatgaacatggaattctgtttcacacggatgcagttcaggcgtatggacagattccgcttgatgtaaatgccatgaatatagatttgctcagcagcagcggtcataagcttaatggtccaaagggaatcggatttctgtatatacggagtggaataaagcttggaagctttatacatggaggccagcaggagcgtgggcgtcgtgctggaactgagaatgtaccgggaatcgttggaatgggcaaggctgccgagcttgcggttctatctatggaagatagaatgaaatgggagacagacataagagatcatatgattcatagaatcttgtcggagataccatattcaaggctgaatggacatgagaaagaccgacttcctaacaatgtgaatgtgagctttcagtttgttgaaggagaaacgatccttatcatgcttgatatggtgggaatatgcgcttctgcaggctctgcatgcacatcaggttctgttgatccatcacatgtactgacagctatcggtcttccgaaggagatatcacatggtgctgttagacttacacttggatatgagaataccatggacgaggcagatgctgtggtagataatctcaagaggattgtggaaaatctcagaaagatgtcacctgcatatcaggattttgtcagtagaaataaataatttgcaaaatacatgctcttgaacataatgcaggataaaagatagcattaaaataaaaatatactacagttattatttattataaagaggaaatgaagttgattgatacagataagaagacagtatgtgtaggtatgtcgggcggagttgattcgtcggttgccgcacttttgctcaaggagcagggctacaatgtaataggagttaccatgcagatatggcaggacgaggacagggacgtggtgagtgcccatgctggatgctgcgggctgtcagcagttgacgatgccagacgtgtggcgtcgcagctcgatattccgtattacgttatgaacttcaaggaagaatttaagaagtacgtaatagactattttgtggacgagtataagcatggcagaaccccgaatccatgtatcgcctgcaacagatatgtaaaatgggaatcgctgctcacaagatgcatggcgattggtggtgattatatagccacaggtcattatgcaagaataatccagctcccaaacggcaggtatactctccaggaggccaggggaatagataaggatcagacatatgcactctacaatctcacccaggaacagcttgccaggactctcatgccagttggagaatacagcaaacctgagatcagaaagatcgcagaggatcacggacttatggtggctcacaagccggacagccaggatatatgctttgtgccagatggagattacgccggttatcttgagaacgaagcaggacttaaggcggttccgggagattttgtagacatacatggcaatgtgatcggaagacataagggaatcatacactacaccataggacagagaaaaggacttggacttgcgatgggacatccggtatttgtggtggacatcatacctgagacaaatcaggttgtgataggagagaacggagacgtattctcagagaggctcacatgcaacagactgaacttcatgtccatagcggatctcacagagcctatgcatgtcaaggcgaagatcagatataaccacaagggaagcatgtgcacgatcaggaagatagatgaagatctggttgaggcggtatttgacgaaccggtcagagctgtgacaaagggacaggcagttgtattctatgagtgtgaccatgtgcttggcggcggaagtatctgctga

SEQ ID NO: 208 - DNA, 39067 bp, unidentified
  source 1..39067: mol_type = unassigned DNA
agatacattataccacggaccccgcactgatcggaggcatggtcatccggatccgggaccgtgttgtggacggcagtgtccgaaccagactggaacatctgacaagagacttagaacgtatacaattgaaagtaggtgagtgcgctccatgaatttaaaaccagaagaaatcagttctgtcattaaggagcagatcaaaagatatgcttcccagctggaagtggcagatgtgggaaccgtcattcaggtggcggacggcattgcacgtatccatggactggaaaatgcgatgcagggagaattgttagaatttccgggagaggtatacggtatggtactgaacctggaggaagataatgtcggtgcggtacttctcggaagtcagcacaatatcaatgagggagatacggttaaaacaaccggacgtgtggtagaagtgccggtaggaaatgcactgctcggacgtgttgtgaatgcgctcggacagccgattgacggaaagggaccgatcacaacggataaataccgtccagtagaacgtgtggcatccggtgtcatttcccgaaagggagtggatacaccactgcagaccggtatcaaagccattgattccatggtgccgatcggaagaggacagcgagaactgatcatcggagaccgtcagaccggaaagaccgcgattgcaattgacacggttattaatcagaaagggcagggcgtaaagtgtatttatgtggcaatcggtcagaaagcatctaccgttgccaatattgtccagacactcgaagagtatggagctttcagttatacaaccgttgttgcggctacggcaagtgaacttgcacctctgcagtatctggctccgtattccggctgtgcaatcggcgaagagtggatggagaatggcgaagatgtacttgttatctacgatgatttgagcaaacatgccatggcataccggaccctgtcgctgctgttaaagcgtgcaccgggccgtgaggcttatccgggtgatgtcttttacctgcattcacgtctgcttgagcgtgcggcacgtctgtcggacaaactgggaggaggttccctgacggcattaccgatcattgaaacgcaggcgggagatgtatctgcatatattccgacaaatgtaatctctatcacagatgggcagatttatctggagacggagatgtttaatgccggtttccgcccggcaatcaatgcgggactttccgtttcccgtgtaggaggagccgcacagatcaaggctatgaaaaagattgcggcgcctatccgtacagaactggcacagtaccgggaactggctgcatttgcacagttcggttccgaactggatgcagacacgagtgagaaactggcacagggagaacgattaaaagaaatcttaaaacagccgcagtatcagccgatgccggttgcaaaacagatcgttatcatctatgcggcagtgaaaaagtatcttatggacattccggtagaggaaattctgcattttcaggatgcgttacttgaacttattgataccagatatccggagattaccggaaagattacagagacgcaggtgatcgatgaggagacggaacagaaactgatagcagctattcaggaaacgaaaaaagaatacctggcgtgagggtatgataacagggggtgataacacatggcgtctatgagggatataaaaagacgaaaaggaagtatccagagcacacagcagattaccaaagccatgaaacttgtttctaccgtaaaactccagaaagccaaagggcgggcagaacggacagatccctattttcagtatatgtaccggacggtaagttccattttagcacacagcggcaatattgatcatccatacttaagaagcggggaatccaaaaagaaagcgatcgttgtactgacttcgaatcgtggacttgcaggaggatataatgcgaatgtggtgaaactgatcacagaaagtgatgatgttgccaaagaggatgtcgtgatctatgcagttggcagaaaaggaattgagatactggagcgaaaaggatatcacatcgaggtagatgcctcggaaattatggaaaatccgacatatccggatgcagcagcactctgtaagagagtgctcgacgatttcgcggaagggaaaataggagagatctatctggcatatacgcattttaaaaataccgttagtcaggaagcgcagctgatccgtatgcttccggtggaagtaagtgaaccttcggaggaaaagtctcccagagaaattcttatgaattatgagccaaacgaacaggaggctttgaatcagattattccaaaatatgtgacaagtctgttttatggggcactggtagaagccgtggcaagtgaaaacggtgcccgcatgcaggccatggattccgcaacaagcaatgcggaagagatgatagaggatctttccttaaaatataaccgtgcaagacagggatctatcacacaggaattgacggaaattattgcgggagcaaatgcgatagagtgacgtaataaaggagaagaaacatggaaaataaaggagcaataggaaagatcacgcaggtgatcagtgccgtgctcgatatcaaatttccggaaggacatcttccggagatcaatgatgcaatccgtattcctttaaaaaagggcggagaactgatcgttgaagtagcacagcatctgggggatgataccgtgcgttgtattgcactcggaccgacggacggacttgtccgcggtatggatgctatagcgacgggaggaccaatttcggtaccggtaggagaaaaaacacttggccgtttgtttaatgtgctgggagagccaatcgatgaaattgcacctccgcagaccaaggagcactggccgattcatcggaaggcaccttcgtttgaggaacaggcaacttcccaggaaatgttagagacaggaattaaagttgtcgatctgctctgcccatatcagaaaggtggaaaaatcggattgtttggaggagccggtgtaggaaaaactgtgctgatccaggaactgatccacaacattgccacagagcatggtggatattcggtatttaccggagtcggagagcgtacccgtgagggaaacgatctgtattatgaaatgaaagagtcgggagttatcgataagacaaccatggtgttcggacagatgaacgaaccgcctggggcacgtatgcgtgtagcgcttaccggacttacgatggcagaatatttccgtgataaaggcggaaaagatgttctgttatttattgataatattttccgttttacacaggcaggatcggaagtgtctgccctgctcggacgtatgccgtccgcagtaggttatcagccgaccttacagacagagatgggggcactacaggagcggattacatccacaaagaacggatctatcacttccgtacaggcggtatatgtgccggccgacgatctgacagacccggcaccggccacaacgtttgcacatctggatgccacaacggtactggatcgttccatcgtggaacttggaatttatccggctgtggatccgctggcttctacttcgcgtatccttgacccgagaattgtcggggaagaacattttaaggttgcgcgtggagtacaggagattttgcagaaatataaagaattgcaggatattatcgcaattctcggtatggatgaattgtcggaggatgataagcttgttgtcagccgggcgcgtaaagtacaaagattcctgtcgcagccgttttctgtggcagtacagtttaccggactggaaggcaaatatgttccggtggaagagaccatccgcggattccgtgagattctggatggaaaactggatgacgtgccggaaagttatttcctgaatgccggaacaattgatgaggtaaaggcggcatatgcagggtaatgtgtgtgccggctggaggaaacagagatggaaaagacatttgatgtagaaatcatcacgccggaccgcgttttttataagggaactgcggatctgctggagtttaatacggaatccggcgagatcggtgtatatcgtgatcacattccacttacaacggtactggaaccggggcttgtcacgatccatcatggggatgaagaacaggtggcagcagtgcatgccggatttgccgagattctgggagataaggtaacacttctggcagaactggcagaatggccggaagagattgatctggagcgtgcggaagccgcaagagagcgggcagaggagcggattcacaacagaaatgacaatctggatttaaagcgcgcggaatttgcattgcataaggctctgatccgtattaatcttgcagagtatcgataagtgaaaatggaaataaaagggagggtatttggaatatcctccctcttttatggacttttacaccggagtttggtacaatcttagtagtaagtttgtatacaaatgaggagatattgtgtaccggaagaataaaaacaattgggtaaagcatctggattttatgattctggatctgatttgcctgcaggtggcattttttttagcctatacattacgacatagaactgtcaatctatataccaattacatatatgcaaatttgtctatcgttctgatcctgatagatgtttgtcttttgattttcctgaatacacttaaaaatgtattaaaacgtggatatctggtagagtttatcgcaaccattaagcatgtggcgattgtggaactggttgctgtcctgtatctgttttcggtaaaagatgcgggaaatttttcgcgaatcacgttctttctcatggcattattctatggattgcttacttatggaacaagacttctgtggaaaaaacatattcttcgcacgctgcatctgaagcagaacaagtccgtactggttatcacaaactttgaccggctgtctcaggtggaaaaggatatccgggcgaaacgctatgtgatgtttcagatatcgggagtggctgtgacaggaaacatgccagaggatcatccaacggaaattgcagggattcctctggttgcagcaggtgattacgtggtggaatatctctgcagggaatgggtggatgaagtatttgtaaatctgccattgcagagtgcccagctggatgatctcatccggcagttaaacgagatgggaattacggtgcatattcagctggcagataaactgatgttcggaacgcagcggcagtttgtggagcgtcttgggggatacaccgtgttaaccacaagcatcaatacgatttccaccggagaactgtttgtaaaacgtctgtttgatattatcgggggactggtgggatgtgtactcaccggtattctgtttctgtttctggctcccgccattaagattcagtcacccggaccggtattcttttcccagatccgtgtgggaaaaaacggaaagaagtttaagctgtacaagttccggagtatgtatactgacgcggaagaacgcaaggcacagcttgccgcagaaaacagagtcacagacgggctgatgtttaagctggattttgacccacgcatcatcggctgcagacagctgccggatggaacggtgaagaaaggaatcgggaactttatccgtgactggtctttcgatgagtttccgcagttctggaatgtcttaaagggggacatgtctctggtagggacgagaccgcctacagaggatgagtgggtcagatacgaactgcaccacagaagccgtctggccatcaaaccgggaatcactggaatgtggcaggtgagcggccgcagcaatattacggattttgaaaaagttgtggaactggaccggtattacattttaaactggagtctgggactggatgtgaaaatacttttccggacggtaccggaagtcgtgaaaaagaacgggtctatgtaggcgacttcccggttgcagcaagacatgagggtgtgatgtggttgtttatgattccattaatggtcgggtagcgatttttgaagcaaagtacaccaaggttctggaaaacgagtgtgatacggcgctgcagcagatggatgatcggatgtatgcaaaagagtatgaggatgattacgatcaaattctttgttatggtattttattctttaaaaagcgttgtatggtgaagaaaaagaactgagattgtgtgggtaataatcatggatgaaaccatgtcggtgtatttatggataatcttgaagttggcttattcaatttgaaatgcgtaaattaagggagaataatatgattatcacacaaaccccatttagaatgtccttttttgggggagggacagatatagaaagctttttcaaaaagtatggaggagcagtaatatctacaacatttgataagtactgttatgtcaatgtaagacacttaccaaggttttttgattatactacagagatatcgtattcaagaacggaaagagttacagatattcaggatattaaacatccagctgttcgcaatgctatggaaatgctggatatgcatgaattgcgtcttacttatgaagcagatttgcctgcacgttcgggactggggacaagcagttcttttgcggtagggatgttaaatgcattttatgcattaaaaggaaaatacgcagataaaaagaaacttgcagatgaagccatttatctggaacgaaaactttgtcaggaaatgggcggttggcaggatcagatcgctgcagcttatggtggattaaatcgtattaattttaatgcagatggatatgaagtcaaaccaatcattatttctccagaacgaaaaaaaagattgaataataatttactaatgttttttactggatttacgagattttcttctgaagtgcagaaacaaaatgccatggggaaagaggataaagttgtacaattaagagagatgttgtctcttgtggatgatgcagaacaggttttgacagacaaaaatacggatttggatgagtttggcaaattgttggatcatacatggagattaaaacgtcagactggatctgctgtatctacagagaacattgatttattgtatgaaaagggaataaaagctggtgcattgggaggaaaacttctcggagctggaggaggaggatttcttgtattttatgtgcaaccggagcaacaagaagcggtgaaacaggctatgaataatctgatgtatataccatttgagtttgaagatggtggaacaagagtgattcattataccccggaaacttatattccgaaggagtaaacagttatgaaagttgtaataatggcaggtggaaaaggaactcgtatgttatccattgcaagtgatattccaaaaccaatgattccaattgaaggaagaccggttttagaacatgaaatagaatgcctttgtgaacagggatttacagatattctcattaccgtaggccatcttggaaatgtcattatggattattttggcgatggtttaaaatttggtgttcatattacttattattttgaaaaggaaccacttggaaacgcaggggcactttttcaagtaaaagatcagcttacagatgatttccttttattgaacgcagatgcaatgtttgatattgattttaatcgttttgtacagtatcacaaaacacatgacgctgtggcaacattgtttacacatccgaacagtcatccgtatgatagtggagtcattattgcggatgaacatatggctgtgagaaagtggttggcaaaggaagatgagcgtccggaatactttaagaatcgagttaacgctggacttcatgtattgaataaaaggatattggaacagacggttgagggggggaaaatagatctggatcgccagttgttaaagccactggcaggaactggacaaatgtactgttatgatagtccggaatatgttaaagatatgggaaccccggaacgctattatgcagtatgtaaagattttgcaaatggtattgtaaaagcaagaaatttgaagaatagacaaaaagctatcttcctagatcgtgatggaactattaatgaatatgttgggtttcttacagatattaaagaatttcgtttacttgacggagtggcagaggcaatccgtaagattaatgcatctggatatcttgcgatcgtggtgacaaatcagccaataattgcacgtggagaagtctcttttacagagttacaggaaattcataacaagatggaaacccttctgggagcagaaggggcctatatcgatgcaatttatttttgtccgcatcatcctgataagggatttgaaggggagcgtgtagaatataagatatcctgcgattgtagaaagccaaagccaggtatgctgctgaaagcagcagaagatttcaatattgatctttccagatcctggatggttggagatggaaagaatgatgttgaagcaggaaagaatgcggggtgtaaaactgttttaattggaacagaagattatggacaggatcgtaaggtttcatctttatttgcatttgcaaatactataggagaataaaaagatgttggaggaaagattacaaaaatatattgatgtattaatccagagatatccggtgctgaagaaagtgagccaggagattatagaggcttatttattgatgaaagcatcttatcagaatgggggaaagttactgattgccggaaatggtggatctgcagcagatgcagaacacattgcgggggaacttatgaaagggtttaaacttccacgtaaagtaacatcagaatttgcagagaagcttatgaaaggtgataaggagctgggaattatgttagcagaaaatttgcagggagcacttccggcaattgcactggatggaaacccggcactttcaactgcgtatatgaatgattgcgaaccattattgtgctttgcacagcaggttaatggttatggaaaagaggaagatatatttcttggaatttctactagtggaaacagcaaaaatgtattgtatgcggcaattacagcacatgccaagggaatgaaagtgattggacttaccggagaaaaggatagcagactgcgccagatgagtgatgtgtgtatttgtgttccgcaaagagaaacatatatgatacaggaactgcatttgccagtgtatcattgtttgtgtttaatgttggaagaaaaattttttggagaataatacttttatggatagtttgaaaaagcaaccattgttaaatacttttgtgaataacatggatatggaagaaacgatacagacaattgattcttttattcaacaaaagaagagatcttatattgtcgcaattaatgtagatgttgtcataaaaatagaacaggatgcttatcttaaacgaattacagatcaggcagatatggtactggttgatggaaaacccttgatttggatttcaaagttacataaaagacctgtgaaagctaaaatatctggttcagatcttgtaccgaaattgtgtgagaaagcagcggaaaaaggatataccatatttattattggtgggaaagatggtattgcggaacaggcaaaaaggaaactggagaaacaattgtcaggaataaaaattgtgggaacttatgcaccaccatatggttttgagaaagataagaatgaactggacaagatcaatcagatgatttcggatgttcatccggatttactgattggttgttttggttgccccaaacaggaaaagtggatttatgaaaattataaaaaatatgatgcaacggtgtctgtgtgtgccggcgcaaccgtagactttcttgcaggaaacataaggagagcaccggggtggatgagtgatcatggattggaatggttttatagatttacacaagaaccgaaacggatgtttaagagatattttgtagacgatataaaaatagtgagtttaatgtggaagtataggaaataacatgatagatttaagaaaacaaaatgttttacttttcaccagaacgatgcagttgggaggaaccgagaatgttatattgcagttatgcgagatattacaaccaaaagtaaataaaattatagtttgttcttgcggtggagttaatataaaaaaattgaatgagatgagaattaaacatattttaatagatgatatagaaaataagtctattttaacgattcttaatacttctaagactttgaagaggacagttaaagaagaacagattactattattcatacacatcatagaatggctgcattttatgtcgctatattaagattgtatagaaaatgtatttttataaacacaaatcacaatacgtttactgataagaagatgttaacacgatttgcatatcgtcatgcaaaattagtagcttgcggagaaatggtaaagaaaaatcttgttgaggtatatggactgtcagataagcaagtgacggtaatacataatgcggtgaaaccatttgatggagaggtagttgtggatcctctgataaaaaaattgcacgatgatgaaatgtttgtagttgggagtgtaggaagactgtctgaacaaaaaggaatggaatattttatcaaggcaattcctactgttcttaaaagtaatcagaaggtgcgatttgtaattgcgggaagtggggaagatgagacaaaacttcgcaaacttagtagaaaattagctgttgagagatatttgatttttttaggatatagatcagatattcaaaatttaatgtctcagttagatttggttgttctatcttcactttgggaagggctgccattaacaccgattgaagcattctctgttggaaaaacaattgtagcgactgctgttgatggaactgtagaaattgtgagggatggagtaaatggatatacagtagagcctaaaaatccagaacagttggctgaaaagataaaatatttactcgatcatccagaagtaaagtcgatttttgaagaacacgctaaagaacaatatcacaataaattttcgtttgaatggctaactcaacgttacctggagttttacaagagtgtataaaatggggatatgaaaaatgcaaaaatctttgaaaattctttttttccataatacattacctgagtacaggataggatggtttagaaatcttgctcaaaatgcggatgttcagtttgtatttacaaatgaacagttaaataaaaaagaatatgggttcacaattgaatatgaaaaaatcaaggatttaaaatgcaagtttcttttggatggaaagcagggaattaaagatttaaaacaaattatgggagatagtattcaatatgattttgttgaacttcctccaattgattcacttcgagaagtaatatatagtgcttatattgtgtatgtgtgcaaaaagaaaaatattaagattggatatttttgggaaaaatgggaagcgccttgggaaaaacaaccgttaaaaagacgtgttaaaaatttgattttacgtgttatacctggtttgatttacaagagggcagatgtgattttttctgttggaaggaaaaaccgggagtatttcatttcgaatggtgtaaaagaaaaaaaaattgtatggattccagatgtgagtgaaacaccggattgtgattacattgatcttagagaaaaatttaatataccatcagaatgtaaaattattatgtatctgggcagattgttaccgcaaaagggtgttggtgatcttgttaaagctttttcaaggttgaatagtgatataaaagagaaatgctatctattgatagccggtgatggagtagatttagaaaactgcaagcgtttaacacgaatgttgaaattaaataatgtttgttttaccggaagcgttaatccggctcaacggggtaattattttgcacaatgtgatatttttgtttatccggtgaactattatcaaggatggtgtgatgtttgggggttaactttaaatgaagctgttcagcatgggaaaattgtaattgcgacagatgctgttggaagtgcatatgaattaataaaaaatggcgtgaatggatttcgtatcgaagcaggaaatatagaacagttaaagtctgccatcctggatgctttgagtcaaaaaatagcatggacggccatggtaaaggatgttgaattaaaaaaattatttagctacacagaaatgggaaaacgttatatagaagttgttgaaaaaatagtaggatagtacggaaagaatatcaaagtgaggaatgtaaaatgattccaaaaaaaatacactattgttggtttggcgggaataaaaagagcaaattggtaatgaagtgcattaattcctggaaaaaatttttccctgattatgagattgttgagtggaatgaaggcaatacggatttgcatgaaaataaatacatagaaagggcctatcaattaaaaaaatgggcatttgtgtcagactatgtaagaatgaaggttttgtatgattatgggggaatatattttgacacagacgtagaagtaataagaagttttcccgatgatttgttaaaattaccggcatttactgggatagaaagtttttctttgctggttagtcctggattagtttttgcatgtgagtcaggtaatgtcgttgctaaaatgatgatggattcgtataatcaggatatatttgaaaatacagggattgatacgataaaaacgatcaatgttagaataacggatttacttgtctgtaatggatttgaaccgtgcgaaaagaaacaaacagttcttgatgtgactgtatttccaagtagtgtattttgtgcatatgatggaaaaataagaagaattaatatcagggaagacacattgtctgtacatcattatgcagcaagttggttgccttggtatcgtaaaatcagacttttttttggaactaaattacggcatattgggatattaaagtaatatgaataggttgaacgaaatgcttttattgtattaatattggatcaataattataatgtatcaaatataaatgatgagattagaaaaaagagttataagtatataatgggagaaatggtttgacaatgcaaatgtctataaaagtaaaaaagaaagaaatattaccattgatgtattgcgtatttacaagtatttattatacgttaagaggatggaaatattcaactaagatcttagatgtattgttagtcatagcggtgatatgtggactagtaaatgcttttcagcatgttttgaataaagcaagaacattaatgataatgataccattaattattttgataatatacagaatgagtttgggagcagatgcaagattgtttgtatcattagtagcggtattggtaggtatgagtgtgaactttgacaaaattgcaagttggatattaagtaccaaaacaataatttttgtgttttgtctgttgatggggggatatgttcatttaaattacatttcaatgaatatgggggtaatattatttctgactttatatatatattatcctaaaaataaaataaaatcttttatactggctgtaataatatatgtattaggtgtttttgtgtcaaaaagtggtgccatgatagtatgtgctggtgctggattaatattatatattattgtaaatacgaagattggaaaaagaatattgacttcaaaagcaatggcctttttatttcctatggttttgtttttaaattggtttttagctgcgttatattctgcatatggatattcaaatcccaatttctgttttataaaaaatttagttccaaaggcattgagccctcatatgctcccgtttttaaatatattagatataattgtttctgggagaataagtttagctgcttattcaatagaaaaatttggtgttagcttatggggggggaatataaattataatgtggacacgggacttccgtattttcttatagattcagggatgattcttttactacaagattggggaattgttatggcaattgtggttatgcttgcttttatatttttaatgtttaagttggtgaagaaaaaggaatatagactcattatttctgctatcgtaatttctttatgggcatttaatgaagatgcattattggcagtaggaacaaattatctgttttatgttataggatatgagttatataattcgcgtaaagaaattgccacaaaaatgaaaaatgtgtatggcgtatttcagaaaacataaggggatattatgaaagaaaaattaagtgttatagtgcccgtttacaataaagaaggatatttagagcgttcattaacaacattaagaaatcagacatatcaagatattgaggtcataattgttgatgatggctcgacggataaaagtaaagaagtatgtatgaaattttgtgctgaggataatcggtttaaatattattataaaaataatggtggagttgcaagtgcacgaaattttggattggataaagccagtggaggatacataggatttgtggatccagatgattatatagaaattgatatgtatgaaaaaatgttaaatacggctattgaaagaaatgcagatatagtaggttgtgggattcggatgttacttagcaatgaaataaagaaaattacagagtctagagactatgaattgacatcaaagaatgcagctatacatttgttaaaatgggataatatggttacaccatatttatggaacaaaatatttcgaaaatctattttgaaagagatacgttttaatgaaaaattaaaagtaggagaggattttccatttgtttttgaatgtatactgcacgcgtctggctatatacatatttgcaattttttgtatacatatgtgagaaatgctgattctttagtaggtattaaatataaatgtgagtcatcaaaaaattcaatatattcatcaatatatgtttgtgaattaagcaatataaaatatcatgagttcgcagatatatgtaaatatagcttgttactaaattgttattttcaaatgagtatgattttgcatgaaaaagtatgtaatgatatgttatggaaggatttaatattttttcaaagatttagtttgaaaattgataaaaaaataattaagaattatggaggtgtagtattatatttaaaggctgtattatgttttaaatatccacagttatatagaaagatattacagataagaagcaaaagaactattcgttgaatatttatttcgttgagggaaaagtgatagaaaaaaaaataggaattataacatttcatgcggcagacaattttggttctgcattacaggcatatgcgttagaaaaagtattacagagtttggaatatgaacctgaaattataaatattatctatgctaaggatatggaacaatataaagtatttcgtacaaaaatatacaaagaacgtcccaaagctatcttaggggatattttatatttgatacgcaatataaagagaaaacaggcatttcaacgattccgggatatgtacttaaaaatttcaaaaaaaacatattatgcctgcagtgataattcgcaggaattgaatgattgttatgatgcttttatttgcggaagtgatcaaatttggaatatcaattgtacacagggattggtgccggaattcttcctggaatttgtttctgacagcaagaaaaaaattgcatatgcaccaagcatgccggcgaaggtgccggacaagtattataaaagaataaaaaaagacgttgaaagattagatgccgtatccgtcagagaaagtgaaacaattccttatttgataaatgaggtaggaataaaaaaagaaatattacatacggttgatcctacgctacttttagatgcggaaaattatattgattcttttcaattaaagatcagaaatgaaaattatatttttgtatattttttgtatgatgaggagaataaacaggaattggtttcatatgcatcaaagattgctaaacaaaagaatttaaaaatcaaatatgtttcccaaagaaaaattaaagcgtttgtaggtcagaaatattgtctgggaataggaccggaagagtttttggatatggtgtataatgcttcttatgttattacaaattcatttcatgcaactgtattttccatacactttcaagtgccgttttgtgtattcccaaggagtggatcacaggcaaggatggtggaagtattaaaacggatgaatatggaaaaaaatttatattcttcggaaaatacagaatggatggaatctgtgtcaaatagtaaaacgaaagaagtaatgaaagacatggcaggagaatctttaaaatttttacgaaatagtctggaatagtgggaaaacaaaaaatgaatgaaaaaaaacgtttgattaaaaataccggaatgatagcaattggaaatattagtaccaagttagtctcttttttccttcttcctttatacactacactactttctacttctgaatatggaatttttgattacattttaagtattgcaacattctgtgttccatttgtttctgtacttatggatgaatctatttttcgctttttaattgactgcaaaaaacaggaagaaaaggaaaaagtaatatcgacatccctcatgattgtattaactgggatgacggggtttgctttgattggtattccggtaatgcagggattgcattatcattatacctgctatgcaacaatttatattttattaaatgttgtgagcggaatgattagtgcaatacttcggggaataggaagaacggatcaatatgctttatttaactttttacttggttcgattcagatagcactaaatgtgttatttatagcggtatttcatatgggtgtggatggaatgttattggcagccattctaacccagttttttgtttctgttatttttatcttcagaatccgcctgtggaagtattttaattttcgaattgttgattcacaaatggcgaaagatctgattgtatattcacttccgctgattccgaataaggtttcgtggacaatcattaatctttctgaccgaattattttgatgaactggttggggagcaaggcaaccggtttatatgcagtttcttataaatttcccaatttgatggataccgtttatggatttttttatcagtcctggaaagagagctctgcaagggtaatgggagaggattcgcaaaatgatttttataataacgtgtatgaaactttaaaaaattttatgtatgcacttgttcttggaatgagtgcatttatgcctttggtgtttcgcgttcttataaataaaaattattacgaagctcttttgtatgtcccaattctcttattggctacttattttgctaacatttccgggttttatgggggaatttttactgcatacaaagatacaaaaattatgggaaccacaaccttgacagcagcaattttgaatgtgacaattaatttgctgatgatacataagtttggaatttatgcggcagctatttctacacttgttgctaattttgtgatttatttgtatcggcgatggaaagtatcaaaatacgttaaattaagtgaaaataaaaaaaatatagtgatatcaatagtgtcaactttagctatattcatattgttttatagtaaaaataccttatgtatgtgtatttcctgttttatagcattgctatatgcgggagttatgaacaaaactttgattgttgcgttatggaatcagatgcgaagaaaatgatgtgatgtttatgcgaaatataaaagtaggagaattgcatatatgaatacggtttgtaaaaaaaacgaatgttccggttgtatggcatgtattgatatttgtcctgtcaacgcaattaatgtgcaggacgatattgaatatatgaatgcatatattaattctgatacatgtattcattgcaatgcatgtggtaatgtgtgtcaatgtaatcacccttcacaattaaaggaacctatatgctggtaccagggctgggcagataaagcaataagagagcggagctcgtcgggtggattcgcaacagctatttttcagaattttataatgacaggtgggacgatagcctcttgcaagcttatagacggagagtataagtttgttcttataaaatctcttgaggaacttgatggtgtaaggggatcaaagtatgttaagagtaatccaactggaatttataaacaagtaaaagcacaacttattgcagggcaaaaagtgttgtttcttggtcttccctgtcaggtatcctctatgaaaaattatattggagatctgtatgcagaaagattgtatacgattgatcttatttgtcatggaactccatcaattaagatcctgaagaaggctttgtctgagtatggtgttgatatgaaacttcagaaagagattttgtttcggaaaaataattgttttggtctggaaaccagtcttaaacctgttgttccagatggagtgagcgatttctattcgatggcatttctggagggaattgattacacgcgcaattgctatagttgtcattatgcaaccggaaatagaacaggtgatttaactttgggagattcgtggggaacagaaattcatacagaggagtcacaaggcgtttctctggcactggtacagacggaaaagggaatggatttattgtctatggcaaatcttgaattaagggatgtggatttggaaaaagcaaaaataccgaatacacagttgcgatgtccaacgaagaagacaaaagagcatgacattttttttcataattttatgaggggaaagtccttcagatggtctgttgcctgtgtttggccaaaacgctgtataaagcaggaaataaaacggatattaatcaagttgcatttgtatcgagcgaaaagaaatccataaaataggaaacgctatctgtctggatgcatatgcaacagatagtacaggaaaaaatacgacattgaggttcagcgggcggaagatatgaattacgaattgcttgcggaaaagacgcgttatttaaaagaaaatccggagggagtgagcgagatgtgtaaagtcatggaagaattaagaaatgaaagttatgcggaaggtcgtgaagaaggtcgcgaacaacaggcgaaagatactgcgattcggatgagtaaaagggggcgttccatcgaggagatcgcggattgtgtggatttcgacttagagacggttagaaagtggcttataacatcagaggttgaataaaattgtataaaaaatcattagagtatgatttttaattgattttgtggagatgatggaatatgaacagattttcagaaagggattggaaactattttgctgtaagatagccggatggcaagaggcttatatggataagctgaataaagaatatatgacaatactaagcggaaagggaaatgcttcagaaaagttttggaatctggagaaaagaattaaagaggataaaaaggattgtggtgtgcaatgtgaaatgagcagatccaatcagttttatattatgttggaactactgaatgagggagcaataactataaatgacttggaagattttagtgaagatttgaaagagacaatgaaacattttttcaatagataaaaacaggaggtatgtcaatatgcgtgatccaatagaaaacatatcacaacttcagaaaaagttgaatgacctgcaactggaaaatcagatattgaaaaacatattggataaagcaggattgtcataccataaagaattatcggaatttagacaaaatgattgtaaagaagcttatgatttggaacagggaaaaagaattatttatccgcagataataacagaaaatatggcaaaccagttttttggcatgttttggggcagacaggatgtctatgcaaagcgtagtgttaataaaggaactggtaaggtagcatattatccgcagtgtaataatttgtggacaagtggatgtcataggaaattaaaagatggtattaactgtaaggattgcaagagccgttcttataagactataacaaagttcattatattaaatcatttgcaggggaattcttataatggatctgatgtaataggtgtttatccactttttagtaatggaacatgcagattcatggtatttgattttgataatcatgataaaggagcagaagaaaatgattttgaaaatgttgatgatacatggattgaagaagttgaggcaatgcgagaaatctgtgtgttaaatggaatagatccattagtggaacgttcaaggtctggcaaaggtgcacatatatggatattctttgataaaccgatagctgcttcattggtaagaaaatttggatttgcattgcttgataagggtgcagaacaggttaatttaaaatcttttaaatattatgacagaatgctgcctgcacaggattcgttatcagataatagttcacttggtaatctgattgcattgccgttgcaggggaaggctttgcaggatggaaatagtgcgtttattgatggcaactggaatgcatatcctgatcaatggagaatattatttagtaagccaagattatcacaggaatttctagaagaaaaaataaaagaatggacaaatcctattgaggatattgttgcagatgctgacgaaagtgacagggaaaaaccatgggacagaatacagcattttaataaaactgatgtagatggaaagttgcatattacattatcaaatggaatatatgtggacaatacgaatttgaaagcatctatgcagaacagaatccgcagaatggcagcaatcagtaatccgattttctataaaaatcaggcaataggaacatcaaattatgatacaccaagatggatttatctaggaaaagaccatctgagcggatacatacaaataccaagaggactgctggatgaacttctggaaaaggcaaaacaggcagatattgattatgaaatcgaagatgagcgtcagcagggaagaaatattaatgtggattttataggtgaattgcgtcctgaacaggatcgggcattaaaagagctgatgaaatacgataacggaatacttcatgctgcaactgcatttggtaaaactgtggttagcagtgcgataattgcacaaaagaaagtgaatacattgattatattggaatcatcagcattgatagagcagtggaaagaggcattggggaaattcttaaatattaatgaggaacttccaacctatgaaactaagacagggagagtacggaaaagaaaaagcctgattggaactttgcagggagcacatgattcaatgactggaattatagatattgcaatggcaggttcgctgtgcaaaaagggagagtatcataatctgttgaatgaatacggactagtgctggttgatgagtgccatcattctgcttctgaaacaatagccaatgttttaaaagaagtgaaagcaaagtatgtatatggtgtgacagcaactccgaaaagaggagatggactggaaaaaatcaattatatgctaatcggatctataagatatagttatactgcaaaggaaaaggcaaaagagcaggggatacagcatcttgtatacccgcgatttactaggactgtaccaccaaggggtgtgattaccggaaagatgcatccaaatgaagcatatgagattattcacaataatgatgtgagggatgagcagattattgaggatgtgaagaactgcgtatcagcaggtcgtactccggttgttttgtcacgatacaaggatcattcagaaaaattgtacgagcgtttaaaaagttatgcagatcatgtgtttcttatgacaggtaacaattctaagaaagaacaaagaaagattcttaaactaatgcatgaggtcaagaatgatgaatcaatgatattagtagcaacaggttccctggtaggagaaggtttcgattttccaagactggatacactttttatggcaacacccatatcattccgtggggtagttgaacagtatgcaggacgattgaatcgtgattatgcaggtaaagaaaatgtaataatatatgattatgtggataatcatatcccaatgtttgataatatgtatatgaagcggctgaaggcatataaacagattggttacgagctttctagtggcttgaaagccgataaacagatagttaatgcaatatatgggggagataattatagagaaactttccataaggatctacttgatgccaataaaaatataatcatttccagcccagccatcagcggacaaaaagtttatgaattaatcagcatgctaaaggaaaaacaggaggcaggagttcagattacaatagttacatggatgccggattcatatggatttggtgatgcagcatattggatgcagctacatgaagatatgcgtaaagctggcttttatataaaaacagtagaagaatattgtgaccgttttgctgttattgaccaggaagtagtatggtatgggaatattaatctgctggcgaaggataagatagataatagtattatgagagtcatgagcaaagatatagcaggtgaattgatggagatcacatttggcgataatgatagagaagtaaggtgtaatgtaaatgactgaacaagaatttaaagaaatattacataaagaggaaacagatacagttgaatttaagtcttgggttaatgcaagaaatatgaaggaaattatatcgcttgcggttgatgaattgatagcatttgcaaatagcaagggtggaactgtttattttggagtagaagataatccggttgtggttacaggatgtgatagaaactatgatgggcaacgaattatagaggggatttatgatagaaccattccaccactattcaccgaaatatcagattttgagtataagggaaagctcgttattgcaatatcagttaaagcagatggaaagacatatacaactacggatggtagatgcctgaaacgattggggagaaattcaaagccagcatatcctgatgaattaagtgctgtatattcttctgttcagaatccggatttttcaggaagaattattggagagagtactctggatgatgtaaataaactggaagtgtacagcttaaaggaaaagctgagagtcagagattctaaatctacattgccggatttggaggatattgagtttttaagagatttacaacttgtaaaatatgatggagatgtagaaagactgacgattgctgggttactgttcgttggaaaagaagcatctattcaaagattgttaccgcaggcggaagttatatacctacattattcagctgataatttggaggaatatgatgcaaggctagatttgaagttgccgttgataagcgttatcgacaagttgacagagcgggtacaggcatacagtaagatcgaaaatattcaggtaggattattcagacttgaagttgaggatttccctgaaagagtatttcaggaagcattgcttaatgcgttgtctcatagagactaccagagtaatgctgcggtttatgtaaaacaatacccagatcgaatagttattgaaaatccgggaggatttcttgatggaattacagaggataatattataactcatccatcgattcccaggaataaactaatagcggagacacttcaaaatttgaagtatgtccagaggacaggtcagggagtagatattatttataaggacatggtttcaatgggcaagccatatccaagatatagatcatttaatgatgcagtttcgcttacaatatttagtgcaatagataatactgaatttgttaagtttattacagaagtacaagataaaaatagtaaaattatgtctttggctgagatgatgatattaagagatcttttagataacagaagggaacagttatcagagttgtcgagaaaagtccaaaaatctctggatgaaacgaaaaaatcatgtaatgaactgattagtagtggattaatagagattgttggaaaggaatacatgctgacagctaaggtttatgaagcattaaagtcagatgtggaatatacaagagataaaacagtccagtatatcaaggctaaaaatatgattttagagtatttacagacgaatgaccagataacatctgctaaaatacaggaaatgtgtggatttactaaacaacaggcaagaagtgttattgacaagatgagaagtgagaagttaattaacttaaatggcaaaggaccggcggctagatatgttatatttgatggattgagtgataattgagtttggggtaaaataaaactcaatagaaaactcaattacttttaatggcaagtactggagtaatgaatacgctgaaaatatgattgagtggagtctttttaaaaactcaattaaaactcgttgatgtgcgaaaaaatcacattggcgggagtattggaaatccatgtagaaccggaacatgtgaaagtatatacagtttatcggaatgataaaattaatcatactgcaaatccgataaaacttcactatggaatgaatgcaagggagcacaatgtagaacctatggagaagacagaatggaatgcaaaacaagtagagatttcttttgtgaatacaattcagtgatcgggatggaggtccgatattatctacagggttataaaggtacgctgattatcgatggctaccagataagttctcaattgtgagtaccacaacacaagatccaatgatttatcgtatcctgaaaaatctaagtgactatacagagtttttattaaacagtaatattaattttgacaggtgcatggtataggaaaaaaggatgagataaaaccagcgtctaggcccgacacataaagaaaggagaacgaaaacgatgaaagcattaaaaaaacaacaaattgcggtcattttgatactgtctgtcatactcagcacatttgcagctgttacacctgtaagtgcggcgacgctgtctgcacagcagtatttggaaaagatggatatagcggtgcgaaacttaaaatcatatgattttacgcagacaaccgatcagaagatgacaatggaagggcagatcattcaaaataagacggtggtaaagcaaagcgtatacaacagtcctctgaaggtaaaaagcgtaacagatacaaccacagtacttgcaggaatgagttctaagaaccaggcggttgcctatctgacaaaagatgcggatggattgctgtgggagtacatttcttccaatggttccggatatcagaaaacagggattttaaactataccaatcagattaaaggtatggatatttccatgtattcggatgcaaaaattgtgaaaaagaaaataaaagtcaaccggatcaatactgttcagatttcggcgcaggtaaagggctccgatgtggtgaaatttttgaaccagatgggaatgagcaaagagatcaatgcggcagctgctgtggattacaatacgttgccggcaatcaaagtgacctgttggatcgataaaaaaacctgtcgtccagtcagaaccacggcggatatgaaagcgtttatgaacgggtatatgtcggcgctgtatcagaagctgggacaggatctgaaacttgtttattcgcaggcaaaagcaacggtaacctataaaaattttaataaggctgcaacatttacaataccgaaggaatgcagataaagataccacattttcaaagatgacaacaacagttactacggatacaaataaaataatatatacggcaaaggttccgaaagacgctacatctgcatggtaagtattcggttggaacatacacctatcaaaaataaatgtttctgagaagagaaaatagctgtttgtgaaaacggctattctttttttatctaaaatggcatatttcttgtcagaagcaattgaaattatgattcaaatatgataggataaagtaggctgtctagtgtagaaaagacacataaggcagagtgggggatatatgtaatgtcagagaatgatagttactacatataaaattataaaactacggaggaagaaacatgaagaacaaagattatttaacagtaagacaggaagaattaatgaattttctgtggaaggtcaatgagccgctgactgccaacgagatggcagagcgcctggcagaagacggatggaacaatgttacattgtttaagaccgttcagtctctgacaacggatggctatctggaagttgtaggacttgagaaaaccgtcaagacttatgcacgtaaactcgctccgtctatgtcaaaagacgattattatgcatctgtattgattaagcgtggaattgacagcagttctattgcgaacattacagctgctctgatcggagcaaaagataagcaggcaaaagaaaaaaatgcagaggttattgcaaagttagaggagattattgatactctgaaaaatgatgaggaataagaatgcaaataacgatattttcggtttggatgacgttcgtttggtgtaacatttttattgtactgtgctacattctcagaaaacgatcggttctgctgaatttatccagtatgacaggaatcatcattttatatttgttttgtctgatcaggcttgccgtcccggtggaattgccatggacgaaagtggtatccggaggcagcctgtataatttcctgtatcagatattcgggtgtgaaataacctgtgtggcagggcacgaaatctatgtctatcatatatttgtggtggcatggggagtggtcatggcagttcttttgacgcggtatctgatacagtatcacagagttgtgtcgtatttttcagagatggaaaaaacggaagatacagaattaaataatattttagatgaaatttgtacggataaagaaaagcggaacattaagatcgtacagacagcagcggtagaagtaccgtgttgtattggaacttttgaaaaacggatattgattccggacaaaaaatattcgcgtgaagaattgcattatattattctacatgaatatacacatttggataataaggatatactgacgatacagctgatcaacattctgtgtatcgtgttctggtggaacccgtttgtgtatattttaaaaggagatatgtatcagagtattgagatccgttgtgaccagacggttacaaagaaactcaaatcggcagagcggggtaactatctgacggtgatattaaaagagtataaggcaagtgtgcaggaaaaagaatttcgaaaacctgcaggagccatgccgttgtttgaagatcattcggatcatctgatcgaacgatttcgtctggtcgcggagggaaagcaaagtggttcgcgtattggaagaattctcgttccggtgattgcggttgcactgttggtgctttcgtattcgcttattcttcagccgaggtatgatgtgccagagaatacatataccatagaaaacgaatttgaggatataaatcaagacaatgcatatctgtacgtgtcagatggaaaatattatctccattgtgaacaggggaatgttgtgattgataagcagagcatgaagctttttaaaaaggcgggtttaaaatttaaaggaggaaattaacatgaaaaagaagtttttaattgctgtagcgatttgcgcatcattatttgttgttgcgcctgctgtgagtgtgagtgcagcggaggttgaaccagaggtacagactcagaacgagcagagcaatataggtgttgcaccatgtgcggatgagatcgtgatgaaattccgtattaatgttaaaacaaaacaattacagtatcgtcgttggaatcagaccagaggatactgggtggacgactactggattactttaaagtaatttgaaatttttgccggtgcagctgcaccggcatttttttacaaattattctttcgcaaattataattcttccggcagttcccacgcttgtgcctgttgttcatattccgaagcacgggagagaagatccccggcagagcatggatcacagagttcattttctgtcagcgtacggtaacattccgccagtcgcagcaatgctttttttcctgaaatttcaatatccagaacaggctgtgtctcaaatgcagcattgtaaaaccacagagaagcttcctggggattctgccgttcccggtagtattgtccgatctcataacagatttcggagcaggaagaactgcacatatctttcagacagatcgaaaagaaatcatccacagaattttggatacgggcagcgtgcgccagaatacacgcggattctgcatcagcgtgcgcttcatagtgtatcgaaaaataatccgccgcgcgtagaaaatcttcctcatccccacatttataaagttctcttgcatacatgcgcgtgattttctccgagaggacatgattttcacgaaatgctttttcaaacatggcaaaatcccgtttggcatgcatggcatgtgggcggtgcagaatatcaatatcactgtcatagatgacgggatcggtgcggatcgtttcgtgaaccggatcgacccatgaaaacgtgcgcaggcgtttaaaaagttttggccgtggttctttcttacagttctgcacggtgttgaaatccggtggggtgatatagttcatctgaacaatttcaatttccggaagaagagcaccttttaaccggagaaaacgtctttgattttccagatcaaggtattcgtccgcatccggacagtagatgtaatccatggttgcaagcgaaaacgcataatttcttgcggcggagaaatcatcacaccaggtaaaatcatagatccggctggtgtattgtgcggcgatttctttggtgcgatctgtggagccggtatcaacgatgatgatttcgtccatcatggaagcaacggaatccaggcatcttgccagaaccggttcttcatttttgacaatcatacataaacttattgtgatcataataacagatggtccttccgaggtttttcttttatattacactatcctgcaacagttttacatagaaataaagaaatatacttgtatcttttttgaaccatggctataataaaatttatgtggtgtgaaattataaaacaaattttggcagatatgcgccagccacttcaatatgtgccatgggcactgattattgtggtacttgggctggttgtaacaatcgtgctttctgaaaaaaaggatggaaaaaaagcatccgtccggttttttcgtatactttttgcgatttatatacttgtggtgatacagattacctttttttccagagaacccggttccagaaatgggtgcatgaatctggaactgttttccacgtggggatacagcgtggttacccatgcattttttattgaaaatattcttatgacagtgcctttcggaattctggcaccgctttgttttcgccggctgcggccgatgtggaaatgtgttgtactcggaggtgtctgttcggttctgacggaactgagccagtatgtgacgaaacgcgggtattgtgaagtagatgatatgctgaccaacaccataggtgttttatgtggttgcattttgttatggctgattgaactgataataaaacaaaggagaaagaaatgaagtatgattatctggtggtaggagcgggattatatggctccgtatttgctcacgaggcagcaacaagggggaaaagagttctggttgtcgataaacgtccgaatattgccggaaatgtttatacggaggacattgagggaatccatgtgcacaagtatggtgcacatattttccataccaacaataaaaaggtgtgggattacattacaaaatttgcggaatttaaccgctttacgaattcaccggtagcaaattacaaaggggaactatactcgcttccgtttaatatgtacacctttaataagatgtggggtgtggtgacaccggaggaagcagcggcgaaaattgaggagcagaaaaaagccgcaggcattacagaaccgaaaaatctcgaggaacaggcgatcagtcttgtgggaaccgatatttacgagaaactgatcaaaggatatacacagaaacagtgggggcgtaagtgtacggatctgcctgcttttattatcaagcgccttccggtgcgcctgacgtttgataacaattattttaatgcgctgtatcagggaattccgatgggtggttacacaaagatggttgagcatctgctggagggaatcgaagtccggcttgggattgattatctggagcagaaagaggaactgaaggctctggctgagaaaacggtatatacgggagcgatagatgcgtattttgattattcgctcggcgcgttggaatatcgttccgtgcggtttgaaacagaacttctggatactccgaatttccagggaaatgcagcagtcaattatacggatgcccagacgccgtggacacgtatcattgaacacaaatggtttgaattcggcaaggatgatgagggacatgatttaccgaagactgtaatttcgagggagtacagttcggagtggaaaccgggggatgaaccgtactatccggtaaacgatgaaaagaacggagctctttatcagaaatataaagaacttgcgggaaaggaaaaaaatgtaattttcgggggaagactcggagagtataagtattatgatatggacgctgtgatcgcttctgcactggaaatgtgcgaaaaagaactgggataggcttctagaaagatacaaaaaagagcattcgctgtatggttacagctggaatgctctttttgttatacatatttgtccagcatcattccggaatagatggatgtgatgtatggggttgcaaagttgtgaccgggatttttataggccacgactatcttgttgacatagttcatcggattgatggagatattttccgcttcttttccgatggaatcccgaaattgggataaagtttcaaatgtattctgatcacgttccggaacaaccgcttcacggagcgcttctttatcaatagagatggagccgttctcgttcgtgaccagaccgatgtcctgtaaagaactccggctcgaaccggatatggaaagaatctctgcctgaagtttgtttccggcactggcattggtgtctgcatacacggctgcggtggagagtatggaattataggcatccaccagagactggatattgtccgcaattgcatccgtatctgttttaaatccaatgtttactttctcaccatcggttggctgatgtaaggtcagttcaaatacctgattgatggaaaatgtgttggtcagggaagagtgacttgtgccattcagtgtaaaggcggaactctgtgcaggggaagtgatgcggtcaattcccagctgatccatgatttccgtggaacctgtgctggcatccggtgcaatggaaaaaagttcggtttcgttatctgccagaccggtctgtgtggaagtcagtttcagcgcactcgaaccgtttccatcggacagtatttcggcggtaattccgagactggaggagttgacaagcctggccagcttgtccagcacatccagattggtttcatcggaattgatattatattgaaattcatatgcagcaccgggcgtattcagatcaaaagaatatgcgccgggacgcattgacagcgtattgtcttttaaaaaacgtccctgattgctctggggtgtggcaagccgctgcacttcaatgtcaaagttattggttttgctttcttcacttccgtcgccgatataggtcacactgactttttcgtcatcggaagacatggcaactttcttcttaaaagaatcctcaaatgaaccatactggtcggaaagagatgccacaacgttctgaatggagcgcgcattttccttgatgtctatggcatattttttcgcatcggtgagattcggaattttataaagaggcgaatctttatttattttgacaatttcattataaactttgcgcagttcacttttcttgtgtgaatcataacgtgaaaccgttttctgggcatacgtcgagatataataagcgtaggcattatcaatctttgccattgagattcccctcctttcttccgtgaattgaggattgagagcaggacagcaaaagacctgttctcctgtgaggtgcatatcctttgcacccaaaaagattctacttgaattgtatatcggcatcataccgcattttcactacctctgtatatggtaaaaattcactaaaaattcattatttggcgtaaaagctgcaaaaaatcataaaaaccattgtaaaagatgttgacggacatggaaaatcatgatatagtatgaaagcttggaagtaggtcttttttttatgcctttttttaggcgagacaaaacacgaaaattaaaacggaggtggaagttgtgcgtacaaagattacattagcctgcacagaatgtcagcgtcgtaattacaacatgacaaaggacaagaagactcatccggacagaatggaaaccaagaagtactgtagattctgcaagactcatacagttcataaggaaaccaaatagtccgtacagagcaaaggagttatgaaatgggacagacagaaaacgttgaaaaggctccaaagacaagctggtttgacggtgtaaaggcagagttcaaaaaaatcatctggccggaacagaaatcagttgtcagacagaccattgcagtgattgttacatccgttgtagtcggtcttattattgcactgctggattgggcaattcagcacggtgtgaatttccttgttggtttgaaattttaacggaggcatagtgatttatggcagaggcgaactggtatgtagttcatacctattcaggttatgagaacaaagtcaaagcgaatattgacaagacaattgagaacagacatctggaagaccagattttggaggttcgtgttcctcttgaggaagtgacggaagttaaaaacggagtgaaaaaacaggtttccaagaaaatgttcccgggctatgtgctgattcatatgattatgaatgacgatacatggtatgttgtccgcaatacccgtggtgtgacagggttcgttggaccgggaagcaaaccggtgccactcacagatgctgaaatgagaccgctcggaatcaaggctgaaaacgttgtggtggatttcgcggaaggcgacatgattgttgttatcggcggtgtctggaaagatacctgcggtgtgattacagcgatgaaccataacaaacagacggttacgatcaatgtggatctgttcggtcgcgaaacaccggtagaagtaagtttcgcagatgtaaagaagatgaattaaggaggcaattccaatggcaaagaaagttgaaggatacattaagctgcagattcctgctggaaaggcaacacctgctcctccagtcggaccggcacttggacagcacggtgtaaacatcgttgagtttacaaagcagtttaatgcaaagacagccgatcagggcgacttaattatccctgtagttattacagtatatgcagacagaagctttagctttattactaaaactcctcctgcaccagtactgatcaagaaagcctgcaagatcaagtctggttccggtgaaccaaacaagacaaaggttgcaaagattacaaaggcacaggttcaggaaatcgctgagctgaagatgcctgacttaaacgctgcaaatatcgaagctgccatgagcatgatcgctggtacagcaagatctatgggtgttgaagtagtagactaatctaagtttaagaagaaatgtgggagggtaattgatttcccacccgatattaccaccaggaggtttatatttcatgaaaagaggaaagaaatatcaggacgctgtaaaggcatacgatagaagtgctcagtacgatgttgctgaagcaatcgacctcgtaaagaagaatgccacagcgaaatttgatgagacaatcgaacttcatcttagaacaggctgtgatggacgtcacgcagagcagcagatccgtggtgcggttgtactgccacacggaacaggtaagaccgttaaggtattggttttcgcaaagggaaccaaggtagacgaggcacaggcagcaggagctgacttcgttggaggagaggaattaattccgaagatccagaacgagggatggttagacttcgatgttgtagttgctacaccggatatgatgggcgttgtaggacgtctgggacgtgtccttggaccgaagggcttaatgccaaacccaaaagctggtacagttaccatggatgttaccaaagctgttaatgacatcaaagccggtaagattgagtatcgtttggacaagacaaatattatccacgtgccagttggaaaagcttcatttacaagtgagcagttgaacgacaacttccagtctcttatgggcgcaatcaacaaggctaagccttcaagcttaaagggtcagtacattaagagtgctgtattaacttctacaatgggacctggcgtaaagcttaacgttgtaaagattgctcagtaatagaaaaatcagaagtcgggaaccggaaacggttcctgatgaaatgtatgatcagacttacacaagcaaaatgcggaaaacacttgacatccgcataagaacatattataatagcaaagcatattgccgaagacagtaaggtgctatcgcatattgcgacagcgtaaagggaaatccacctaccgagggaatttttgatgataatcgtcataaagaatgatacccctctgctgtaaggcggagggtttttattatacctcacgctatatgcaagaaataaaataaggaggtaaatgaatcgtggcaaaggtagaattaaagcagccgatcgttcaggagatttctgaaacaattaaggacgcacagtcacttgtagtagttgactaccgtggacttacagttgctgaggatacacagcttcgtaaaaatttaagagaagctggcgtaacttacaaagtatacaaaaatactttagtaaaccgcgcaatcgagggaacagagttcgagagcttaaaggatgtcctggaaggacctaacgcatttgcagtatctacagaagatgctacagctccagccagagttctggcagagttcgcaaagaaggctccaagccttgagatcaaggccggcgttgtagaaggaacatactatgacgcagagggaatgaagcagatcgcaagcgtaccaagcagagaagtacttctttccaaattacttggaagcttacagtcacctatcacaaatcttgctcgcgttcttaatcagatcgcagagaagggtggcgcagcagatgcagcagcagacgcagcaccggctgaggaagcaccagcagcagaataattattaaaaataaaattataacggaggaaataatcatggcaaagttaacaacagcagagtttatcgatgctatcaaagagttaagcgtattagagttaaatgaccttgtaaaggcatgtgaagaagagttcggcgtatctgcagcagcaggcgttgtagtagcagcagcaggcggagacgcagcagcagctgaagagaagactgagttcgacgtagagttaacagaagttggaccgaacaaggttaaggttatcaaggttgttcgtgagatcacaggtcttggactgaaggaagctaaggacgctgttgatggcgcacctaaggtaatcaaggagcaggctgacaaggcatctgctgaagacgctaaggctaaacttgaggctgaaggagcaaaggttacattaaagtagtctgtgcgtaagcgacgagaaaccaataataacccggcagagatgcttgcatttctgttgggttattttatttagctgtatcccctctttctatctgaaaaagttctcaaaaataattcttgcaattcccttgattttattgtatagtataagttgcactattgtggtgcactaggcatttccatgctcttttttaggaaaaactagattgaaataaaaacgagaggtgaaacgtcaatggagaaaaacagaatacgtccagtcaaggctggaaaaggcttgcgtatgagttactcaagacagaaagaggttttgcagatgccaaacctgatcgaagtccagaagaattcttatcagtggttcctggatgaaggtttaaaagaagcatttgcagatatctccccgatcacggattacagtggtcatctgagtctggatttcgtcgattttacactgtgcgaagacgatgtgaaatatacaatcccggaatgcaaagagagagatgcgacatatgcagcacctttgaaagtcaaggttagacttcataacaaagagacagatgagattaacgaacatgaaattttcatgggtgatcttcctcttatgacagagacaggtacgttcgttatcaacggtgcagaacgtgtaatcgtcagccagttggttcgttcccctggtatctattacggaattgctcatgataaagtgggtaaaactctttattcatgtactgttatcccgaaccgtggtgcatggctcgagtatgagactgactccaatgacgttttcagtgtaagagtagatagaacccgtaaagtgccgattaccgtattgcttcgtgcacttggtgtaggtaccaaccagcagatcattgacatgttcggcgaggagccaaagattctggcatccctgcagaaggacccggcgatcacagagcgtgagccacagggaagttttgaggctggtttattagagttatataaaaagatccgtccgggtgagccgctttccgtagaaagtgcggagagtctgatcactgccatgttcttcgatccgagaagatatgacctggcaaaagtaggacgttacaaatttaataagaagcttgctttaaagaaccgtatcaacggacaggttctggcagaggatgtactggatccttctaccggagaagtaattgcagaggcaggcacaactgttgaccgtgatctggcagatcagattcagaatgctgcagttccggcgctctggattcagacagagacacgtaacgtaaaagttctttcttctatgatggtagatatcagaagctggattcctgaaattgaggacccgaaggctattggtgttacagaactggtatattatccggctctgcagcagattatggaagaaaacgagacattggaagagcgtatcgctgcaattaagagagatattgcagacctgattccaaagcatattacaaaagaggatatcttcgcatccatcaactataatatgcatctggagtggggcatcggaacagatgacgatattgaccacttaggaaaccgtcgtatccgtgctgtcggtgaattgttacagaaccagtatcgtatcggtctttcccgtctggaaagagtggttcgtgagcgcatgacaactcaggatcttgagggaatttccccacagagtctgatcaacatcaaaccggttacggctgcggtaaaagagttcttcggatcttcccagctgtcacagtttatggatcagaacaacccactgggtgagctgacacataagagacgtctttctgcattgggacctggcggtttgtccagagaccgtgccggattcgaagtacgagatgtccattattcccattatggacgtatgtgcccgattgagacgcctgaaggaccaaacatcggtctgatcaactctctggcatgctacgcaagaattaacgagtacggatttgttgaggctccgtaccgtaagattgataaatcagataaagacaatcctcgtgtcacagacgaagttgtatacatgactgcggatgaggaagataattaccatgtagcgcaggcgaacgaaaaactggatgaggatggacattttgttcgtaattccgtatccggtcgttaccgtgaagaaacgcaggagtacgataagactgcattcgattacatggacgtatctccaaagatggtgttctccgttgctacagcactgattccgttcctgcagaacgatgatgcaaaccgagcactgatgggatctaacatgcagcgtcaggcagtgccgcttcttaccaccgaggcacctgtagtaggaaccggtatggagacaaagacagcggtcgattccggtgtctgtgtacttgcaaaagaagcaggtatcgtggagagttctgagtctaatcgtatcgtagtacgtgaggaggacggaaatcgcagagaatatattctgacaaagtttgcacgaagcaaccagtccaactgctacaaccagagaccaatcgtgttcaagggacagaaagtagcaaagggtgaggtgatcgctgatggaccatctacatccaatggtgagctggcacttggaaagaacccgctgatcggcttcatgacatgggaaggttataactacgaggatgccgttcttttgagtgagcgtctggtagagtatgatgtatatacttctgtccatattgaggaatacgaagtagagtctcgtgatacaaagctcggaccggaagagatcacaagagatgtaccgggtgtcggtgatgatgcattaaaggaccttgacgagcgcggaatcatccgtgtcggtgctgaagtccgtgccggagacattctggtaggaaaggttacaccaaagggagagacagagcttaccgcagaagagagactgcttcgcgcaatcttcggtgaaaaagcgcgtgaggttcgtgacacttccctgaaagtgccgcacggtgcatatggtattgttgtagatgccaaagtatttaccagagaagatggcgatgagttatctcctggtgtaaatgagtctgttcgtatttacattgcccagaaacgtaagatttctgttggtgataagatggccggacgtcatggtaacaagggtgtcgtttcccgtgtattacctgtag

SEQ ID NO: 209 - DNA, 7981 bp, unidentified
  source 1..7981: mol_type = unassigned DNA
atgatcagagtaggaatcatcggagcaaccggttatgccggaggagaactggtaaggatcctgttaaaccacaaggatgccaaaatcgtatggtacggttcccgaagctatatagataagaagtattatcaggtataccagaacatgttccagctggtggaggatatctgcaaggatgacaatctggaagaactggcgaagcaggtggatgtgatctttaccgcaacccctcagggatttctggcgggccttttgacagaggagattctctctcaggtgaagatcgtggatctgtctgctgattaccggatcaaggatgtggccacctatgaaaaatggtacggcatcgagcacaaatctcctcagttcattgaggaagcagtatacggactctgcgagatcaatcgtgacaagatcacggagaagaccagactggtagccaaccccggctgctacaccacctgttcgatcctgactgcctatcccatggtcaaggaaggcatgatcgatgtgaacaccctgatcgtggatgccaagtccggtacctccggtgcaggaagaggcgccaaggtgcccaacctgttctgcgaagtgaacgagaacatgaaagcctacggcgtggcaagccacagacatacccccgagatcgaggagcagttaggctatgcgggcaactgccaggtgaccattaattttaccccgcacctcgtacccatgaacagaggaattctggcaaccgagtatgcaacactgaagagaaaaccggacggtacacttcctacctatgaggaagtaaaagctgtctatgataaatattatgcaaacgagaaattcgtccgtgtgctggataagggcagctgccccgagaccaagtgggtggaaggcagcaactacgtggacatcaattttgtcattgatgagcgtaccggccgtatcattatgatgggtgcactggataacctcgtaaagggtgccgcgggacaggcggtacagaacatgaacctgctgttcgggcttcctgagagcgaaggcctggagctggttccctgcttcccttaaagcagatacggaaaggattagaaaggataaaacacatacatgaacaaacagtttacgatcaaacccatgaccatagaagattatgacggtctgcatgccctctggatgaccattcacggcttcggtatccggagcatcgatgattccagagaaggtgtggaacgttttatcaaccggaatcccggcaccagtgtggtagccatcggggaggatggagccgtagtgggcggcatcctctgcggccatgacggacgacgaggctgtctgtaccatgtatgtgtcagagaagattaccgaagacttggcattggcaaagccatggtcgtccactgcatgaatgctctgaaagcggaacatatcaacaaggtcagcctgatcgcttttacccagaatgacatcggaaacgctttctggaaatgcattggatggacaaagcgggaagacttgaactactacgactttactttgaatgaagagaacattacggcgtttaataaatagatgccaggattgtggaagtgcgtagcacgaagcaatccgtaggcatcaaagtcgggggcttttgaccccgacatcataaataaaacggaagcgaaaggagattattccaacatgaaacagatccagggcggtgtgaccgcagcaaaaggctttgaggcagcaggtgtggaggctgccattaaatatcagaatcgtaaggatatggcactgatcgtgagtaaggcaccttgtaccgtagccggtacttttacctccaatgtggtaaaggcggctcctgtactgtgggataagcagatcgtggaacattctgcatttgcacaggcagtggtagtcaattcgggaatcgccaatgcctgcaccggcaaacagggactggactgctgtgaagcagaagcgaaatgtgccggagaactgttgggcgtgcccaccgatgccgtactggttgcatccaccggtgtcatcggtatgcagattcccgtagacaagatcaccgccggcatcgagaaactggtggcagccaaggcagatactctggaggctggctccgatgcagcccatgccatcatgaccaccgataccatttccaaggagatcgccatcgagacacagatcggtggcaagactgtgactctgggcggtatgtgcaagggttccggtatgatccatccgaatatgtgcacgatgttaggttttgtaaccacagatgtgaaaatttccaaggagatgctgcagaagtgcgtcagcgcagatgtagtggattccttcaacatgatctccgtggatggcgatacttccaccaatgatacactgctggtgctggccaacggtatggctggcaacgaggagattaccgcagagggcgaggattacgacaacttctgcaaggcactgcatgagatcaccacattcctggcaaagaaaatggcaggagatggcgaaggcgccacagcactgttcgaaaccaaagtaataaatgcagtcagcaaggaagatgccagaactctggcaaaatccgtgatctgttcttctctgaccaaggcagctatcttcggacatgatgccaactggggacgtatcctctgtgcactgggttattccggagccaaattcgacccggaaaatgtggatctgtattttgagagcaagagcggcaagattcatatcttcggtaatggtgtggcatgtgattacagcgaggaagaggccacgaagatcctctccgatccggaagttaccgcactggtggatatgcatatgggtgaggcagaagctaccgcatggggctgtgatttaagctatgattatgtgaagatcaatgcggactatcgttcctaaaaaaagaacgaccggaaagataaatgacaggcggatcacggtatctgcggaaatgaggataaaaatggaaaaagatatggaacaggtaatgaaaaaagcagaggtgctgatcgaggcgcttccttacatacagaaattcaaccgtaagatcatcgtggtaaaatacggcggcagcgccatgagcaatgaggaactgcagaaaaacgtcatcaaggacgtaacgctgttgaaactggtaggtttcaagcccatcatcgttcacggcggcggtaaggagatcagccgctgggtcggcaaggtcggaaaagaggcaaagttcgtcaacggtctgcgtgtcaccgatgaggagacgatggagatcgcggaaatggtactgaacaaggtaaataagagccttgtgaccatggtggaagagctgggcgtgaaagcagtaggtgtcagcggtaaagacggcggcctgcttcaggtagagaaaaaatattccaacggtcaggacatcggttatgtgggtgagatcaccggcgtgaatccggatattctctttgacatgctggagaaggattacctgcccattatcgctcccattggactggacaaggattatcacacctacaatatcaatgcggatgatgcggcctgcgctatcgcaaaagcagtacatgcggagaaactggcatttctgacggatatcgagggattgtacaaggacatcaatgacaagtccacatttatttccagattgacagcttccgaggcagagggactgatccacgatggttacatcggcggtggtatgctgccgaagctgaacaactgtacttctgcgatccgcaacggtgtaaaccgtgtgcatattctggatggacgtctggcacactgcctgttgctggagatcttcaccaatcagggtatcggaactgcaatcgtatccgatgaggagtgaaaaaagtgtgcagaataagcctggcagcttattccgcacccggctatttgtgccgcaggcgtcacaaagtagccattatcgcaaaaccaaattagaaatttggtttgcgtttccttgacgaaaagaacgtctgcggaatggagaggaaaaatgagcgacaccatgaaagaatatattgcagaggcggaaaaagacctgctgcatacctataaccggtatcagatcgttctggataagggcgaaggcgtacatctgtatgacaccgatgggaaaaaatatctggatttcgtagcgggaatcgctgtatttgccctgggctatcagaacaaggcatacaacgatgcgctgaaagcacagatcgacaaggtgatccacacctccaattattattacaacgtgcctgccatcgaggcggctcgtaagatcaaaaaagtatccggcatggatcgtgtctttttcaccaattccggtgcggaagcagtggaaggtgccattaaggctgccagaaaatatgcgtatctgaaggatggctgtaccgaccatgagatcattgccatgaatcactccttccacggcagaaccatgggagctttgtcagtaacgggcaatcccaagtatcgtgaggcgttccagcccatgatcggacatatcaaatttgcagaactgaatgatttccagagtgtgcgggatcaggtgacagacaagacctgtgccatcattatggagactgtacagggcgagggcggactgcgtcccgctaatgaagagttcttaaaacaggttcgtgatctgtgcgatgagcgggatatcctgctgattctggatgagatccagtgcggcatgggacgtaccggttacatgtatgcatggcagcgtttcggcgtgaagccggacatcatgacttctgccaaggcactgggctgcggtgtaccggtaggtgcatttatgatgacggagaaagtagcacagcattctctgacagcgggagatcacggaaccacctacggcggtaaccccttagcctgcgcagcagtggaaaaagtgcttgatttattcgaagaggaccatataatagaacatgtgagagaggtggctccctatctggaacagcgtctgaacgaactggcagacaagtatgactgtatcaaagaacgccgtggtgtgggactgatgcagggactggtatttgaccatccggtaggagacattattaacagagcattggagaagggattaattctgatcaatgccggtgcggacattatccgcttcgtaccgcctctcgtgattacccgggaaaatgtggacgaaatgattgctattttggacacctgtatcgaataagaggtttaggtgaatttatgtttttgaaaaaaagaattatcgctacagcagctgtgattgccatggctgctgcagctgtttacggaagtacgcaggagatgagtcagacacaggagagcggaagcggactgcaactgtttcgaggaaaggagacaatctattgctggtattccgatgaggcattgtccggttatatcaatgcggcagcagtatccttcggagaacagaacaatggagtccgtgtgattcccgtacttacttctgacagtgaatatctggaagctatcaatcaggagaccctgcattccgatcagataccggatatctacctgttgagcagtgactctctggaaaaggcttatctggcaggactggcatcgaaagtgcctgacactgtgggaatctgcaatacagaccatttttcccaggcggctctgtctgcggtaacctatgatcagaagctgatcggttacccggtttattttgataccagtgcgttggtatataatgaagattatcttcgaacctgggcaacccagcaggcggagaaggaactggcgggaagcagtgagaatgatgaacccataggggaaggagaagagatcatcgaggaagattctcttccggaagaccagaccacggaacaggtgacagcggatgaggcagcggtaaatgcgctggcagagcagtatttcgcggaagcacttccctccacagtggatgatctgctgaatattgcagatacctttgatgcaccggaaggtgtggaaggtgtcatgaaatgggacgtgaacaatattttctacaactactggatcgtaggcaactacatgatcgtaggcggtgatcccggggatgacagaaatgatattgatatcaataatccggagaccattcagtgtctggaagtgtacaaggcactgaaccagttcttctttattgaatccgatacggtgacttatgattctgtgatccaggactttatcgatggcaagaccatgttcaccatcggaaccacggatgtggtcaaacggctggaagaggcaaaagcggacggcagccttgcatttaattacggaattgcccgtatgccggatgtcagcgccgaactgcagagcagatctttgtctgttacgggagcggcagtcatcaacggctattcggaacacaaggaactggcggactgcttcgcagcgtatctggcagaaggatatgcggacggcctgtatgaacgctccggcaaaatgccggcaagtcttcaggcggcagagaatgcagacaacggtgcgcttatgatctttgccgatgaatatgcggacagtgtgtcattgccgaagatgctagagacgggaaatttctggatgcagctggaagtactgttttccaaggtatggaacggtgacgacgtgactactctggtacagcagctggacgagaccatagccggacaggtaggtggtacagagaaataaaaccgttacaataaaatatgaatgaacgaaccggtcacaggatagactactactaaaaagaaaaggtggtagaatcctatgatcggttttttgattgctttagtttccggtgcgctgatgagcatccagggagtgttcaacacccaggtgacgaaatccaccggcatctggaccgccagtgcatttgtgcagtttacagcattgctggtatgtctgggggcatggctgtgtacggagcggacttcattcttgaagatagcgcaggtggagcccagatatatgcttttgggaggggccatcggagcctttatcacctacactgtgatccgcagtatggatgccctgggaccggccaaagcggtaatgcttattgtggtcgctcagcttgctgtagcatatattatcgaactgttcggatggttcggtgtggagaagcagccctgggagtggcggaaagccatcggcatggccgtggcgattgtgggtattgtgattttcaagtggaaatgatccagggctatcctcgtagcggcaattttgcgaatgggttctgaatcgtgaccacaaatgcgaaaacggcttgtaaattccgtgcgattccagtacaatgaaagttaacagcatagagaggcaatcccctgaaattttgtgaaggaatcaggaaaatggaaaggggactatgatgttttcgataaggttttttaaaacaaaatatgcaggtttgatcggaatgtttttcagtctggtgatgttcatgaccggctgtcagaggaaggatgaggccattgtgctgattccatccggagaagatgtggcggaatttccctcactggaagcggtggaacaggcagcggagcctgcaggcagcagcgtgacagtgcaggaaccggcaaaggctgaaccgcagatgatatatgtctatgtctgcggcgcagtgcgggatcccggagtcgtggaagtgccggagggcagcagagcggaggaagccctgcgactggtcggaggtatgacagtggaggcggatcctttttatgtgaatctggcggaaacggtgacggatggtcagaagctgtattttccaacgttggaggaagcggagactctggaagccgaggtaaaagcgacggcggagggacttgtgaatatcaacacggcatctgcggaggaattgtgtgcgctgccggggatcggagcttcccgggcggcagatattgtgcgctaccgggagcaaaacggagcctttcagacgaaggaagacattatgaaggtatccgggatcaaacagaacgcgtatgacaaattgtgtgataagatcacggtacaatga

SEQ ID NO: 210 - DNA, 18408 bp, unidentified
  source 1..18408: mol_type = unassigned DNA
tcagcggaacaatgcctccccgttcaccggttccccgttgtgggtcagagcaaagtatacgttgcttccttcggcgctgtagtatttcgtgggcgctgccacactgccgatggtgtcgccgggattcacataggagttctctttcactgtgatctccgtcagctgtccataagtggcctcatagccgtcacccagatccagggtcaccgccttgccgatctcctcattttcgaagatcgaagtcacttttccctgcgcacaggcggtcactgccgtaccttcttccgcggaaaaaatggtggcgggattgtatttatactgatccagtgtagcaaaataagtgctcttgtccatagagtaatgcatcagaatatcactctgcaccggttgctgtaatccgtcgctttctgcaaagtgcagtgtcttctcaacgaccacatccccgcctgctgtctgctttcccccggtctcttccttttgtcggtcggcatcggaattctgctgctctttctgtgcggcctccagcagggtctcctgatccgtcagccccggaatctctacgttgccggagcctacctcctggggcatatagtccagatcatcctcggtgacaggagttcccgcgatctcatttcccgctgtattatttgccgtcagtccggggatgttctcgtcctccttcagaagatgttcgtcgttattctccgtgatctcctgtaatttgtcatccgcattgttgggaagcgcagtgaagtccaaggtataaccatcatccctggactccacattctgccccttcatatagacccctgtcatggtcaatgctgccagtacaaaggctgaagaggctaacattataatacgttctttgttaataccgctctttttatttcttctcatatcctatccgcatccttcctgttccctgagtcaactgcctgctatacaatcgtttcaaccactttccctggtttatcctatagtcttgcccgattcatgggttttattcagaatgtcttcgatatgaaatttgcatttatttggaactattcagagccatgtaaatagcgtcgaatgtttgcattcgtaagaacatttgatgctatttatagggcgaagtaactgaatagttatatttattctatgcctgtgcggcataggcagccatatccacgtgctgtaccgtacccacatttccgttttcgtataagaaaataccggtcttgcggaccacagcattggtcgcattggcattggtagtgccgtcctgagccttacggtctccctgcagggtaaaatccgtagaaacgttttgcagacagatagcaccgacacccttgtcagaaagtttgtacagtacgtcgttgccgttttcatccttgcaccagatttttaattttgaccagatggaatcgttctcatcgatccagccgttgccatcctcatcatactgcgccagatctgtaaagccatccccattccgggtgccgaacagctcactgccgtcgttgatagtgccgtcaccgttcttgtccagtgccagatagccgctgccattcagcacggagatctcttcttccttgccatcggcatccagatcaaaataaaaggtctgatccgacacttctgccacatcagtatccaggttgatcaccagcggatcatggagcgtgaattctgctacattgagttgctctttgtagtattcctcgcatctgcggctcatatttacatttacattaaaattgatctctctgccatccttggtccgtacgcttcccacggtggaaaaactggtatcctcctgttctatgttccaggtctcgctcacatagttcaatattttcacacgggacgtgaccagattgaacacgtctgacgcaggtgttgcggttccctgtgtgctgccggaattcgtctgggtattatttacgctattccctgtattccagctgtttccggtctgattaccgctgctccatccgttttcctgcatccagtcccgcaaagtgctgttcctggacgggaataataaatcaaaaatataacgcaccgtatattcccggatggtagacaatgtctgttcactggcactgcttcgcatatcccatctggcagaagataccagcaaacgactctgccagtctttggctgtcatcgtggtgttctctgcagtgttctcctgttcctccgtgttctgtgtggtatcctcaccattcggtgtcttctgtcccttagtggatacatctgtcagacctgcctgataatccgttatctcaaatcgtctgacgcttgtcttagaagcgtgatagcttctggcggaatccattcctatgcttgcggaatcaattctcaaatctgtaattttctcctttccccgacctcaccacgaaccaacagggcgcgcttcctgtaacgtttaacagttcaccgccgcatgtattcataaaagcgcctgctccgcagtcgacgccgctaagcggctcatcttttatttcatacatgcggcgctccgctcatgcaatatcatatgttctgctttgtgtgccagcatccacgcagaacatatgatattgcatggctgaactgttaaactaaaaaaagatggtaaagaaacagaatacatataatatgcctctgtctgattaccatccgtggtgtcattatcaaactgtaaaaaataagtagcaggaagtgactggccttgtcacctctctactacttatatcgtccgctatggacattttatttagtgttaatttactgctgtttgggctgagtgggagcgccaggggttccgggtgcgggaggcaccggtctgccggctgctttcagctttgctgcgatcatgctggctaccatttctctggtcaccacgatgttgccaccgaagggattgatcacgaatcccagcgccgggctgatattgccctgtgcatctttgcgcagcagcattcccgcataatcgtcaaagttcatggcgaaagtctgctgattctcctcatctctccacctttttagctctgtccagtcagtgaacgccatgaagaacttccgaccgtcctcggtggacagcatcgggaactgtactttggcatctcttgcgatggtcacccggccgttttcatcgggcacaggcaccggatcgatcacgaccggagacaggaactttgctttctgcagttcatccaggaacatctgtctgtgttccggggtgtcctctgcttttaataattcaatggatcccaccatcatggggttggataccggtttgttaaattccatattttttctccttacttctcattgtaactattcagcctctcttcgcgaaacgcatctgcgatggttcgtcacatgtctctgaatagttacactcggttatagttgatcaggcatcccttcaggatgatctgacgttcttcgtcggtcagctctcccagcttcagggtgaattccttcatgccttctcctgttgttaccacatatgccttaatttcctcggccttgtcttccacggctttcttaataccaggaatgaacaggtaatccagattcttgaaaggcaggtctccgggctggatcaggaaaggaagcatgccccagttgatcaggttggaacgataacgcttggtggcatactcgttggcaatatttgcccagccgcctaataccttctggcaggaagcagcctgctcacgggcagagccgtctccgggcttcactgcgaaaatagtggaaccgaatccggtgttctcgcgacttgcatcgggatactgtttctttacttcacccataacatccttcagtaccggaactgcctgacagggatgtccgccgttcatacgctctttctctgccttctggatctccttggcacgtcctacatactgcggatccttacggcttaaagtgaactctgccagtcccagaggattggagcggtaggaagaggtctcaccggatggaatcagctcatcggtagtagttacgggatcgtggatctcggatactacctgcagtatcagattctcaggcagggcacccatagcgggccagtccttgatattggggccgaactggatctctacgctctcgtctgccacaccgtgggaatcgaagacacggttcttgtaaatattgctatcgaaatgatatttgtattttccgaaatctccatcgaagtccgttgcggaagtcagcacacccttgttggctgcggtggctgcgatggaacgggcatccatcagagctacggaagcgatctggccgttctgcagcttggagccttcacggttcgggaaatttctggtagagtgacggatactgaatgcgttattggcaggtgtgtcaccggcaccgaagcagggaccacagaacgcagtcttcatcactgcaccggtctctaagatggtagccgcacagccgttgcggatcagctccatgtatatgggcatggatgcgggatatacgcttaaagtaaactcatccgcaccgatgtatctgcccttcagaatgtcggcagccgcacagatattctcgaatccgccgccggcacagcctgcgatgataccctgatctacaatgaacttgccgttctttactttatttttcagagtgaagtctacagcaccgtccagacttactttcgcacgcttttccgtctcatccagaatatccatcaggttcgcattcagctcttcgatggtgtaagtattgctgggatggaacggcatggcgatcataggacggatcttgtccagatccacctcgatcaatccatcatagtatgccacctggccgggattcagttccttatagtcttcggtacgtccgtggatctcatagaactcacggatctggtcatcggtcttccagatggaggacagacaggtggtctctgtggtcattacgtcaatgccgatacggaaatcagcactcagggaagccacgccgggacctacgaattccattactttattttttacatagccattcttgaatactgcgccaatgatagccagtgccacgtcctgaggacctacacccttcacgggagcaccctttaagtatacggctaccacgccgggcatgttgatatcataggtctggttcaacagctgttttaccagttcgggaccaccctcgcccatagctatggtacccagtgcaccgtaacgggtatgggaatcggaacccaggatcatcttgccaccgccggctaacatctctctggcaaactgatggataactgcctgatgagggggtacatagactccgccgtattttttcgcacaggtcagaccaaacatgtggtcatcctcgttgatggtgccgcctacggcacacagggagttatgacagttggtcagtacatagggcatggggaacttctgcagtccggatgctctcgcggtctggataatacctacaaaggtaatatcatggctggtaagcttgtcgaaacggatcttcagcttgtccatattgccggaggtattatgctcctgcagaataccatatgccatggtgtttttcgctgcttcttctttggagatcgtaatgccggtcttcgcctgtatctgactggctgcttccggggtatccgctacgatgtccgtaccgtttaccaggtaagcgccgccctgtgttaactgaatcatgctcgtcctcctgttattccacttcttatgcgtaatgtgcatctaaatgtgcactcctttcattatactggattgttttctcagatgcaatgatcttataggatgtttttgccactgtaccacgctaaattttatttttctccgggaaccattcctcttttgttccggtgttgctataatatcctcagaaattatgccattttccgaaaatctatacgaaaacgacagttgtcggccgaattccggcggcagcggaaaggaaccttatgaatgtagtaatagctatcgattccttcaagggaagtatgacctccatgcaggcgggtttgagcgccgccacagggatcaaacgtgtttataaagatgctcatattaccgtccgtcctctggcggacggcggggagggcaccgtcgatgctctggtaaacggctgtgacggccgtatgacacaggtgcaggtcacaggcccttccggtcaccccgttgtctgtccttacggcatcgtcgacgagacccataccgcaatcattgaaatgtccggtgccgccgggattacccaggtcagcggagaggaaaagaatcctctgaacaccaccacttacggtgtaggcgaagtcatcaaagatgcaatccagaacggctgccggcattttattgtcggtatcggtggcagtgccaccaatgacggcggtgtcggaatgctgcaggcacttggctttggctttctggataaaaacggaaatcagatccgcttcggagccaaaggactggaggatctggaatccatcactacggatcatgtgcttcccgaactcaaggaatgtactttccgcatagcctgcgatgtctccaacccgctctgcggagagcagggatgttccgccatctacggaccgcaaaagggcgctacttccactatgatcctgcagatggacaaatggctggcttattatgccgctctggccagagaacagtttcctcatgccgatgccaaatatcccggtgccggtgctgctggcggtatggggtttgcttttcttaccttctgcaatgccacactggaatccggtattaagatcattctggaagaaacccatctggaaaaatatatccgggatgcagatgtcgtgatcaccggggaaggccgccttgacggtcagacggttatgggaaaagctcccatcggtgttgccaagattgccaaaaaatatgaaaaaccggtacttgctttttccggctgcgtggccaaagaggccgttgcctgcaacgcagagggcatcgatgcctttttcccgattctgcggaacgtggtatccctggatgaggctatgcataccgacaatgccatgaccaatatggcggataccgtagagcaggtattccgggcgcttcagatttttcaccgttaagaatcacaaaaggacatgacccaccggccatgtccctttgtatgtttcaatattgttttattattcttcatatccattcggattgttcttctgccatctccaggagtcttcgcacatctctttgatgccgttctcagccttccagccaagttccttctctgccagagaagcatcggaatagcaggtggcgatatcgcctgcacggcggggtttgatcacgtaaggaatcttcacgccggtagctgcttcgaagttcttcacgatgtccagaacactgtagcccacaccagttcccagattgtagatcttcagtcctgcattctcctcaatcttcttcagagcctttacgtggccctttgccagatcaacgacatggatgtagtcacgtacaccggttccgtcgggggtatcgtaatcatcaccgaagacacccagctctttcagcttgccgactgctacctgtgtgatataaggcatcaggttgttggggataccgttgggattctcgccaatggtaccgctcttgtgagctccgatagggttgaagtaacgaagcaggatcacattccattcgggatctgccttctggatatccgtcaggatctgctccagcatagatttcgtccagccgtaagggttggtgcactgtcccttggggcattcctccgtaatgggaacaaatgcggggttgccgtatacggtagcgctggaagagaagataatgctcttcacaccatgttttctcatgacatctaccaaggtcagggtaccggcaatattgttctcataatattcccagggcttctgtacggactcaccgactgccttcagtcctgcaaaatgaatgactgcgtcaatctgttccttgctgaagatctcttccagagcttcacggtccagaatgtctgccttatagaaaggaaccttcttgcctgtgatggcttctactctggggatcactttctcacttgcattgcagagattatccaatacgactacatcatagcctgcctgctgtaattccactacggtatgactgccgatgaatccggcaccacctgttaccaaaattctcatacactctctcctatccgccgtgcataggacaatactatttgttcactatggcggctgcacaatctctcatctgtcagagccggatgaaattttttcttcgtttcttacagtatcagattactgtaattctatcgattcctcaataaccttatgttgtgaaaatctgtcgaaatgtttacagcaccacaccattctcggtgagcagttctctggcactttccacagagtccacaccgatcttgttcttgatcggcgcaaattcttttcttctgactacttcgaagggcagacagctgtccatctgatggatcatatccagcaccagactctcgaatttgtagccgttgggagcctccggcttcaccggttctccgttctcatccagatacgggatcttcttctctacgatatgcaggggcatcttctctgccatgatcttttccagatcctgtaccttgaacagataattcaggatcacaccataattatacgcgggttctcccttctcatccttagcattcatcagttcatcggtcagttcataatattctacgatagaaggtctgccatcctctaagcacataacgcctaccttctcatccggtgcattcttgcggaccaccttggagcctaccacacaatttttctgaatagtagctccgatgaagcagggatctgcgattcgctgcaatacattatccacggcaaatacattgatccactcaatgccttctctgtgtacaatgtccagcatgccattgtttttcatggaaatgaaccagccgccgttaccattgggggaagtggacagcttgcccttttcctccagatagatcttaccttcataatcggtagccgcagccatctcctgtttaaagaaatgcacatattccgcattatatccgaagaaatcatgctcctttaaaaaggctatggtcgcatcgttgttcttatcactggtcattacgaacagatggatccaactgtctgcctgatgtacgacttccatcagattattgatcaggcattcaaaaatatacagttcatgagtcagtcccacattgtacattcccttgggattgtcagatcccagtctggtgcccataccaccggccagaaggaccgctgctaccttgccctgtcggatcgcttcgataccggttgcggtaaattcctccctgtttgcttcgatttcgtctaactgcatggcagccaacggtgtgatcactcctttttttgccagatcttctttatgcttgcaagcttccagaatgctcatatccgtagtttcgatctgatccagaatcccctgcttctcttcctcgttgagctccccgtaatacttcagaacatgttcctgaccatactttgcaagcttctccttagcctgttccagtgtcatactcatattcctacctccgttttattttctccgactattccaccccgggtaacagtcaattttctctattatacttgatatttcctgcgattgcaaaccttactcccgggatcgttcccgccctgttaagattctgtaaatgccttgcaaagattctgtaaataacccgacaaaatggtgttaagggtcgctcaaaactattcacccgggggtatctgtttactataatacgatatgtaaagtttttgaaggaatcagcaagcactttacagactgacaaaaaagcgaggaatccatcatgaacatcggaattttaattattgcaatcgtaggcggtgctaccggacttttatccacagcatatctggcaatcagtttccctgctgtgctcctgtggaagctctatcgcagggtggtccacagaattcctctcacccaataagctaactacaaacactttccctctaaaaaggacccggaagctttcgcccgggtcccttgtcgcattttcttattctatttttattcctgtaccggatcccagttctcatccaccagtgtcgcagttactgtaattccctccgatgcattttctgcgcggatcacaagatagaacattccttcttccgaatccgcggcatattctgacggattctccggcaaaaagacagaaaatccctccgggtactgctgcatctccagaaatcccttttccagcagtgcagttttgtagtcttcttttactgcatcccggtccccacaggagtacacctttattgaagcaaaagttccatcttcgctgtctgtctccgtacaatctgaaatcacagcatcgggatagataatatcctgctgcaccgctttcagatattccgttgacatccggacactctgtaagatctcaaaagtatcttttccatcctcggaatgcgccatgagtaccagactcaaaagcaaaatgagcagataacttcccagtgctcccgccagtattttcgcagaaggattctctggctgccccagatttgtataagaagtgatgatccagccaaaatttcggtagtccaccgcggtattacagtattcgcagactccgccgcccaaaatgtccacactgcctccgcagttggggcatttgtattcccggagtgccctgctgtgctgcgttaccacatcctgtctgccttccagttccagccggatctcctcataacggttccggatcttctttcctgtatccagtgtcaatcgggtcctcacttccacgctgattctgtaagactctccccgtgtctccgcctccagaaaacgcacaccgcaaatgcaacagtccaccacattctgataccgtgccaccaccgtatccagatcacaggatgcgaaaaagcgtacctgctctaccgtatccgccagatggatcattcgcagctggtattccagattctgaagaaaattacccgtggagaattccgggattgcggcctttactttcgattcgtcttgaattctcggctttctgcgagtctccatcacgatcaacattacaataaatataatgagcatgtaaaacaacgaccggaaaaataccggagccagaccaattcccagcatcatggctgcggctgcctttaccgcattgtatccgttcctgcccaacgccaacagcaaaaacataatgccgcccgcacagatggccagtaccgcaagagaaatcgctgtaattcccaccacagcaccggctttcataaagttggaaatacttttctgtcttgcgtcctcctccagagaaaatccggatacctttgtttcaaaatcactgacgagaaactttgccccgcaggcatcacagccatcgatatagctggtcagttttccctcatgtccacagttagggcagataaccatatctccctgcacatccgctttcaaaaagctcgccgctgcaatctccggtgtctttaggaacgcaatcttttttcccttgcggtaataagtccgtctcatttttaccggctgggtacggcggcagctataatcataaccatccttccagggaccatcatagtccgccagtcgtgccggctcctgcatctccatatccaccgtcagttcccgctgctgcagtctttttctgctcaggcgcagactttgccagaaaggctgggttgtctgctccatcaggttctgttccgcttccccgttgccctgatagaatgcttttaattccccacagaagtcttctgtccgtctctcgatctctttccgtgcatcattcagaaactctgttgccatttcgtttttctctcctcataagtgatcctgccgcgtaaaggtcctgatatcttttgtatcttatgtcccaactactttgtcccatatagctatgtatccattatataagttggtacccggtatttcaagacactttcccgtatagaatgatttgcctcatcgaatatctagtgctggtgcagatacttctctctggtagccagtccgccgcggatatgacgctcggatttattcacatccaataccttccgcgcctgcttcgccaacgccggattcacctgggccagccgctccgtcacatccttatgtaccgtgcttttgctgatgccgaaggccttggcagtctgccgtaccgtggcgttgtggtcgatgatatagcccgctatccctatagctcgttcttcaatatagtctttcaaaggaaaacccctcaggatacttttttacagtgtatgaaagtatctgaggggttatgatagggattgtatttatctctccaattatattattgctttcttttatctatggatacataagtagtgtatgcctatattcaacaacaattttcctatggttctgttacctcctagtctaccatatgtcttaaatacatatatgcaaaaggaggaatgctcatagtttgcatgaacattcctcatctttcaagctatgtcatctgtcaccttactcttatcctctaagtcaatatctatttgaattccaagtaatttgctttctggtgcatcatcgttgagttccagaataacattatccctaacaatatttttatagtcttctgtactcattataccctcaaacgattcaagtgcatcctcattaatagtacatatatattgaaaatcttttttacagcatgtttcatatactattctaaaaagagtctccctttgtcttggatccatattagcaaacaatctactatcatgagcaataaatctcatcttgcttatctcacaattcaaaatcaaccagtcaaagcaaaacattcttacttcattcaccccatcagaggagtcgtcttctatacgtgcttctaatgaatatcgcaacaaattttctccagtattattttttataaccaatccactttttttcttgggataaaagcgtttggcatattcccaatacttatttcgtaattcttccaaatacccgctttcctcatcaagatactcatctgttgccttatcttgctttatcatttcctccttaattctccgtttattttctcgatatgtcttcaaaattttttgatattcctgtatcctgttcaattcattctgtaaagatgataattgttttgtcaatgccacatattcttccaatgctccatgcgaattcaaataatcaagcaattcatccatcctacttccaagttctactattttgctgtcaatttcctctaacgctcttttttgttttgccagttcatttcgaaggcgtacgtttcttgtagccaataactcactatgaaactgggttacctccgcaagacttctttttaccatctctggaatttctatttgagctgcctcatatatttttagtaacttttcctcttttacttcagtagtttcctttgtagattcctcaatattttttatatatgtgctaacaagtactcttttattttccagttctttcttttgataactcttttcatcagcctctttttctaactcatgatagttttttgatactttgaacacagatatttcctttgccaattctgcaattctatattctaaatctgcaacatctaattctgcatcattttttcccaaatagtactgtcgaaaaagcggatcattttttattgccttctctgttgccgctgcagccacttgcctatcgcgaagttcccttttagcaacaattagttccttatctatccctaacaaaaaacaattattcaaaattttactataatcgctttctttaggaacaaaagcatcatatattgaataacacagacgagattttctaacaaatcttgaaaaaagagttgtccatgtcatatctttgggtgtttcttttaatccaaaacaaagttctctcaatctctcctgaacttcttttggtttcagtatctctccattaaattcaattttattttgattgcatgttgatcgcatgcaatagtgttctttatcatctatttgaaatcttaatgtaaactcccactctggaataactttcgcaaaagattcaatttttcttgatcccaaacaaaaatgaattaaatgtaaagttaatgatttgccaacgccattatatgtattgccatcattctcattatgaggagtaacctgtttccctgcaattatattaatgccatctttaaaaataattggatgaaaagatttttgattagcagttaaacttatcagtctcataacacagcaatcccctttcatttttttcaatcgcaccaataataaacaaataatctaaggccataatatattgatcaaaggaaaatttcgtcgaatatcttttattagaatattcttctttataatattcccataaatcatctatcgtcataggtttagataattgctgaagtagaaaagcaccaaatccaaaaaaggactcacttactgacaattgttttttcggtaatatcatattttcatccctttctatatctagccttatctaccttggttcttcaaatatatcacatgttgaaaaataatatgccatcaaaacccagacacatgtaagcatcgacatggttcttttaggcacggaattttccagaatataatagcatctacaatctgaagcattctcttgctcatcttcaataatttcacatgccttttcatataaagccctaaactttttttgtaaaatatcctttattcccggattttcgttaaagtattgatttaataatccttcttgatagctccctacagtaagatttgcttcaatttcttcacttaaattattaaaggttattttttggacgaaatctggtacaaccaatttttctccagtactaattggcaattctgcattcaataaatatcttacaacttcattaagtgcatcatattctataatacaatctgacacatcaggaataaatcccactatctcctgcatatcattttcatctaacatgtcaaattttccttgcaaatcttttgctgtaaaagtttcaatttctatttctgaatataatggatttgatttcaattcgagagctttttgaattattggtgctggcaacccctcatatctatcatttacgacaaaataaaatttcttaattgcacatatattattccatttatcatacaaccctttaaaatctgtttctaatttttttaccgcatcacctactgttttttctttattaacatctctaggtgcataaacttgatagtaaatacctgtttggctaacaaatccatcattttttctatcacctatattaccatatgctttaaccggctgaaaatttggttccgctttcgtcataacaaaaacaaaaaaatcttcaaatgcctgtcctttatactgtaatattttaattctaaaaagtatatctgcaatatatctatcacctttttccaatataactatcccctttttcacttttgaatataactaaattattataacatgactttcattatttggtttataagttcatacaatttttcaaactttttcattaataattttctttcaccttttattgttctaatttatagatttcatttttcgcaatacgtatcattcctcgtaaaaccttctacattgtcactaccaaatgcgcatattacggtatattacggttttactaatattaattttttataatcttccttactgcgatattattgccgatatcacttactattctcatagctcgttcttcaaaaaagcttcttttcaatgcaaaaaatatgattgaaattgaaataaccttatatattcatgttataatttattgattttggggcatgttccaattcatataaacgtttaatcatcatatctatgacgcagtcattgtaacattcattacggctacaattgcttggtatattgcaaatcttataacccccattcactaaaattcttccttttttatcctttgacataagtttttgcatcctaatatccccttattcacaattatatttttacatagttcttgacaatcaaacatcttcttgctaccattctaatcaagaaatgggttttcaccgcacttattgttgtggcttgcccgtttcttttttcaattataaatacatcctttatccgacatagcagattcctgcacttgatttatcatttcatcataatatgccctataacgatacgctgtccttcggctgatttgaccttcttttacaatttccataattgtcatacccgcttcatacttaattgcaaattcctgataagaagccatccatgccgcattatgccttttacgtcctcctaaattacgtgccttaagacgctctatttcagccctaagttcttcattttctatttccaattcatcaatgtgcgtcattgcttcctctaaaatgcttatcacaaatgtccctccatccttttgtgtgtcattttggtttatggcactattataattgctgactgcaaatgtgtcaatttgatttttgacacgcaaatacttttactaaaaaacattacaagcgcacctgtttaaagacatcaaaacaataaaagcacatgaaaaagattttatattacactctttttcatgtgccattttcaaagacattcgctattttattatgataattaccctttgttataaacgcttttaatattctttttctaacttcctataatccacctttcccatcattgtcattggtaattcatctataaattcaaaatagtaaggaactgctctttcagccaattttgtagtacataattccctaatctcaccctctataattcccgtatctcttttgcactcatgtttcattaccaaaaatgctttcgggaccttgccatttgcgttatcctctatcccgataactgcacattcttcaatatctggatgctgagttatgacattctcaatcgaaggtggaaatattttaaaaccatcaaatctgataatcattctctccatcctactatctatagtaagcactccctgtttagacatatgacctatatctccggaatgtaaccacactttaccgtccttatgtcgttgtaacactttatccgttaattctttatttttaaaataccccaacataacacttggaccggttacacatatttctccttgctcatcatatgttaattctttatccgttcccggctcaaaaatactgattatattttttaccaaaggtatgcctacacttcctatctttctacatgtaggcatttctaaagttgccgtagatgcaagttccgacattccccaacctttatacaattttcctttagattttttacggattaactcatcttctatcttcttttctaaattctcgttaatcatatctccaccacaacccaaattgtggaaaaaagaaagatctttcaccgttttgctagacgttaaaacttcataattatgaggtactgtattgcagtgattaggtttatattttaaacacaatttaaccatattctctgcagtaactctaggttgcactatagtatatagtcctaatgacagcggcaaatgtacagacgcaaccattccaaatgctgcaaatgctggaattgccgtcaaaaatctctcccttctatttaattccagcgaagtaagtttatactgaaatgctagtgcattcaagttatcatttgataataaaattcccttgggcgttcccaccgttccactagaatgaaccaatagagccgacttatttttttcgtattctactactttacccttattgttctcctctaattcacaaaatttcttccatgtaataaacaaatcatcatgtagcgatttcttttgctttttcctgttttttatgtagtatcctatcttagtaactgttggcattgaatccgccgccgaaaccaatatcactttttgaatatttgtctcagatataatttccttaattttaaaataacaggcatcaaatagcaccaaaatttctgattcattttccttcaagtaaaatttcaattgatctttattggatcgtggatccagcatatctgaaattgcccctatgctattaagcgcataaaatgccactattgtttctactgttgttggcatgcaaatactgacaatatccccttttcctactcctaattgcgcaaactgactggcacacttatttattttatgaaacagttcttcgtaagtgattagtcttccaaaataattaattgccgtttcatttaatctatttttattacaaaggcaaatataatcataggccgtcatatggggaatttccacattgattgcctcatcactatagtatttcaaccatggtctatctatagagggataacctgtcatttcgtttcttgcttcttttttcat

SEQ ID NO: 211 - DNA, 23132 bp, unidentified
  source 1..23132: mol_type = unassigned DNA
gtatgaccgcagttatgtcaaccataaagagagtgtcaaacgacccttaccagtggattatcgagcctgaaaatgtagcactcatcgcaaatcaggccaagacaattccactagagtggatcactcctgagaagaatgatgtcacgcctgagatggaagcatatctcagacctcttataataggtgaggtttccctgcaatacaaggatggacttcctatgtatctgccagtaaatcatctgctttaagaaagacggacgcccattgaaacagaaagatgtatatatacatttttttgttttcaagggctgactgtgggatgaaccaacatgtacaatggcattctataacaatcttttcaagggctggctgcgagacaaatgcacacatacaaaaggattctgtaacagattgttttccatattacccggcttttatacgtagttgttatagttttatccttattccccaaaaccagaccgattaaggataaattctcagattatatgacaaaatatccctaatacctcaatcacatgataggtattagggatatttttttatttacacgaaaggcgaacgaaccaagttcgtctatttttactgcagatttgtatatccgagcagcagctcttcaactgccatggctgcctcacggccttctctgatggcccatactacaagtgactggcctctgtgcatatctccggctacgaacacctttggcacattggttgtatatgagtttggacatggcgtcttgacatttgttctctcgttgagttctacgccaaagctctctgccacatatgtctgacatccgaggaaacctgctgcgatgagtaccacgtcacagtcaacgatatactcgcttccctctatctctgtcatagacattcttccagtctcaggattctttttccagtcgagtttcacgcacttggcggccttgacatttccatccttgtccttgatgaattcctttactgtagtctcatatattctaggatcatgtccatatactgctatagcctcctgctgaccgtaatctgtcttgcagatcttcggccactccggccatggattgtcaggtgttcttgtgtcaggtgcctttggcatcatctccagctgtgtcacgctgacagcgccctcgcggaccgctgttccaacgcagtcatttcctgtatcaccgccgcctatgacaagaacattcttacccttacagctcacgaactgcttatctgcaaagcctgaattgacaagactcattgtggttgtcttgaggaaatcaacagcgaagtagattccctttgcatcccttccgggtgccttgatatctctaggatttgctgctccacaggcaagcacaactgcgtcatattccttgagcagatcatcagccttcacatacttgaggttcttgttcttaaggtatccagtcatctggtcgtctttcgggcacacagccttagcagatgcctttccggttgcaacctctgtgtttaatacgaactttattcctctcttcttcatgacatctattcttctgtctatgatctgcttctcaagcttcatgtttggaataccatacattagaagtccgcccggcctgtcgcttctctcatacacagtcacgtcatgacctctgccgatcagctgatccgccactgcaagtcccgaagggcctgaacctatgactgctactttcttgccagagtgaacctttggctgagcatcatttacgaggtcatttgcaaatgcatattctatgatggctctctcattctcgcggaccgacactggatcgccattcaagttacaagtacatgccttctcgcagagcgccgggcacacacggcttgtaaactcagggaaacagttggtcttgctgagtcttgcaaatgcctgctcaagattgtcgttatatagcatatcattccactcagggataaggttgttcagaggacatccagatgtcatgccacatatattcaaacctgcctggcagaatggaacgccacagtccatacatcttgcagcctgctttctctgctcatcacggctaagcggagtgtggaattcattgaaattcttgattctgtccttaggagcaagctctgcgcttgtctttctctcatattctaaaaatccagttggttttcccattcctacttacctccgttcttaaccttgtagaatgcttcgatagctgccttctcacggctcaggcccttctcctcaaatgcaactatcatattcatcatcttcttgtaatcctttggtatgatcttcttgaactttggaagatatccctcaaaatcctcaaggattctcttgcctatctctgaattggtatagtttacgtgatccatgatgagctgcttaagttcactcacctcgtacttgtccgtaacagcctctatggatatcatctctttgttcagtctcttgtacagatcgttgcccatatcaagaacatatgcgataccgccgctcattcctgctgcaaagttcttgcctgttgttcccagaactacgaccttaccgcctgtcatatattcacatccgtgatctccaacaccctcaacgaccgctgttgcgcctgagttacgaactgcaaatctctcgcctgcaacaccattgatgaatgccttaccacttgtggcaccatacagtgcaacgtttcctataatgatgttatcctcatgcttatactttactgaacgtggtggataaacgatcagcttgccacctgacagacccttgccgaagtaatcattgctgtcgccaaccagttcaagtgtaagtccctttggaatgaatgcaccaaagctctgtccaccggcaccgttacatttgacgatgtatgtgtcctcatcaagggactcgccatatttcttggtgatctctgatccgaatattgttccaacagatctgtccgtattgaccacatcaagctcaacactcttcttctgtcccttctcaagtgcaggtccgagcttcttcatgagtatcctcatatctactgtcttctcaagctggaagtcataaatattcttctcatgatacttgaccttgttctgtggcatatccatatatggattattgattatcttatcaaggattacatttctctcatctgctctgtcgctgctcatcaggagatctgagcgtccaaccagctcatcaactgttctgacgccgagcttactcatgtactcacgaagctcctctgctatgaacagcataaagttcttcacatactccggcttacctctgaatctctttctaagttcaggattctgtgttgctatgccgacaggacacgtatcaaggttacataccctcatcatgacacagcccattgttacaagcggtgctgttgcaaatccaaactcctctgcaccgagcattgcagctatggcaacgtcacgtcctgtcataagcttaccatcagcctcaaggataaccttatttctgaggtcgttcattataagtgtctgatgtgtctctgcaagtccaagctcccaaggaaggcctgcataatggatggagttgttaggtgctgctcctgttcctccatcataacctgagatcaggatgacctgtgctccggcctttgcaacaccggccgctactgtacctacaccagcctcagacacaagctttactgatattctcgcatcacggtttgcattcttgcagtcgtagatgagctgtgcaagatcctctatcgaatatatatcgtgatgtggtggtggagagataaggcttactccaggtgttgaaagtcttgtctttgcgatccaaggatatacctttccgccagggagatgtccgccctctccaggctttgctccctgtgccatcttgatctgtatctccttggcgctcacaaggtatctcgatgtaacgccaaatcttcctgatgctacctgcttgatggctgagcatctattcttgccatccttgccgatcgtaagtctctctatcgactcaccgccctctcctgaattggacttaccgcccagctcgttcatggcgatggccatacactcatgtgcctcctgtgatatacttccgtagctcatggcacctgtcttgaatctcttgactatctcacttgctggttcaacctcatcaagtggaaccggcttatcagcaaacttgaagtccataagacctctaaggtggaatggcttctgctcatcatggagcgctgctgtgtactgcttgaacagcttgtaatcgccgcgccttgttgcctcctgaagaagatgtattgtgacaggattgtacagatgctcctccttgccacttctgaacttgtgtgctcctatgcttgtgagggcaagattcgtattcagtccaagtggatcaaatgctgatgaatggagatcgtcaacggtcttctcaagctcctttattccggagccaccaacacggcttactgtatttgtaaaatatctgtccacaacatcctttgagagtccgatacactcaaatatctgtgaacccatgtatgactggatcgttgagactcccatcttggatgcgatctttactattccatgacatattgcactgttgtaatcatctacagccgcattaaaatccttgttcagcagatgcgaatcaaccatctgcttgatcgtctctattgcaagataagggttgactgcacatgcaccgtatccgagaagtgttgcaaagtgatgaacatttcttggatctgcactctcaaggatgatcgcaaccgctgttctcttcttggttcttaccaggtgcttctgcatagctgatactgcaaggagtgatggtattgccacatgattctcatccacgcctcggtctgagaggatgagtatatttacaccgtccctgtagagcttgtcggcctcgataaacagtctgtcgagagccttctccatggatgtgttcttataataaagaataggaagtgtcgcaaccttaaggccaggaacattcatattcttgatcttcagaagatctgtgtttgtcagtattggatggttgatcttcaacacatgacagttctctggcttctcctcgaggatattaccatcctttccgaggtataccgatgtggatgtgacaacttcctctctgatcgcatcgattggaggatttgtaacctgtgcaaataactgcttgaagaagttgaacaatggtttgtggctgttcgacaggactgccagcggtgtgtcagtacccatggcgctgatagcctctgcacctttctctgccattggatatattgtgttcttgaagtcttcataggtatatccaaatgccttctgaagtcttgctctctcctcatctgtgtactcctgaactctgatgttcgggatcttcagatcggcgagatgtacaagattgctgtctacccactctccatatggctttgccagtgcatatttctccttgatctcctcatctgagataagacgtccattcactgtgtcgacaagaagcatcttgccaggtctgagtcggtctttcttcacgatcttagatggatctacgtccagaactccgacctctgatgaaagtacaaggtaatcatcatctgttatatagtatctcgatggtctcaggccatttctgtcgaggactgctcccatgagttcaccgtctgtgaataatatagaagcaggaccatcccaaggctccatcatggttgcatagtactgatagaaatccttcttctcctggctcatagctctgtcgttctcccacggctcagggatcgtgatcatgactgccataggaagtggtattccgttcagcaccaggaactcaagacagttatcaagtcttgctgaatctgaaccatcgggatcaagaacaggcataaccttgtacatctcatcctgcatgatggtcgactccattgtctcctcacgggcaatcatcttgtcctcatttcctcttattgtattgatctcaccgttatggcacagatatctgtatggatgagctctgagccatgatggtgttgtattcgttgagaatcttgaatgaacaagtcctattgctgactcataatcaggatcctgaaggtcgttgtagaacattctgagttcaccgacgaggaacattcctttatatactatagtcttgctagaaagtgacggaacatatgtgtcatcattgctctcctcgaatattcttctgacaaagtagagctttctgtcaaagtccatacctgcctttactgtctcaggtcttctgatgaatgcctgcatgatacatggcataacatctatcgccttcttgccgagaattccaggtgttgtaggaacttctctccagcaaatgaactcaagtccttctttctcaactatgacctcaaacatcttcatagcctgcttgcgagccagctccttctgtggaaagaagaacattcctattccataatcgccttcctttccaaggtcgtatccaagctctgctacagccttactgaagaacttatgtgatatctgaaggagtatacctacaccgtctccggtcttgccctctgcatcctttcctgctctgtgctcaagattctcaactatcttgagggcattgttaactgtgtcgtgagttttgatacccttgatattgacaacagcaccgataccgcagttatcatgttcaaagcatgggtcgtataatccggtattctctgctctcttattctcaatcatgtcctgttccgtcctttccatgttattgcatttttgtcattcacaacgatatttttctttttgcttttgtttctcaagtaaatgttgctaattttgtatttttctcaagtgttttatcgtttttgatatattactaccatttataccgtttgtaaacaacttttttcaggaaattgtctgacagttttcagttttaatatattttgaattattgtatattcattttctcttgttgttctcaattctcaaatattttcagtttcattttccatgaaacacatttatatcactatacatttctgtgatttaaggcagctggctctttctccccacccatgcttttccatttttcagaaaacccccatatggatgctgatatgcactcatatgggggttctatatttatacatgttatttgttaatttcacatcagtactaatacatcactcgtcaagaatcattcccttaggtggctctgttatagttctgaggtcaccctcaccctttccgtcagaaataccatctcccggcttttctgattctaccttgaccttttgggcacttacacctgtctcctttgcaaggcttacacttatctgctttgatgtatctgataccttgtaatgtgaattgccgtacaggtattcatgaagtgcctggacattgctctccatatctgcagcaacaagacaattgccctgttctgccatatccactgcctcataggcaaaagggaatccagcagtgtcaactacactgtactttgcaacagcttttaccagatccaatatactgtccttattaagacttgtagatatattattgaatgacacatctacaaatgcgctgagcgagctggtatcagcctttatcagcttatcgatgaccttcagaagtattattctctgtctctcagttctcgtgatatcaccgctgcctgttgaacggattcttgaatatgcaaccgcctgctgtccatcaagagtatactgaccagcctgtgttataccagatgaatatttacccgatatacttatctgctctgcaagattcttgttgaaattatttatctcatcatcgactacattaatattaacaccgcctaccgcatcgattatgcttgccatggcactgaaatctaccgctacataatctgtgatattgagatcaagattagtattcaaagtgtttattgctgtgacggcgcctccaagctgataagcataatttactttctgcgacttgttcatcgctccgcttgctatatccatgagggtgtccctgtacactgatacaagctttatctctttcgtggactcattgatgctcactatcatgatactgtcgctgtttgttccggcatccatattctgatctcttgaatcaacaccatacaacgctatagttctgtatccagccgtagcatcttttacaccatcatttacaagaagctgatctgcactgatttcattgatattcatctcattgtacttcattcttgcataatttttgacatatatgacacatatcattatgaacaatgccagcagtacaaaaaacgcgatcgcccagaccttagtgcttatatttatcttctttctctctggatttactactttcggatcagcctcatcgagtagattctctctgaaaaacttctcactgtctgactcttcgtcatcatccagttcctcttcatcatcctcaagatcaaccgcatcaaacccaagtgccctgccaatatctccgagtcctagatcctccgtatctgactctgaatatctgagcttatcctcgtctatatccctctctatttgctcaagagcatccatgttcagcatatcagatctattatccttcatccgaggcttctcttctttggtgctgctttcgtctgcattgtcagaaaatgttatattgtcatcttcacctgactcttcacctgactcttcatccggttcttctgtctgatcgtctgaaataacagactccactgcctctgacttgccgcctgcatcgtctgaacccatatcatctggtcctatatcaactgatttttccgcagtatctgctaaagtcacctctgttttattattgtcctcttcactattgtctgctacagaccttacctctttttcggtgttctcctgttcacgctgcttctctgactcagcctgtcttctctccatctcctcgcggacttttttcttgcgcgcttcctctttctcattcttttcgcgctcaagttccaggcgctcgacctccgcctttgcctttgcgacgttgcgctgagttctctcccacgcctctctgcgcaggtcctcatgtctctgtttgctgtccacctcgaggttattcacctccctgagaagattgtccactgatgtcctggcgctgtctgcagcatatgcagatccgcttcgctgactacggcctgtatgttttcctgatgcattctctttcttctgggctgtcctgtcatctctcagttttctcgaacggctgttttcatggtagtattcatcatactctccaactgtccccgctgacgcagcatgtgttctgacagtttttgccttttcctcatcatgtctgaccggggttctgcctgttctagttgttccctcatccagtcttaccggtgtcctgtctgacgaaatctttcttctcctggcaggtctttccgactgacgatctctcgcagatgcagtttcatccatatagacattatctatacctgtgctctgctcgtccccaacacggcgcactgatctcaccgacttgccagttctctctccatgaattccagaagctgctctagtccggcgcggctctgatacatccgtcttttcctcgcgtttttcatgtacgtctgtcgatctcctgcttctgcggtcatcatcgcgggatggatccgctttggagcgttttttcttctttttatcgccaaataacaatgaactcagaatacctccttcttcaaggtagtcgtcatcgtcatccagccagttcatatcttcatcatcataatctgttgataatctgttctttttatccattggaactcctcttttatcttcatatctaaaaatgtcgttacctcgctatataatacattatatttttggcttttacaacatataatctatggcattacccaatgaaattaaaaaccaaggcataacgtcttaaatgtatttcatttgacacccatcatttttacaagtatactattaataattgtgtttaaaacaattggagttaagtctatagcaagggagataatgaatgaaatggaaactgaaaagaatatttcaccaaatattactttgtcggtagtcatgccagcttacaatgaagaagcgcatataaaagataatctgctggaaacgagtaagatactcagcagtttccttcatcgctatgagataattgccgtaaacgatggcagctcagactccacctggcaattgataagggaggcttctgatgcagattcccacattacagccacaggatacaatgacaaccacggcaaaggattcgctataacgacaggcatcaaggcagcccgtggccgatacatcgctttccttgattctgatctggaactcagtcctgctctgctcaggaagttcatgaagcagatgaaggatgacgatgcagacatagtcatcggttccaagcttcacccagaatccaaacttgactatccaccgctcagaagaatgatgagttattcttattatgtcatgctccggatgcttttcaatctcgggatccacgatactcagaccggtatcaagttatttaaatccgaggtgatcaagccgatagctgaaaatctgactataaatggatacgcatttgacattgagatacttgtagccgcccacaagcagggatacaaaatatctgaggctccgatagcgcttaattacagcagagacgatttatcaaacggcagaaggatcaagttcagagatatctggaaagtatttacggacacaattgctatcagaaagaaatactaggagagagaatttatttacaatctacattatttaaggagaattttatgaattacgaaagcgcatacaaacttctggaagaaaagggtcagcttcaccttctcagatattatgatgaattaaaaagcgatgagcagcaggctctgttaagccagattgatcagatcgatttttcactcatcgacatgattggcaaaaacaactctggaaatgattccgacattgcacctgtcgcagctcttcagctagacgccatcaatgcgaaccatgacacatacttgaatgcaggaatagacactataaaaaatggcgatcttgcactcgtacttttagctggtggtcagggaacccgtcttggattctcagggccaaagggaaccttcaatgtgggcgtaacaaaagatatgttcatcttccaactgctcattgagcacacactggatatcgtaaagcttgccgatacatggatacatttctttataatgacgaatgaaaagaaccacgatgatacgactacatttttcaaggaacataactacttcggatataaccctgattatattcatttcttcaaacaggagatggtgccatcagttgacttcaacggcaagatctatctggaagaaaagggacgtatcgccatgtcccctaacggtaatggtggctggttctcatcactttgcaaggcaggtcatctgagcaagctgactgagcacaatatcaaatacatcaatgtcttctctgttgacaatgttcttcaaaggatcgcagatcctgttttcctcggtgcagtcatcaaggaaggctacctctccggcggaaaggttgtcagaaaagcctatcccgacgagaaggtcggtgttctctgcacaaaccacggaaagccatacatcgttgagtactatgagctcacagatgagatgcgcaaccagcgcgatgaaaatggagattacgcatacaattacggtgttaccctcaactacatctttcctgtcgacagacttatgaagatcatgaatgaaagcatgcctctacacatcgtgaagaaagccatcccatatgttgacaagaatggtgacattgtaaagcctgccgagcctaacggatacaagtttgagacactagctctagacatgattgcattcatgggcacatgtcttccatttgaggttgagcgtgagaaggaatttgcccctataaaaaatgctactggcaatgattccattgactctgcaagagagcttctcaagcaaaacggatatacattataaacccaattataaaataaagcaggtgaaccgccgggatactgataatctctcggctgctcacctgctttgtcgttatatttatctattgtcctgtgtctttttccccccaggaacctttgcatcataactctcagcttcagcttcccggacgatctcatttattgcctcacggacgatctcggacatcgacacctgtcttttctctgcacatctattcagcttcttatgtgtctccgcatctatcctgagtctcaagacagtgtcttttctcttgtctgtaggtctccccggacctcgttttattttttcatcagccatatcgttctccgactataattatatctcatgcatacccgcactttaacttctaaaggaaatattttttcacaccatttacagcgtaattcgcaaaatacagacagcttctgaaaaatccgtaaccaagttttctgtatactgcaaatgttttcttcgcggacgaaagctttgaacccgacttactgttcttcaccacacggtaaagaagcaatggttcatttataagaacagcctgcccgcactcttttaggatctgaagccagcagatgtaatcctcatgtatatcatcattacccataggatatttcatcaatatgtttctgtccgcaaccaccgaagagcaattgatcacatttcccttgagaagttccctgtatgtcacagtatccggcacctctatgatctttcctgtcctgttgccatcctccgtgagcagttccctcgcagtcgaacagatcagtgttcctgtttcatccatcagcttcagctgttttaccagctttccatccacccacatatcatctgaatccaggaatgcgactctgtcacaaacagcctctttcactccacgatttctggacgctgctacccccaaattcttttcattcacaattatcctgatacgtggatcattcttatatttttggagtacatgctcagtgtcgtccagcgaacaatcatctatcacgatgatctccactggcacatcctgagccagaaccgactctatagcctcttctattgtaccgccactgttatatgatggtataactaccgaaaccttagcatttgtcatactatccacctacacatcaaatcatatgtttatatcaagaatctttgcctgtatttttatttacggtcttcttaagatcataaaatgcatcctctgcttcatccagtccatctggtttgacattcaccggtgccggaatctgaaccttctcaccatctctgagtgcagtagtcatatttgaagctatgccctctgatgtctccttctggaacatgatctttacagttagcagcatcagcttgaaatcaagccatattgaatactgctcgtagtaggtgagatcaagcttcaccttatctcttggtgtggtgttgtattttccatacacctgtgcatatcccgtaagtccagctttcatcttgagtctgtaatcaaactcagggaaggtcttcttataaagctctgcgatctcaggtctctccggtctcggtccaacaagggacatatctcccttaagaacattgaaaagctgtggaagctcatcgagatgcagcttcctgagccatttgcccacaggagtaattctatcatcatccttctttgcaagctgggcaccgtgagcctctgaatccatcttcatacttctaaacttgatgatcttgaataccttaccattaagcgttagtctgtcctgtttgtagaaaaccggtcctctgtcataaagccatatcgcaagtgctgatatgagcataaatggcgatgctatgatcagcaatataaatccacacacaagatccatgatccttttgatgatcatgtcatctccagtaaggccctgattccttgacaacaggataggcgtatcaaacaaatgtataggctccgcaccaagtatgattatatcggagagctttggcacaacatacgatctgatggagtgttcaaaacaatacttcacaagctcatttcttatataagcctttgtctcgcaaatgattactccatcgtactggagtatcttctccttaatcgcctgctcgccttcactgacatgtattctatcttctattacatacttatccttacgggcattgatcttgtctataaactccatcggcgtcttatatccatataccaacagcagatgccttggcggatacatcttcgcatacagaaatctacacgtaaagatccaaagcagtatcactaccgcttcaagtccggttaccttaagcaacggtactggattcacataatctcgacagattatacagagctgcaagtaaccaaccacattggcacatacaagagccagcagctgtgagtatactatatcaagcaatctgaaaaagccaactctgtaaccaccataaagcttggtgaaaagtatgatgattattccatacattccgataaccgcccagtttcctcttctccagaacggaagcgtaagcgttacctcatagtaccggtaccacatgagtccaaacagcaccagctccacagcaatgagtacgcaagcctcacccactgttatgagacgtttatacctatccctctttctcactcttctgttttcttccatattaaagcatctccctaagcatcttgttaacagatccaggatctgctttacccttcatagctttcataacctgaccgacaagtgctccgagagccttctccttgccacccctgtaatcctctacagccttcggattgttatctatggctgcctggcatgcctctttaagggcattgtcatcctgaactgtcgcaagtccgttatcctttacatacttctcaggatcaatattctcagcaaataccttctcgaacacttcctttgctacaccgccgttgataaccctgtcatccacgagcttgatgagctttgcaagattctccgctgaaaacttcaggtcttccgcatcaacaatgttctctttcatcagtctcatggtctctcccataagccagttggacaccttctttgccggcgatcccagtgcgatggcatcctcaaacagatctgccatcttctttgatgctgtgattatatctatatcataatcaggaattgcatattcctctttgtatcttatcttttttgcatctctgaactcaggctgtgcatcccttacctgctgcagccactcatcactgatatggattggtacaagatcaggatcagggaaatatctgtaatcctgtgcatcctccttggatctcatcggatatgaatactcttttgtatcgtcccaccttcttgtctcctgaacaaccttctcaccggactcgatgagatcgatctgtctctctctctcattctctatggctctggcgatggccttgaatgagttcaggttctttgtctctgtacgtgtaccaaactcctccgagccaacctctctgacagaaagattgacgtcagcacgcattgatccctcattaagcttacaatctgaagcaccgagatactgtatcgtctccctgagcttttcaagatatgctattacatcttccgcagatctcatgtcaggctcagatactatctctataagcggaacacctgaacggttgaaatcaacaagtgagctgtctgtatatggatcatggacaagcttacctgcgtcctcctccatatgtatctcatggattctcacatatttcttgacaccgtccacctctatctctaccttaccatccctgcatattgggtagtaaagctgtgatatctgatagttctgtgggttatccggatagaaataattctttctgtcaaacttacagttctgtgtgatcttacagtttgtcgcaagaccaactgcgatcgccttatttacaacttccttattaagtactggaagtgaacccggcattccggtacataccggacacgtatgtgtattaggagctcctccaaatgctgtgctgcagccacagaatatctttgtcttggtcgctagctctacatggacctcaagtccgatgactgtctcatatgtctttgccatctcttacagccccctttctgaaacctgtgcaggtctcttgtattctctggtcttctcaaatgcgtaagctgctcttataatagtcttctcctcaaatgcatttcctaccatctgtactccgatcggcattccgtccttatctgttccacatggaagtgatattccaggaagtcccgcaaggtttacaggaacggtgtacacatcacccagatacatcttaataggatctgagagtgactctcccatcttcagagctgttgtaggtgcaacaggtccaaggatgatatcatacttctcaaacgccttgtcatatgcctgtttgatgagcgcctttgccttaagtgctttaacgtaatatgcatcataatatcctgaactcagcacaaatgaaccgagcatgattcttctctttacctcaggaccaaatccctctgaacgactcttcttgtacatgttgtgaagatcggtgtactctgatgttctgtagccgtactttacaccatcgaatctctcaaggtttgagcttgcttccgccgatgctatgatgtagtatgccggaatcgcatactcaaccatgccaagatcaaactcctcaactattgcgccttttgccttaagagcttcagctacaccgtatacagcttcctttatctcaggctcaagtccctctgtgaagtaatctcgtgggagtccgatcttaagtccctttacatcatccaccagagcgcttgtaaaatcattgtcatctctgttcactgatgttgagtctttcttgtcatactgtgatatgacctcaaggatagttgcacagtcctcaacattctttgcgagaggtcctatctggtcaagtgatgaaccgtatgctatgagtccgtatcttgaaactcttccataggttggctttattcctgtgacaccacagaatgatgcaggctgcctgattgacccaccggtgtctgaaccgagggcacatggaacctcctctccggcaactgctgccgctgaaccacctgatgagccgcccggaaccctgtttatatcccatggatttcttgtctctccaaagtacgatgtctccgttgtgcttcccatggcaaactcatccatgttggtatgtccaacgatgactgcccctgcctcctggagcttcaccactgcctcggctgtatatgtcgggacaaaatttgaaagtatctttgatgaacagcttgtctgaacaccagcctgacacatattgtcctttatcgcaattggaactcctgcaagaggaccgctcagctctcctgcatctatcttcttctgcacttcctccgcctgggcaagtgctccctcacggtcaactgtgacaaaactgttgtagtccttctcacaagcctctatgctgtcaagacaagcctgtgtcgcctgaacaacgcttacctgtccgtctttaatagcttttcccagctctacagctgtcatacccattaaattcacttcagcttacctcctagtcaaatgtctttggcaccttgtagcagccgtctttctgctccggtgcattcttcagcatgttctctctgtcgtcgttatttgtgactacgtcctcgcggaacacattattgtatgggaatgtatggctcatggcctccacaccatctgtattaagttcatttaatttgctgacataatcaagcatgtctgacatatccttctttgcctgctccttctcctcctgagaaagctcaagctttgcaaggattccaacataatcaatagtttcatcagttatcgtcatgttattgttctcctatcttttatgagcaaaaataaagaatgtgcctttttattattctgtgtcaaataatgtaaacacattctcctgccatggtattttgtaccacaaaattcctttaaaatatatcacattcgaacatattatgcaagactgagagtagttttagccacctatacataaacaccgccatgtaacatattactgtatacatgacggtgctaaaaatctgctataaccttacgattcacataacctaactgtactttttaagtgcatctcttgcctggtcttctccaagccctgtctcttccagcagtatctgtattatttcttcatcgcttttattgaatcttctacttagtcttactatctcctgaatacgtccaatacgtaccccatccctgtgtccttcttctcttccttcttctcttccttcttctcgtatccttttttctatctcaacactcttcatatacgcaagacctacctctccatcattcttcacagcagtcaccatatgatgaaagaccttaagtgaatctgtaccagcattttcttctatcgaattttccatataatgcaacaaactcttaagttcctccggtggatttccttttttcccctttgtgtacaaaaataacgacacagccccatcatcatacggcatatccgattcttctatacacttatttttcaccgtataaaccatcctgtcaagtccaaatggatcatatgttgttataaatataacaacaacattccttaaattgctataatcgtctccagcagccaaatttgctgaatcaatcttcgcatgataaaatctgtttcgccttggcacagcttttacgtcagccttgccgtcattctgatccggctcgatatcaattatctctccatcattctcatcaatatacacatccattctaatgccatgtttttccggatctgcaccgcacataactcgttgcggcacaacagtcagcttgccaaaacggcgattcaatatgcactcaagcatatacctcaccgaacgatctccatactcctgatgacatatgagactcgtcatcaaaaaatcatccactaaattcatgtcttcaagtttcttcataagttctcctttctacagtacatcaaagaaccttatcaagaaacagcggcaaatatcctttaacctctccaatgcactatgcaaaaataaaatatggtatttaaaagcatagaattcattgaattgactaaagattcttagatgcagccttcgctgattgaatacaagaatatatgctttgagcatagtttagcaaactcatatattgttttcaatagtatatatttatttttttacttttttatatatcactatccccgcacttcccataagtgcaagtactatcacaccagttatctcctttaagggaagcctgtcaccggtatcgggatgtctgcctggcggagtgctgcgcgtcgttatcattgtcactgttgtgccagtggtgctccatgtggtatgttccgttgtcgtctcctctgtcgttgtcaactccgtggtcgtgccagttgtgttttctgtcgttgtgtcttctgttgtcgtgtcctctgttgtggtatcctcggttgtcgtatcttctgtggtcgtgtcctctgtggtcgtatcttccgtcgttgtgtcttccgtcgttgtgtcttccgttgttgtgtcttccgtcgttgtgtcctctgttgtcgtatcctccgtcgttgtgtcctccgttgttgtatcttccgtcgttgtgtcctccgtcgttgtatcctctgcggtcgtatcctccgtcgttgtgtcctccgttgtgtcttccgtcgtcgtgctctcagttgtcggttcttcttttgggaaatcagttcccggcactctgtggaactctccgctgtttgagaatatctcactcaccacgcatccatcccagttatgtccgagatttactgatgcctttggtgccatcacagttccaaatcctcgacctgcaaatgtaatactgccgctgaactgtccatctgcagcagagctgtcataaaagttaaaatacatcctgttgcaggcattaaaatagtttccattgtcgtttgccttcgcatcatttttgctgccaaatatcatatccccaaacactacatcctgcgcaccactcagatcaatgttcatgagaagaacggtatccccatcacaatccgggaactcaaaataaatcggattggtatttgccgacagttcattgtagtccagcgacacagcatgcataccatcgccatttaccgcaattcgtctgttatttatatctccatccagatctatatccacagtttcctctgtatcagcatacgctctaagttccagactgtattcaataaatcttctctgtatgtcagacatatcggcatactttgagtattctcccttctcagcaagctccgcatcagtcttaacatttgcaggtctgtcaagctttatctcagagccattgttcataattatataaacactgccatcctctacccttctaatatctgcccctgtatacagcatatcagtatccacatccgacacgcagccgttcatattctcagcgtcctcaaaatagaactcctcatacaccccgtaagaatttctgagtcccgagttggaatttgcatttagcgtctttgttataaaattgctgtgcaaatgtgtctgcacattcaatgtatcaaaacatatcactccgaaatcacccataagttctgcgattgatctgtcctgcagtacataacttccatcatcagtcttcccaaatgctcctataattccagtcgtcacgcaaagcactaaaatcactgaaactgcagctgccatgagctgtacagtacgaaatcccattctcctatcaaggttccctctcattcaatgtccgccttaactttttcgtctcaaatacatggtattcagcaaacatcgatgttattcattttaattataaaaatcccgggcggattcgacattttgctcaaaacagtgagctacattatgtcttatccgtccgggataatatttatttatatttgcttatatttattcgtacctatcacttacactataactttcgaccgtctccgtattctcatatctctactctatgatactcactatctcctcagagtcagccttgacattatatgtctctccaatatcaagtttgtcatatatagcctctttaactttatatatcttttccttattcttcacttcacatgtgacttcatattcaactgatttttcccctagcctctccttgtctgtgagctggggatctgggtattccggtgtttttccaccgcactccgcagtctccgtcctgtcgtacttccacctccatattgtataataatacttcgtcttgtatatcggcttatctctgtacacagggacagacctcgttctcgtcacatatccgtaatcatccacgtcatttgccacctcggaaaatgttccatcgccattgtcctcgtagctgtactccacatgggaacctatcacttcatatgaatcataggtctcctcgcgctcacccacatattcctgttctgtatgatgaacctcctgtttcgtggtctttagcgtagcgccctctgggagttcccagtcatcttcatcacacagaaaatatttctccacatcaacactggtcttccacgacatatccttgactgttactgttctcttcttcggcatggctatgatcgctgtaagtccgattatcgccgctatcacaaacatgccgatcagtactatcttccatgctccaaatgaacggctccgtttgctaaccccctgcccgctgttttgtcctccggcagctgttcctgttccggatgcacttctggcattctttgcatcctgttctttcctgacatcaaaataagctttatcatttgaacctcgttcagcgccacagctgctacaccgtgtgttaagagcagaattgtaattaccgcaatgatcgcataaccagtcggcaccttttccctttgtccgactctcctccgcggacaaatacctcactccatccatatagaacttaacttcctgtcctctcggctttccgcaggatggacactcacgactcgttccttctatatgttttgtactacaataagggcagtcccaataccccattacaagtttacccatatactatatcctccctgtatacttccttatctcatctcctacaatacacaatatgtaaccactcttgggcgtgataaccacttcattataccctgccacctaatgaacctttagcgacaaactacaaataacttacctgaacagactcatcgtaatcatgaggtgtcttgttatcggtcttatgtccaactgcaagcgctatctgaaatgaatacccttctggtatagcaagtgccttatcaaaatatgacttcttttccccgtgaagagcatcatacacacaacctatgatcaagttgccaagtcccatgctctctgccgctatagccatattctgaactgcgattcctgaatccaccttgctccatctgtaatcatcctctgcgctcaagaatatcaaaacaggcgcctcataatagaaattatgtggctgcttatcctgtcctcgaagtgccctcttttccgcatcaagttcttccagaattggtgcatcacccttgacaactgtaaaatgtatctctttcttattcatacctgtaggtccctgaagtccagcctctatgatcttctcaagctgctccttcgtaatctcttcatcactatacgctctagccgaacttctcttccttattacctctaatacctgattgtccattgtcttatacctcctataatgaaatctatgtttgaatttccacatactatgatttttatctatctactacattttaattctatactgtaatctctatctgatttccttctatggaaactacacaactctcatagtagccatcacctgtcgttctcggtccgcttatcacctcgtagccatcagactcaagtaacctggtaagttcatccaccttttctttgtttcccacgctgaacgctatatgtatcaatcctgttctgttaagcgttttttcaggatcatccattccaggtctgttcattatctcaagtcttgcaccatcatcgaatgttagaaagtatgaacggaagtctgtcgttttattgtgatatccctcatttgccgatgcccccagatatctctca

SEQ ID NO: 212 - DNA, 24409 bp, unidentified
  source 1..24409: mol_type = unassigned DNA
gtggcttttggaagctctgttttgacccacaaaaaggagcagcaaataaagattgcaggagagttcaagcctacggtggattgcctttgtgcgatccgccgtgggtttgttgctgtttatatagaaaaagtgaggagtgcagaatgtacatgaatgacggaaataaaacgaaaatcaatctgagaaacaagagtgtttttatcacgggtgtagctggttttatcggttctaaccttgcaaagagactgctctccacggtggagggtgtcaaggttgtgggtctggacaacatgaaccactattatgatgtgcgcctgaaggaagcacgtttgaacgaattggagcagtttgacaatttcagcttcgtaaaaggtaatctggcagacaaggctgtgatcgaatctatctttgagcagtataagccggaaatcgtagtgaacctcggtgcgcaggcgggtgtccgctattccattacgaaccctgatgcctatgtggaagcaaacttgattggcttctataacattctggaagcctgccgccattcttacgatgaagggcatactccggtggaacatttggtttatgcgtcgagttcttccgtatacggcagcaataaaaaagtgccgtacagtacggatgacaaggtggataacccggtatcgctgtatgcagcgaccaagaagtccaatgaactgatggcacatgcctattctaaactgtacaacattccttccacgggtctgcgcttcttcacagtatacggccctgctggtcgcccggatatggcgtacttcggctttactaacaagctgctgaaaggcgaaacgattcagattttcaactacggtaactgcaagcgtgactttacttatgtggatgatattgtcgagggcgttgtccgtgtgatgcagggtgcgccggaacgtaaaaatggtgaagatggtctgcccgttcctccgtatgcagtttataacatcggcaaccaaaacccggaaaatctgctggactttgtacagattttgcaagaagaactgattcgtgctggtgttctgccggaagattatgattttgaagcacacaaaaaattggttccgatgcagcctggtgatgtacctgtgacctatgcagataccagtgcgctggagcgtgacttcggatataagccctctaccagtttgcgcgaggggttgcggaagttcgctgagtggtacgcaaagttctacaaataatgaagaataggaaaataaaccgatgaagtgtgttgaggtttacaaggaattatatcatcaggaaccgtttgatgtggcgttctgcccgtaccgcatcagtccgctgggtgcgcatatcgaccatcagtacggaaaaatcaatggtttggcaatcgacaagggaatccacatggcctaccacccgaaacagaatggtgtggtggagttgcagtcgctgaacttcccgaagcgtgcccagttctttgtaaatgcagtgccggaagaaaagcagggagactgggctgatcatctgcgtggtgcggcaaagatgctgggagaaaagtaccgcctgaaagttggtctgtctggcattatcgagggtagcctgccgattggcggtttgtcctcgtcggcttcggtcattatttgctttttgtctgcactgtgcaaagtgaatggtatccatctagagccgatggagatgattctcacggcgaaggccgcagaaaaccagtatgttggtgttgcttgcggcaagctcgaccagagctgcgaagttctttctaagaaaaaccatctactgtacctcgatacgaaagatgacagctatgaactgatccctaccagtgagaaaatgaagccttataaggtggcaatcttcttctccggcttggagcgttctttgaaaaactctaagtacaatctgcggcaggacgagtgcaaggcagcggcctatgcactaatgggctatgcagggatggactatgacacctttgcaaatacccggctgcgcgatgtgccgtatgaggtgtttgaagcctataaagaccgtctgccagaattgtggcgtagacgcgcagaacactattacagcgagtttgctcgtgccgaaaagggtgcagaactgtggcgtaaaggtgatttggaaggctacggtcagctggttttcgagagtggcaaatcttccatttataattacgagtgtggctgcgatgaattgaaaaaactgtatgaaattatggctgacactgatggtatctacggtggccgcttctccggtgcgggattcaaaggctgctgcatggcgctgattgacccagacaaggccgaagatattgaagcaaaggtcacagcagagtatctgaaagcgttcccggcattggaaggtaagtacagtttccatctgtgcgagagtgccgatggtgtggaactgtaaggagaatacatagatgaaatgtttgattttagcagcgggctacgctacacggctttatccgctgacggagaattttccgaagccgctcctgaaagtgggagaaaagtccatcctcgattggctggtggatgatttagtggataccaccgatattgacgaatttgtggtaatttccaaccacaagttcgcgcagcattttgaggattggaaaagcaataagcaaaagacgcggccttatgagattactgtaatcgacgatggcacaagcaccaatgaaactcgtctgggagcagtcaaagatattcagctggcggtggaaaagctgaatttagctgatgatttgctggttatggctggcgacaatgtgctggatttcagtctttccaagttcgtggagttcgcaaaggaaaaggatacttcctgtgtgatgtgccatgtggaaaatgaactgaaaaagcagcagaaaacggcgattatcacgttggatggcaatgacctgattaccagctatgaggaaaagccgaaagagccgaaaggaaatctggctgtgccgccgttctattgctaccgtgcctgtgatgtaaagcggattcaggaagcactggacaatggctgcggttatgacgcaccaggtagctttgccgcatggctgagcaaacagaccccaatgcacgcttacgttatgccgggcaaacggtatgacattggcgatattaacagctatgagtatgtgaagagtgtgttctcaagataagtatacaagggagaaagtaataatgaaggagtttaaagatttgaaaattgccgtggccggtacgggatatgttgggctttcgctggcagtgttgctggcacagcaccatcaggtaacggctttggatatcgttcctgagaaggtggagatgatcaataacaagaaatctccgattcgggacgaatacattgagaagtatctggcagaaaaggagctggatctgactgcaacgctggatgccaaggaagcgtattctgatgctgattttgttgtcattgcagctcctaccaactatgacagcaagaaaaatttctttgatacctctgcagttgaagcggttatcaaactggtaattgagtataacccggaagcaattatggtgataaagtccacgattcctgttggcttcacagcaagtgtccgcgaaaaatatcactgcgacaatattatcttcagcccggaatttctgcgtgagagcaaggctctgtatgataacctttacccttcccgtatcatcgttggtacggatgtagaaaacgctcggctggtaaaagctgcacatacttttgctgaattgcttcaggaaggtgcaatcaaggaaaacattgacactctgttcatgggttttaccgaagcagaagcggttaagttgtttgctaatacttatctggctctgcgtgttagctacttcaatgaactggatacctatgcagagatgaaggggctgaatactcagcagattatcaacggcgtctgccttgatccgcgtatcggtactcattacaacaatcccagcttcggttacggcgggtactgcttgcccaaggacactaaacagctgctcgcaaattatgccgatgtaccggaaaacttgattgaagcaatcgttgagagcaaccgcactcgtaaagattttattgcggatcgggtgcttgaaattgctggtgcttatgaagcaaatgatagctgggatgagagcaaggaaaaagaagttgtggttggcgtttaccgtctgacgatgaagagcaacagcgataacttccgccagagttccattcagggagttatgaagcgcatcaaggcaaaaggtgctacggtcattatttatgagcctacactgaaagatggggacacattctttggtagccgtgttgttaatgatttagaagagttcaaaaaacagagccaggccatcatcgcaaaccgctatgacaagtgtctggatgatgtgaagaataaggtttattcacgcgatattttccagcgtgattaatataaaatttttatttaaaaggagaataattatgtctgcatttgataacgcaacccttatgatcactggtggtactggttcttttggttctaccgttctgaagcacttcctggattctgacctgaaggagatccgtatcttctctcgtgatgaaaagaagcaggatgatatgcgccatgagcttcaggccaagcacccggagaacgccaagaaggtgaagttctatatcggcgatgtccgcaatcctcagtctatccgtgacgcaatgcccggtgttgattacatcttccatgctgctgctctgaagcaggttccttcctgcgagtttttccccatgcaggccgtccagaccaacatcatcggtactgataatgtgttgcacgccgctattgacgctggcgtcaagcgtgttgtctgcctgtccaccgacaaagctgcttaccccatcaacgctatgggtatctccaaggccatgatggagcacgtcatctacgccaatgcccgtgtagctgctgagcgtggtggcactaccatctgctgcacccgttacggcaacgttatgtgcagccgcggttccgttatccctctgttcatcgaccagatcaaggcaggcaaccccatcactatcaccgaccccaacatgacccgctttctgatgaacctggacgaggctgtggatctggtcttgttcgccttccagcacgctaaccccggcgatctgttcatccagaagtctgatgcctctactatcggcgatttggctaaggctgtccagcaactgttcggcgataccggcacgaacatcatcggcacccgtcacggcgagaagctgttcgagactctgatgacccgtgaggagcgtctgcgcagccaggatatgggccattatttccgtgttgctgcggataaccgtgacctgaactacgataagtttgtcgtcaacggcgaggtacataccatggcagacgagtcctacaccagtcataacactacccgtttggatgtggaaggcactgttaagaagatcctgaccaccgagtatgtccagaatgaactgaagggtatcccgaatgtctaagaaaaagctgcttctggttggtgccggtggcttcgggcgcatggtggcggagcaggcgatgttccaatacgattgcgcttttgtggatgatggacagtctgtgggtgctgagatctgtggtattccggtgattggcggtcttgctgatttgccggagctgaaaaaagagtacagcttgctggtggtaggtatcggcaacaatcagttccgggcgcaggtgtatgagaaagcaaaatcacttggctatgcgttcccaaacatcattgctcccagtgcctatgtcagtccgtttgctgaagtcggctgtggctgtgtggttctgcaaaacgcttgtatccaaaatggagcctctgtcggaagcggtgttttgctgaatgccggaacggaagtccactgtgatgcaacgataggggactacgccttgatctacaccagcagcgtgattcgcacaggtgcaactgtggggaaatttgcccgcatcggcagcaactgcaccatttgcaataatgcaactgtgctggatagtgcagatgtttcggactgcactgcagtacattaagaggtgaaagaatgaacattctagtcacaggtgccaagggtatggtgggaaccgccctttgtaacaacctgaaaaacattcgtgatgggaaaaacaagacccgtccggcactggatattaaagaaatctacgagtatgatctggattctacctcggaggaactggacgagtactgccgcagggcagacttcgtgttcaatctggcaggtgtaaatcgtccagaaaacccggaggatttcatgaagggcaacttcggctttgcatctgacctgctgaactgcttgaaaaagcacaacaacaaggcaaccattatgctgtcctcctccattcaagctacgttggctggccgcttcggtaatagtgagtatggtcgtagcaaaaaggctggcgaggagctgttcttccagtatgctgaagaaactggggctaaggttgccgtctatcgcttcgtgaacctgatggggcatagccgccccaagtacaacagcgccgtcagtaccttctgctgggcggttgccaacgatgagcctttcactgtcaatgaccgcagcaccgagctggagctgctgtacattgacgacctagtagaaggaatgtttgatctgctggaaggcaaggaacagcactgcgaatttgacggtgtagagactattctgaaagaagatggccgttactgctgcgtccccgtgacacacaaggtaacactgggcgagatcgtagatctgctgcaggagttcaaggaacagccgactacgctcatgatgcccaagatgccagacggttcctttgctaagaagttgtattccctgtacctgacctatctgccgacggacaagttcaagtatgccctgaagatgaacgtggacaaccgtggttctttcacggaattggttcataccgctgactgtgggcaggtgagcatcaacatcagccgcccaggtatcaccaaggggcagcactggcacaactctaagtgggagctgttcatcgtggttgccggtcacggactgattcaggagcggaacatcaacaccggagaaacggtggagtttgaggtttctggcgataagatcgaggcagtccacatgattcccggctggactcacaatatcatcaatctgtcgaaaacggagaatctggtgacggtgatgacctgtaatgagatctttaacccgaaccacccggacacctttttcgagccggtgtaagaaaagatactggttgacgttaggagaatattatggaacacaattttaaatggaaaaatgacgggcgcaccaaggtcatgattggctgtggcacccgtcctgagatcattcggctggctgccgttatcaagcgttgccgtgaatactttgactgctgcgtggtctattacaatcaaaactgggacagaaacctttccaccgttttctgggaggatttcgagttgaaaaacaccttcggggagtatggcccggacattttggtgccggtggttggcgagaatcttggtgttacctgcggcaacattatgggccgcagctatgaactcctctctgaattgcagccggagggctatctggtgctgggcgataccaactcctgcctttctgccatcagtgcaaaacgactgcacatcccgctgtttcacatggaggcaggcaaccgctgcaaggacgagtgtctgcccgaggagaccaatcgccgtatcgtggatgtgatttccgacgtgaatatgtgctattccgaattcgcccggaagtatctggcggatacgggtctgcccaaggagcgtacctaccagacaggttctcctatggcagaggtgctgcacatgaatctggagaagattcagaaaagcgatgtgttggagcgtctggggctggaaaaggataagtatattctgctgtccgcccaccgtgaggagaacatcgattccgaaaagaacttcctgagcctgtttactgctatcaacgcactggcagagaagtacgatatgccaatcctgtactcctgccatcccagaagcaagcaccgtctggaaaagagtggcttcaaactggatcctcgtgtccgggtcaatgagccgctgggcttcaacgactacaacaagctgcaaatgaacgctttggcaatcgtctccgactctggcactctgcccgaggagagcagcttctatctgtccattggtcatcccatcgccgccgtgtgcatccgtaccagtacggaacgtcccgaggcgctggaagccggtgacttcattttggctggtattaccactcgggaacttctcaacgccaccgatatggccattaagatgaagcagaagggcgttctgggcaagccctgcccggactatgtggacgagaccgtgtccatgaaggtggttcgcatcattcagggttatgtaaacgtggtcaataagatggtgtggaggaaatactgagttataaagtgagaaagctatgcgacgagtgaatatattaggtgttgaaatttcggctgttaacaaagaaactgcgattcaatatttattagaaaacatggacaaagcaagaggaaaatatatttgtgcttgtaatgttcatactaccgtaacagcacatgagaatttggactatcaagcggttcaaaacaattcatttatgactttgccagacggaaaacccttatctagcgttggagttcgtcgcgggtattcggaaatggggcgagtgaccgggcctgattttatggaacaagtgattgcagccacagaaaaaagtgatgctcgtcactatttttatggaacaacgcaaaaaaatctgaatgcattacttgaatacttaaaggcgaattatccacaattatccattgtcggttgtgagccatcgttgtttaggccgttgacggtacaagaggaaacagcgctgtgcgatagaatcaacgaatcgaaagcggattttgtatgggttgcactcggtgcgccacggcaagaaaagttctgtgcaaaactcagcaaaaatacaaaggccgtttggatagctgttggtggagcatttaatgttatttctggagtaattccacgtgcaccgcagtggatgcaggatcacagtttagaatggttttaccgttttatgaaagaaccgcgtagactatttaagagatattttgtaacgaatagcaagtttatatggtacctatttagggataatggtgtcgagagatgaaaaaagtggttatggtcgtacctagtttttcagcaaaaggtggtatctcttctgttgtaaacggctatagaggttctgagctggaaaagaagtataagataaaatatattgaatcctattgtgatggaagcaaagtaaaaaaaatatgcaaggctttggaggcatattttttgtttttcaaggaaatggcaataaataagccggatcttgtgcatatacattcttcgtttggcggaagcttttatagaaaattaccatttgtgtatatagcgaacatctttaatgttcctgtgattaatcatattcatggatcagaaattgcaaacttttatattaatgcgagcaataagaaaaaacgattggtagaggattgttttgatagatgcaaatacttggtagttctttctgaagaatggaaaaataatttacaggtcgtaaaaacaaatacttcaaaagtcgttatagaaaattacagtattatacataaagaatgtttgaagagaaaaaatcatgaggataagattattctctttttaggatttattacggagcttaaaggtgtctttgacattcctgatattgcaaaaaaaatcattgaacgtaatagaaatgttaaatttgttttagctggaagcggagagattgagaagttacaggctattgttgaggaaaaaggtatatctcagtatttttcatttccaggatgggttaaaaaggaaaggaaagaaaaacttcttcaagaggcagatcttttctttttaccatcttatacggaaggaatgccgatgtcgattctagaagcaatggggtatgggttgcccatagttgccacaaatgttggagggataccgcagcttgtggaaaatggtaaaaacggctatatggtagagccaggaaagatagatgattttgctaaagtaatacttgaattgactgggaatgatgagcttatttaccgtatgggaaaggaaagcattgaaaaagcatatgagaagtattctttagagaaacatctggagaaagtgtgcaaattatatgaaaaagctatggatgagtgattgagatgaataaaatcggacgctacatatacggaacagaagaatttgtgcgtaaggtattttataagatttttcgagaaagtgtaattaaatcttctttgggaaactgtggcaaaaatgtacatattgcagaaaaaagcgatattaagggaattggcaacattagtataggagatgatgttgcgattggccctcatgcattgttgtggacaacacgagcaaacattatcattaaagagaaagtaattattggcccaggacttagtatcatcacaggcgatcacaagataaatgtagtaggaaagtacatggctgatgtaacagatgaagaaaaagatgacgaaaacgatcaggatgtcattattgagaaggatgtttggataggggctaatgtaacaattcttaagggagtaactgtagcagagggatgcgttattgggggggtgtgtaataactaaaagtactcatccctatggcatatatgtaggagtacccggtagacgtgtttctgaaagatttacgaacgaagaattagaagatcatataaatatattgcaagaaaaatccaaatggtgattttaatatgagaacaaaatacacaatcaatgaactaatatttgagatatatttgatatgcgtgattttagggtctttgctaagaaatatgttgggtgaatgggagccggtatatgatacatacaggttcgttagtaaaggaagatggggaactttctttttaagtttttcaagtattattattctagtgctgatatttagatgctttatacaatatataaaaaaggtccacgctggaataaggattttgattataagttcgattatatattatttgatatggactgtattagctttagataaagcgcctgctcaatctgttttttttgaatcgatttctacatcagtgattttgttgccagtggcagcgctacttggttttgatgacaatatatggaatatattggaaaacaaattaccatatataaatatactcttctgctgttgtttttatattgctgttttttctttttgggctaattatggaataaaatggcctatgaatgcgtcatataaaggaatattttcatgttggtttacatctgcttgcattatgacatttttggatttcccccaaaaggataaaagaaagctgatatactgtaatttattgcttattatcgctgctgcatttattacacagtcaagagcatgggtattacagacattaatactattatttatatttgttgctgttctgggtgataggaatagatctgttaagattttaatgggatttttgctgattattattgcggtattgggagtttcttatatttttccagagattacaggaaatttattcaatagaggaatggaagataccagaagtggacaatacgtaatcttttttgcgcagcattcatgggaagatttgatttttggattgggtatcaatgcttcttatagctacttgggaaataagaactatacttatttcgataatcagtttatgtttgttatgttccattatggaatcttcccagtgattgcatggttgtgtgcatatgcatctactttaaaaggcagtaagatttataatgagcaaagtagaatagtgattcgagcagcaaaatttgtcggattttttgtattactagcgtatatgggcgtttctacatattatcagattgagctgggatatagtggcgttattgtaatgatgcttattggaaaagcattaagagaaaaatattacgggagatcataggctgatgaaaaagatatcatttttaataggtagcttaggtggaggcggtgctgaaagagttacagttgccttagccgattatttttgtgaaaacggttatgaagttttctttattgtattttcaaaggcaaataataattataggattaatccgaaaattaaaattgattatttgcctgagaatacaggaaaatatgcaatattttttagaataaaagaattaaaaaaactattgaaaaatcaagcgccagattatgtgatttcgttgggcttgggatatcaatatctgatattggggaatttgctaaataaatatagatttattttatcggaaagaaatgctccgcagtattattacaattggtatcagaagatttatgtaaagtatagttacgaaaaagcatatagagttgttttccaaaccgaagatgcaaaacagtattatggtaagagcctagagaaaaagtcaaaagtaattgcaaatcctattacctcgtcaattccggatccatatgatggagaaagagaaaaaagaattgtagctgtaaatagattaagtcaacaaaaaaatatatttatgcttctcagggcaatgaaaagagtccttgatgtgttcccggaatatgtattagaaatatatggtaaaggcgagcaacgagaggaattggaaaaatacgctaaagaactaaatatttctgataatgtaaaatttatgggacaaaaagcaaatgttcaaacatatatagtgaatgctagtgtttttgtatcatcatcagattttgagggaatgtctaattcaatgctggaagctatggcgataggacttcctgtggtatgtacagattgtccgataggtggcgctagaatggttataaaaaataatattaatggcatacttacacctgtcggtgatgatagaatatttgcggatgaaataataggattactaaaaaatccggaaaaagcaaaaagactgggaaagcaagcaagtgagttgagagaacagctaaatgtaaagaaaatagcaaaggaatgggagaaattatttgaagattaagttaaagcttttaggtgtattgtaaatcttacaccctagcaaagagaggatggcaattcatgataatattatatattggaaatgtcggatatccagacactgcttcatcaattcatgtcaggaatagagctatatttatgaaatcttgtggacatgaagttcatgtgttatgtgagttggcttctgatggcaaaagaatggaagaagtggatgaggtggcataccaatatatggatccttatccggggcggggaaaggtaagaggcgctttttggaatttggaccaagtatctggggaattttattttaagcaaacactaaaatttcttgacaaaataaaacctgatataatcattttatatgagccgaattcgatactatatgttttgaaaatgttaaatctttctaaaaaagaaggatttaagttggtaatagaaactacggaatggagaaaccctaaagattatcggggaattatgccgagagttattaatacagaaaaagacttacaaaaaaaatatatcgataaaaaagttggcaatgttatagcaataagcaaatatttgtatcaacattatttagagcaaaactgtaatactattttgttaccgccaattttcccagaagctgataaaaagaaaaaattaataagagaaaattcagataatagaaaagtgctgaaaattgtttatgcaggcgcattggcttcgaaggattatattgatactctattacatgcgataattcgattaaatactgatgaagtacgtgttgtcattgatataattggccctgataagatgcaagtgcagaaattggtagggaacgatgaattggaaaaatatggaatttactgtcatggaagattgtcacatgacaagacgctaagtatagtggaaaaggcagatttgtcggttctattacggatgaataaaagatatgcgaaagcaggagtttcgacaaagttttgcgaggcaatgatgttaggggttcctagtatttgcacatctgtaggaggcacggatttatttataaaagataaatataatggattccttgttagagataatgacttgaatacattagaagccacattgctggatattatcagtttgtcaagagatcaaattgaagaaataaaaaataatgcattgacaacagcaaatgaactgtttacacctgataaatatatagaacaatttaatgcgtttttgaataagtgtaagtgagtctgcgtttgaatgtaaatagtgttataaagtctagtactaaatgtgaaacatctagggacggctctttgtccaaacagaaaatcaggaagaagggattaaaagaaggggctggagaggaggattcttataagaatccagaaatcatgctacagaagtactcttgatattagatgttttttgctatgctttttccttttttatgtttgagatgaatagaaatagggttctagttggaattccagatacctgcgtaaatcgaatgctgcgaattagaactacagctgactgattccttagcgggcgtgtaagcccagataaaatggtgtcaggctattacgttcttattctacagcttaggcaataagttggatggcaacacggcaggatgctgtggggttacccggaaatacattgtaggagaataaaatgctaaaggaaaggctacaaaatattcctttgggtgtaaaagcagcagtggtttataccatggcatctgttttttcacgaggattatcaatgattacagttccaattttcacgagaataatgtctacaagcgaaataggaatggttaatttatataactcctggtattctttgttgagcgtaattgcaacactatcattaacatcaggtggatttcaggcagcgatgaaagactttgagggggaaagggatcaatatcaatcggctgttttgacattaacatcaatgatggcaattgttctaggatgtatttatttcctcatacctgatatttggaatagaattatagggttgccttctgtgctgataattttgatgctagtaatgtttttctttgcaccggcgcaggatttttggctgttaagacaaagatatgaatataaatataaattagctggtgcattgacaatgggatcagctttagcatcaacaatattctccgtgatagttgttttatatttaaataaagcgggatcggatcaagttgtggtgggccgattgtatgcaactaacatagcaacaatggcgatttcggcggttatatggattaaaatatatgcaaaagggaaaacaatagtaaatataaagtattggaaatactctttgaagctgagcgctcctcttattggttatgcttttgcagcacagattttaagtgtttctgatcgaatgatgataagcaaaatggtgggaaatgatgcagttggaatatatagtactttatatactgtaagctcaatttcactattagtttggagtgcaattaattcatcatttataccgtatttatatcagaatataagtaaaaaagataataaaattagagaattatcattagctttaatgggatcgtatgctattattgcagttatgcttacttttttagcgccagaaatagttagaatattagctactaaggaatattatgaagcaatttatattatgccgcctattgcagcaggagtgtttttgacttctgtatcaaatatgtactctaatttactcatataccataaaaaaactaattatataatgtattcttcgactatcgcagctattgtaaatcttatactgaatttcatatgtataaatatttttggctatatggcagctgcatatactacactggtagcatatatagtgttagcaggtgcacaagttatattcgcaagaaaggttcatctcgaagaaactggaaataaatcggtatataatgataaggcagtcttgtttatggcaatattaacgatcatagctgcgttgttcggtttagtattgtatcgttatactgtgttaaggtatacattaatttgcattgggatgattgcaggaataaaaattgcgttagcggctttgaaaaaaatgaaaaataactagtagagtcaatttgagcctagaacacaaaaaaataacaattcaagtcttgccgagaactctcgggggtcggcccccaatgtgagtatatttgtgtttaagttccagcatgcaaaccttagcgttttgtttgtccagaaggtggatgcttttaccataggcgatcttgcaaaggctattcagtagctctttgatgatatttgaacgaatatcattggcgctcgtcatgaagatgatttgtttgagactttgataacacgtgatgagcgcttgcgtggtgagaatatgggtcactatttacgcgcggctactgacaaccgcaatttatactgcgacaagttcgtggtcaagggcgaagcaaatgagtctcatgcaagccataatacgaattatctggatgtacaaggaacgattaagaagattatgatgacagtgtatggggaacaacaattagcgggtaatcaatgactgaggaagggtggtgtgttattgaaaaactgaatatttgtagattagtgaatacgaggcactcgttgatattagtgcatgagatactatacgtttaaattagaagaataatattaggaggaagatttaaaatgggaaagtattttggaacagatggttttcgtggtgaagccggaattacattaacagcagaccatgcctataaagtgggtcgctttttgggctggtattataacgctctccgtgagcgcaatggtgataccgaccctgctcgcattgtcattggcaaagacactcgccgcagctcttacatgtttgagtacagtctggtcgctgggttgactgcttctggtgcagatgcttatttgctgcacgttacgaccacgccgtctgtggcttacattgctcgtgtggatgactttgactgtggcatcatgatctccgccagccacaatccctactatgataatggcattaagctgattgactgctacggcgagaaaatgcccgaggaaatcctgctgctggtagaggactacattgacgaaaagctccatgtctttgataaggattggccggaactgccgtttgctcatcgtgagcacatcggttgcacggtggactacgtggcaggccgtaaccgttatatgggctatctgatcagtctcggcatctattccttcaagggtgtcaaggtcggcctagactgcgccaacggcagctcttggaatatcgctaaaagcgttttcgatgccctgggtgctgatacctatgtcataaacaacaagccgaatggcacgaacatcaacaacaacgccggttctacgcatattgagggtctgcagaagtttgttgtggagaagggtttggatgttggttttgccttcgatggtgacgccgaccgctgcctgtgcgtggacgagaagggtaatgtcatcactggagaccatatcctgtatatctatggctgctatatgaaagagcgtggcaagttgctgaccaatactgtggttacgactgtcatgtccaactttggtctgtacaaagcgtttgatgagcaaggtatcggttacgccaagactgctgtgggcgacaagtacgtatacgagtacatggcgaagaacggctgtcgtatcggtggtgagcagagtggtcatatcatcttctccaaatatgccagcaccggcgatggtatcttaactagtttgaagatgatggaagtcatgctggctaagaagaagccaatgagcgagttggcggcaccgctgaagatctatccgcaggtgttggagaatgttcgtgtgaccgataagaaggctgcacagagtgatccggcggtgcaggaagcagtgtctaaagttgctgaggctctgggcgataccggccgtattctggtgcgtgaatccggcactgaaccggtcgttcgtgttatggtggaagcacctgaccacgatacatgccagaagtatgttgatgaagtggtcaatgtgatctgcgaaaagggatataaggtataaagtcaatgacgactctggcagtgtccggagtcgttttgtgtaagtggaaaagtatcatagaaaaatgaataataggaggggcaaaacctatgtgtggaatcgttggatttacaggaaatcgacaggcggcaccgatcctgctggatggcctgtctaaactggagtatagaggatatgactcggctggattggctgtccgggatggagaagcactggcacaggtcgtgaaagcaaaaggccgtctgtccaatctgattgagaaaaccgataacggtaatgcactgaaaggaacttgtggtattggccatacccgttgggcaacccacggtgagccgagccagacgaatgcacatccgcatgtttccggtaactgtagccgttccggttccggcacagtggagtctgaggtcgttggcgtacataacggcatcatcgagaactatactgaactgaaagaaaaactgttgaagcatggctatacgttctacagccagacggataccgaagtggtcatcaagttggtggactactattataagaagtacaacctcggccctatcgatgccattgccaagacgatggttcgtgtgcgcggttcctacgctcttgagctgatgttccgtgattatccgggcgagatctgggtggcgcgtaaggatagcccgatgattatcggtattgcggatggtgaaacttatgtggcttcggatgtcccggcaattctgaaatacactcgcaatgtgtattacatcggcaaccttgagtttgcaaagttgacgccgggtgaggcgcatttctatgacctgaacggcgatgaaatcgaaaagcagaccaccgagatcaaatgggatgcagaagcagccgaaaagggcggctttgagcatttcatgatgaaagagatccatgagcagccgaaagctgtccaagataccctgaattctgtgatcaaagatggaactatcgacttgtccggtgtggaaatcaccgaagaggaaattaagaactttgagcagatctatattgttgcctgtggctctgcatggcatgtgggcatggctgctcagtatgtgctggaagatatagcggatattccggtgcgtgtggaacttgcatctgagttccgctatcgtaaaatgccgctcaatcagaaagcacttgtaatcgttgtcagccagtctggtgagacagcagatacattggcagcactgcgtatggcaaaagaaaagggcattaccacaatggcaatcgtcaatgtagtgggtagtagtattgcccgtgaagcagacaaggtgttttacacacttgctggccctgaaatttctgttgctacaaccaaggcatacagcgcacagcttgcggccatgtactgcttgtcggttcagttcgcaaaggttagagaaaaaatcactgaagaacagtacagttactatatttctgaactgttgactctcccggagaagatgcagaaaactttggaagataaagagcgcatccagtggtttgctgcgaagtatgccaatgcacacgatgtgttcttcgttggccgtggcattgattatgcagtctgcttggaaggcagtttgaaactgaaagaaatcagctacattcactcggaggcatatgcagctggcgaactgaagcacggaactattagtctgattgagcagggaacgctggtcatcggcgtgctgacccaaagcgaactctacgaaaagactatcagcaatatgttggagtgcaagagccgtggtgcttatctgatggggctcactacttatggcaagtatgaaatcgaagatcaggtaaacttcacggtttatgttccaaaggtggatgagcactttgttggtagtttggcagtgattccgctacagctactgggttactatgtgtctgtagccaagggtctggatgtggataagccgagaaacctcgcaaagagtgtgacagtggaataagatgcaagacccaataaaagtattagccaaaatcctcacaaacatcctgaccgctctctacgagccgtttggattttcacttctgctttcctttttggctatgtttttctatctgtatgcatatgagcctaccgcagcaggaaaaggctggaagaacgccatagtaacatggtatcagaaattcaaggagagcgtgtcctttcggaaactgtttttactgaccttcgtgacatcgatgatcctgtttagaaccctgttaaaccggaacctgtggatgaacccattgtccgatgttatgggtggctggggcatctgggagacggtgaacggtgagaggcagctgaccaccgagtgtatcgagaacgtaatcatgatggtgccgttttcagcagtagtggcgtggacattcagagagaggattggaaacaatcggaagaagatcctgtggcaaagcgggaagatagcattcattttttcgataagcattgagatgctacagctgtttttaaggctcggtacgttccaactatctgacttgttctataacacagttggtggagcgcttggtggtttgatgtactacgcggggatgaaggtaagaaagcatctgtaatctgtaaaagaatcgaattatgtggaatattgggagcggatgctccctacgctgctctgataatcacacacctcttcgtggtgagcagtaggcaacgatctgagatcggcagagatgtgataaggaataaatgtagaaaaataaataggtgctatcattatggacgatattttgaaacttgcaaaggattattcgaaaaaacgtcatttagaccttcttccacatggtaataataatattttggaaaatcttgattttatatatgatgaaaactgggaaaatcaaggcgtaccttatccatacgaaatattaacgtatctattcgatagctattatgtcttaccagagcggccagatttggcagcgttgttttgttggcaggcaattaatcattcgtattacgttcagcagttaagcgataacaatgtagggttttgtcaggacacaaagggtgttgaacttgttcgtgatgcgattctaggtgactggaataacaaatataaaacagtattagagccttttctgaaaaggatgccggataaaacatttcattatgttgcatcatatatgcttaaagggtatgcgatggaaaagaaaggaatagcagaaaaatatagggctacttcatataaatcattaaaacgaaaaatttcatcgctatcggatattttggataatgcttatggaaagtcatactgtcagatttccaatccgacacttatcggtaatgtagtgaatctcggaattgacaatgcaaataaaagaaagagccgagacgtaacacacagttttggaatgaaattaagagcgctcatgctaggaaaagaagttgagattactttctgtgatgtgcagaggacaaagaaaaaatataaattcacagatgaagaaaggctttcgttcgttctttttggtattctctatgcttctcgttgcaacaatttccatggaaatgttgcagctcgaatgaacagcattaatgcaaataaagatacatttaaaatgtatacagatatgtttttggcagagtatattattttagcaatccatctgaatagccaaggtgctttatcggatgtggtactgaataaggttaagaaaaatgccaatttgatggtatgatagatattgctcgtagactcgcagagtgatatactttagttattataattggaaagaggtttgtatcctatgcccagaacaaaaggtagcaagaataagcccaaaactgtgactgctgatttcgcaacgcagattgcagaaaagcagtccgcaaaggaagcgctcacagcggaaatcgcatccatcaccgcaaacattgacactttgaaagctgacctgaaagagaagaaagcatcgctgaaagctatcgacaaggaaattgtcaagctggaagcaaagaaggcgaaggcagatgccaaagctgcagaagaagcaaaaaagacagaagcagagtccgttctgaaaaagctgcttgccgaaggcatgagtgccgatgaaatcctcgcaaaactgaaataacaggaaaaacccgtgatggacaggcataacgcaccgttcattacgggttttagggttataagaacataagttcatccggcggcaacatcaaactgaaaatgtgccggaaggttgaactgtttgataaacgcatggtgctgggcgtggtagtgacgcagatcgtaccccagatgatgtagttccagcagcttcaccagcaccagattgaggtggattcccttagtagcggcaatctgagcagcatccagcccgcgcttcgtcatttgatagacttcatcactgtccagcatcaggtgggatgtgaaagcgttatgctcgtaaagacggatgtgcctatccttaatggtcagaaacttgttcagggtatgcaggtccataagtagccgatgctccagataatgccccagcgcatagccgcacaccatctgctttgtctgtttatccagctggcgattgataagaatcaatggcttatcaaaatagagcgaaagcaaacccaacatatctttaatgcgggatgtttcactgatgtccagactgcaactgcgcgcgatttgtttaatgttgcgagttccggcattttggacaagttcgttggcagctcggtagataaatgcagaatccataatgtgatctcctttcggggatggcatagtgaatggaacagtgatttacaggttcatgattcgttctttttctcgtttttgttctcggtacataaaataggctttgtgcatttcatacatgatgccgtccatatcctgtggggtcaaatctccgctggcaaatagctcagtaagctcaaatgcgagatgctgggcttctattttgcccttttttccgtaggcttcggcggcacgttcgataaataaagactgatccggctgtaaataggtcaaaggtacatggaatatatcggccatcttttcgagcatttcaacactgcgagggtagcggccatcacgctcccatccgatgatcgttcgtttgttgatacccagacattgtgccaattcgtcctgtgttaaagaatgtttctttcgtagatcgcgaactttctctccaaatttcatgtttgcaacctttctatggcgtagttatcgtgctgtaacaatgtgcaacgggagctgtaaatattcaatctggaagatgcaacaaattttcacatttacatcttgacacggcgacacgacttgcttataatatatgctatattctatcatcttttgaattattataccgtaaaaaatgtgaatatgcaagccgaaaaaggtgaaaaaagagcggaagttcaaaaggtgaaattgaatagaagaaaaaagaaatttaaaccaacacaaaggaggccgtgagaagatgagcaacggagaacatgagatccgcaccccaaaggggctgcggatcgggaatcgcagtgtcgttgatggaaagaatatgcttcagatcaagcgtggtggctgtgaagattatatttctgctgaatctctggtggagtgtattcacggccttccagtgaagagtatcgaatttttcacagcagagaaccatcggaaagaagcctgaagcagagtgcttcatcggacactgaaagcgcagaggcggaatcttaggcggcacctggttagccgaccagctccaccagacgttcttttgggtctacaatataatatctgtttgtttagagcgataccgtagcaatatgtgatataggccggaacagaatgaacgaatgcagcgcagtagtgcgcctgcaagtagttcatcctgtttcggcttttttatttgaaagttttttgaaaaaagtggttgccaaaacccttatttagaatgctataggtataggcataattttaatcgaatggagcttaggctccccgttcaaaaaaaacgggtgggtctgaggtcatttctgctgttctttcatagaagactcacctgttgccgaaaggcaggaaggtggttaaaatgaattttattaccttgaaagaactgaagaagatggttcctgttgcaagtgaatttaagcgagtgccgggtttaaagaagatattggaggatgg

SEQ ID NO: 213 - DNA, 31472 bp, unidentified
  source 1..31472: mol_type = unassigned DNA
  misc_difference 24623: note = a, c, g, or t
  misc_difference 24624: note = a, c, g, or t
  misc_difference 24625: note = a, c, g, or t
  misc_difference 24626: note = a, c, g, or t
  misc_difference 24627: note = a, c, g, or t
  misc_difference 24628: note = a, c, g, or t
  misc_difference 24629: note = a, c, g, or t
  misc_difference 24630: note = a, c, g, or t
  misc_difference 24631: note = a, c, g, or t
  misc_difference 24632: note = a, c, g, or t
  misc_difference 24633: note = a, c, g, or t
  misc_difference 24634: note = a, c, g, or t
  misc_difference 24635: note = a, c, g, or t
  misc_difference 24636: note = a, c, g, or t
  misc_difference 24637: note = a, c, g, or t
  misc_difference 24638: note = a, c, g, or t
  misc_difference 24639: note = a, c, g, or t
  misc_difference 24640: note = a, c, g, or t
  misc_difference 24641: note = a, c, g, or t
  misc_difference 24642: note = a, c, g, or t
  misc_difference 24643: note = a, c, g, or t
  misc_difference 24644: note = a, c, g, or t
  misc_difference 24645: note = a, c, g, or t
  misc_difference 24646: note = a, c, g, or t
  misc_difference 24647: note = a, c, g, or t
  misc_difference 24648: note = a, c, g, or t
  misc_difference 24649: note = a, c, g, or t
  misc_difference 24650: note = a, c, g, or t
  misc_difference 24651: note = a, c, g, or t
  misc_difference 24652: note = a, c, g, or t
  misc_difference 24653: note = a, c, g, or t
  misc_difference 24654: note = a, c, g, or t
  misc_difference 24655: note = a, c, g, or t
  misc_difference 24656: note = a, c, g, or t
  misc_difference 24657: note = a, c, g, or t
  misc_difference 24658: note = a, c, g, or t
  misc_difference 24659: note = a, c, g, or t
  misc_difference 24660: note = a, c, g, or t
  misc_difference 24661: note = a, c, g, or t
  misc_difference 24662: note = a, c, g, or t
  misc_difference 24663: note = a, c, g, or t
  misc_difference 24664: note = a, c, g, or t
  misc_difference 24665: note = a, c, g, or t
  misc_difference 24666: note = a, c, g, or t
  misc_difference 24667: note = a, c, g, or t
  misc_difference 24668: note = a, c, g, or t
  misc_difference 24669: note = a, c, g, or t
  misc_difference 24670: note = a, c, g, or t
  misc_difference 24671: note = a, c, g, or t
  misc_difference 24672: note = a, c, g, or t
  misc_difference 24673: note = a, c, g, or t
  misc_difference 24674: note = a, c, g, or t
  misc_difference 24675: note = a, c, g, or t
  misc_difference 24676: note = a, c, g, or t
  misc_difference 24677: note = a, c, g, or t
  misc_difference 24678: note = a, c, g, or t
  misc_difference 24679: note = a, c, g, or t
  misc_difference 24680: note = a, c, g, or t
  misc_difference 24681: note = a, c, g, or t
  misc_difference 24682: note = a, c, g, or t
  misc_difference 24683: note = a, c, g, or t
  misc_difference 24684: note = a, c, g, or t
  misc_difference 24685: note = a, c, g, or t
  misc_difference 24686: note = a, c, g, or t
  misc_difference 24687: note = a, c, g, or t
  misc_difference 24688: note = a, c, g, or t
  misc_difference 24689: note = a, c, g, or t
  misc_difference 24690: note = a, c, g, or t
  misc_difference 24691: note = a, c, g, or t
  misc_difference 24692: note = a, c, g, or t
  misc_difference 24693: note = a, c, g, or t
  misc_difference 24694: note = a, c, g, or t
  misc_difference 24695: note = a, c, g, or t
  misc_difference 24696: note = a, c, g, or t
  misc_difference 24697: note = a, c, g, or t
  misc_difference 24698: note = a, c, g, or t
  misc_difference 24699: note = a, c, g, or t
  misc_difference 24700: note = a, c, g, or t
  misc_difference 24701: note = a, c, g, or t
  misc_difference 24702: note = a, c, g, or t
  misc_difference 24703: note = a, c, g, or t
  misc_difference 24704: note = a, c, g, or t
  misc_difference 24705: note = a, c, g, or t
  misc_difference 24706: note = a, c, g, or t
  misc_difference 24707: note = a, c, g, or t
  misc_difference 24708: note = a, c, g, or t
  misc_difference 24709: note = a, c, g, or t
  misc_difference 24710: note = a, c, g, or t
  misc_difference 24711: note = a, c, g, or t
  misc_difference 24712: note = a, c, g, or t
  misc_difference 24713: note = a, c, g, or t
  misc_difference 24714: note = a, c, g, or t
  misc_difference 24715: note = a, c, g, or t
  misc_difference 24716: note = a, c, g, or t
  misc_difference 24717: note = a, c, g, or t
  misc_difference 24718: note = a, c, g, or t
  misc_difference 24719: note = a, c, g, or t
  misc_difference 24720: note = a, c, g, or t
  misc_difference 24721: note = a, c, g, or t
  misc_difference 24722: note = a, c, g, or t
aaagctggcaggagggaatcagtggaggaacagcataagaagaaaaaatcgggaagtgccaaaaaagcggctccccatgggataaaagacagaaagagcgtatcagaacagaaaaaaaaggcgcagcgcgcagaacgtattcccgagcggaaaaagtcgaactgggacgatggagaatttctcgacgactgggacgaggtatccggcaaaacagcagcgcacagcaataagcgccgcgtgaaaaagcctgccggaaaaagcagtcagacctttcatgaaaaaaacagtcagaaccgcactgtaaagcgctctgcgtccgcatcgaccgcagcatccggcagaaaccgaaaacaccggtctgccagaaaagagccgatggcggcgctggatatcgcgattgctctgacgggcgtgctggttttggcggcggcagcgtttacgacatcgatgtatctgggacgaaacgagcagaataagcagatggaggcggtggctgcagtcgggaaaaatctggaagcgatcgggatgtccggggaagaggtcctgtcggcggtcgctgtcgcagcgcagaacgtctcggaggaggtttctgaagaagagacgacggagacggaaaccggatatgaggaaaaggatctggaagccaatgtcgacgttattttaaagctgtcttcgatgcagaaggatatgaaaattaaattcgcggacaaaaactccggtaagctgataggaaatcaaccctttaccgtaaagctggagggcgcgtcgagccagaacgcaaaggatgacgacaaggacggcataatttatttaaaagacttaaaagcaggcgattacgtcgttaccgtgaccggaccggatgaaatcagcggcagaaaagcagccggaatttccgggcgagtgacggtaaaggacaagattgagtataaaaaggtcgacgtgacggacgagatcaaaaaggaatcggagatcaacgtggcgaaagaggatactgcgattgcaccggcagtggaatcggttctgcaggatactgtggaatgggttgcgtccaccaaaacaccggcaggaaacggacaggaatatgaagaggtaggcaagtccgatattccggagcctgcccaggcaagacttctggagccggagataaaatacgcatattttgcaaaggaaacgcagatcgccgttttcaatcagcccagggaggaatcccccgcggagagcgagaacacaccgccttcggagagtgaatcttcctccgagagcgaaagcacaaagccgtccgagagtgaaagtacaaagccgaccgagagcgaatcagaatccggaagcagcaagccgacggaaagcgagagcacgaagccatccgagagtgaaagtacaaagccttcggaaagcgaatctgcaaccgaaagcagcactgcagcgacagagccgacaaaaacgccggaaaccaagccggaggaggtaaaggtcaagaagatcacgatctcaggctctgcaacggttgaggttggacagactgtttccctttctgtaacggtatcgccggacaatgcagcgaacaagtccgttcgctgggaaatcgtttccggaaaagagtttgtctcggtggatgataagggaacggtaaaaggcgtaaaagccggagaagcgaagatcaaagcggtcgcgcaggacggcagcaacgtagagagcggaatcagcaccgtgaaggtgacggagaaaaagacaaaccgcggcgatacaaaaaccttattgaaagataaaaacggcaaccagctgtactgcaaggacggggatacctatcgtgaggcaacgacggcggattattataccaaagacaaattttaccgcaaaaaagcgaatgtggaatatcggtataccggatggcagacgatcgacggaaaacgctttttctatgacaaaaacggaactgctgttaccggcgaacaggtgatccagggcgtgaaatacacgttcaatggggacggcagcttaaatacgggaactgtgatgggaattgacatttccaaacacaacggcaatatcgactggaacgcagtcaaaaattccggtgtgcagtatgtcatcctgcgctgcggctatcgtggctcggcttcgggcgtgctggtcgaggatcagaagtttaagagaaatattcagggcgcgacggcggcaggtctgaaggtcggtatttatttcttcagccaggcggtgaatgaagtggaagcggtcgaagaggcctccatgacgctttccctgattaaaaattacagaatcacttatcctgtctatattgacgtggagagcgcgaatgggcgcgcagacggaatttccaaagcggcgcgaacgtctgtcatcaacgcattctgccagacgatccgtaacagcggctacacgccgggactgtatgcgaacaaaaactggctgacggaaaagatcaatacaggcgcccttggcggctgcaagatctggctggcgcagtatgtcgctgcaccgacctatggaggacgttacgagatgtggcagtattcgtcgagagggtcgattgcaggaatcaaaggaaatgttgacttaaacgttagctatatgggttactgatattgtgacaaaatttgatacggatagggcgctgcagtctgcaggatatccgcaagctgcagcgtgctttgctgggaatggcggcaacgccgtattttcctgttggaaaaacacggaaaatatggtacactggaaaaaaatcaggattatgggattttgcgtccttttgcgcagaatcgaaaaggagaagaggcatgagaacctatcttgttaccggaggagcggggtttatcggttccaattacattcactatatgttccgcaagtatgacaacgaaatccgcatcatcaatgtggatgcgctgacctatgcgggcaatctcgagaacttaaaggacattgaaaaccgcgataactatacctttgtaaaagcaaatatctgcgataaagaagcgattgcaaagatctttgcagaaaacgatattgaccgcgtagttcattttgcagcggaaagccatgtagacagaagcatcaggaatcccgaggtattcgtacagaccaacgtgctgggtactgccgtgatgttaaactgcgcaaagaacgcgtgggagcttccggacggcacctttaagccgggcaagaaattcctgcatgtttcgacggatgaagtatacggctctttgagcgaagacggcggctatttctatgagacaaccccctatgcaccccacagcccgtattctgccagcaaggcaggatctgatatgcttgtaaaagcgtatatggatacctatcatttccctgcaaatatcacaaactgctctaataactacggtccttaccagtttccggaaaagctgattccgctgatcatcaacaatgcgctgcacggcaagaagcttccggtatacggcgacggcaagaacgtccgcgactggctgtatgtcgaagaccacgcaaaggccatcgacatggtgcaggagcagggcagactgttcgaaacctacaatgtaggcggtcataacgaaaaacagaacattcagatcatcgaaatcattatcgagaccctgcaggagatgcttgcagacgacgacccgcgcaaggcgcttgtcagcaaggatctgattacctatgtagcagaccgtaagggacacgacagaagatacgcgatcgctcccgataagatcaaggaagagatcggctggtatccggagacgatgttcaaagaaggcatcaaaaagaccattgcatggtacttcgagcatgaagactggatggagcgcgtaaccagcggcgactaccagaaatattataacgaaatgtacaaagcctgagaaatttccggactgccgggaggaaaatgccggacagaccgagaaaaacagggctttgtataccagaatggggacggcgcgcgacaccgttccccttttggcgcatctgggcaggagcgcacggcagtagaacagtgccgccgggcagtagaacagtgctgccgggcagtagaacagtgccgccggagcgatcctgtaaagcaaaatgtttttcatacaggcgaatgaacgcataggaatggaggaatctatgaaaggtatcattcttgcaggcggctccggaacccgcctttatccgctgaccaaggcggtatccaaacagattatgccggtttacgacaaaccgatgatttattatccgctctccacactgatgctggcgggcatccgggagattctgattatttccacgcccagggatctgcctgcttttaaagaactgttcggtacaggcgagcagctgggactttcgatgtcctatgcggttcaggagacgccccgcggactggcagacgcatttttgatcggcgcggatttcatcggaaacgacagcgttgccctcgttctgggcgacaatattttctatggacagagcttttccagagtgctgcgtcaggcagcggagcgggaaaagggtgcgacgattttcggctattttgtccgcgatcccagagaatacggcgtggtggaattcgatgaaaacggcaaagcgctttccatcgaggaaaagccggagcatcccaagagcaactacgcagttcccggactgtatttttatgataacgacgttgtggaaatcgcccgcaacgtaaagccgtctgcaagaggcgagatcgaaatcacttcgatcaacaacgaatatctgcgcagagggacgctgatggtggagacgctgggcagaggctttgcatggctcgataccggcaaccacgatgcactgctggatgcggcagatttcgttgcagcggtacagaagcgtcagggcatgtacatttcctgcattgaggaaatcgcgttccgcagaggttttatcgataaacagcagctcttaaagcttgcggagccgctgatgaagaccaactatggcaaatatctcgtagaggtcgcaaacggactttaaaaacggaacaggagaatagaaaaatgggaaaaatttcagtagaaacatgtcatatcgaaggtcttaaggtgatcacccctcaggtgttcggcgacgcccgcggttacttcatggagacttataactacaacgattacaaggaagccggcatcgatcaggttttcgtacaggacaaccagtccgcatccaaaaaaggcgttctgcgggggcttcatttccagatcaattacccccaggacaagctggtgagagcgattcgcggcgaagtgtttgacgttgcggttgacttacgtcccggctccaaaacctatggtcagtggtacggtgtgctgctttccgaagagaacaaaaagcagttctttatccccaagaatttcgcacacggctttgtagtgctgtcggattatgcggaatttgcctataagtgcaccgacttctatcatcccaacgacgaaggcggtctggcatggaacgatccccagatcggcgtagaatggccgattccggaaggaatggaactgaccttgtctgacaaagataaaaagtggggctcttttgccgaatttacagaaagcagaaataaatgaagagactgaataaaaaaacaggaatcgccatattcactgcggtgatggcgattcttgccgttattatccttgtttatcataatccccttgccaatccgcaggatgagctgctgaaaaaagtgattgcctgcgtgctgatcgtggcggcggtcattgcctttatccggttatacgataagatcacggtactgccggtggaattataccagaaccgcaggctgatctggaaactggcaaagagcgatttcaaaaagcgctacgcaggctcttatatgggagcgttctgggcgatggtgcagccggtcatcacagttgcgatgtactgggttgttttcgtgattattttcccgaaccggactggttatgcctccggaggcgtagaaggtgttccatatatcctgtttctgacagcgggactggtgccctggttttatttttccgaagccctgaccagcgcaatggtgtcgctgctggaatataattacctggtaaaaaaagtcgtattcaaaatcagtatcctgccgattatcaagattattgcagcgacatttattcatgcgtttttcgtgctggttttactgatcgtggcagcattgaacggctattatccgagcctgtatacactgcaggtattttattacagcttctgcatgtttgtttttgtactggcactcagttatacgacctgctcggttgtcatttttttcagggatctgcagtccattgtcaatatctttctgcaggtcggtatgtgggcaactccggtgctgtggaatatcaatgattttccgatgaagcttcagatgatcgtgaaaatcaatccgcttgtatacattgtggagggctacagaagcgctgtatacggaaaacagtggttctgggaggatttttactccacggtttatttctggattatcacggtggtgctgtttggcattggcgcgctgattttcaagaaactcaagattcattttgcggatatcatgtaaaggaaaactggttatggaacaaaaagaactggcaattcatgtggacagggtgagcaaagtatacaagctgtaccgcagaaaccgggaccgtctgatcgaatccctgggactgacaaaaaagaaactttccacgccgcattacgcattaaaggatgtcagtctggacatttataaaggagagactgtcggcattattggcacgaacggctccggcaaatcgacgattttaaagattatcaccggcgtattacatgagacgagcggtactgtgcaggtaaacggcagaatttccgccttgctggagctgggcgcaggctttaacatggaatacaacggcatcgaaaatatttatctgaatggaacgatgatcggtttttctgaaaaagaaattgatgaaaagctgcaggatatcctggattttgcggatatcggggactatgtgtaccagccggtaaagacctattccagcggtatgtttgtccgactggcatttgcagttgccatcaatattgacccggaaatcctgatcgtcgatgaggcgctttcggttggcgacgtatttttccaggcaaaatgctatcgaaaattcgaggaattcaagaaaaaaggcaagacgatcctgttcgtcagccatgatctgagcgcgatcagcaaatactgcgaccgtgcgattctgttaaatcagggcgtaaagctcggagaaggttcgcccaaagacatgatcgacgcctacaagcaggtgctggtgggacagtacgaaacgcctaaggctggcgtggatgtacctgacctgacggcggacggggatgttcgggcggcgcttgacaaacagaaaaagaagcaggaagcggcgcgcatgggcgtcaacccggagacactggaatacggcacgaagcaggcggaaattgtttcgtattacattacggacaaaaacgacgtgcagacgactgcaattttaaagggcgacgaattcacgatgcatatgaaggtgaaaatcggtcaggatcttccggcgccgatctttgctttttccatcaaaaacatcaagggcgtggagatcacgggaacgaacacgatgtttgaaaagacgtttctggagagcgtaaaggtagggcaggtgctggaaattacattccgccagaagatgcgcctgcagggcggtgactatctcatatccctgggtgtgacagggtatgaaaaagatacgtttaaagtgtatcatcgtctttatgacgtgctgaacattacggtcgtgtccgacaaggatacggtgggctattttgatatggaatctcaggttgaggtgaaggagatttaacgtatgcagacaggcaggacagagaagatcgggaatgttgtgctggattattcccattatccggaacaggatttttactgcgacggagcgtcggaggatgcacttttggagctggtaaaaacaatcccgccccgggaatatccccaggaaatctataaagcggcgagctgggaggtgctttaccacctttccgacctgcgggaaaatatcgtcggatggctgcctgttgacaaaagcatgaaggtgctggaaatcggttccggctgcggcgcgattacgggaagcctcgcacagaaggcaggcagcgtaacctgcgtcgacctttcgaaaaaacgcagcttgatcaacgcttaccgccatcaggattgtgacaacgtgacgatccatgtgggcaacttttcagacatcgagccggatctgccgacggattatgattttgtctgtctgatcggcgtgttcgaatacgggcagagctatatcggcggaaaaaccccctttcacgatttctaccggattatcaaaaaacatgtgaaagccgatggacatatcgtgattgcgatagagaataagcttggtttaaaatattgggcggggtgccgggaagaccacgtcggcacgtttttttcaggcctggaggattacccccagggcggtgcggctcgcaccttttcccggagcggtctggaaaaaatcctgaaagaatgcggtgagacggaatatcatttctactacccttatccggattataagtttatgacgacgctgtactccgaccggtatctgccgaaagtcggagaactatctaataacctacgaaatttcgatcgcgaccggatgctgctgttcgatgaaaaaaaggtgttcgatatgctcatccgcgagggactgtttggacagtacagcaattcgttcctcgtgatgacaggacccatgacggatattgtatacagccgtttttccaacgacagggcggagcatctgagcatccgcacggatattctggaaaaggacggaaaacacactgtccggaaatatccggcaaccccagctgctgcggcacatattgaagccctggcagaaaatgaatgcgtcttcacagaacggtttaaaggcagcaccctctcagtcaaccgtctggagctgaaacggaatccggatggattgccctttgcggaaatcgaatatctcgaaaatagccggacattggaagagctgctggatgagtgcttacagaacaatgacgaagccagttttgataagctgtttgaccgttactgcaaaatcgcagcgtggaaagcggaggggacgaagcaggattatgacctgaccttcccgaatatctgcgtacagggtgatatctggacgatgatcgattacgagtggacgacagacaagctgacgccgcagcagatcatcagccgggcattgaactgctatggtcaggaggatccggttcggatggagcatccgattgtgaaaaagcatctggaagccctcggcgtcggcaaagagcagatacgggagctttcggaaaaagagctggcgttccagcactttgtcctgcgggaaaaggacgggcggagccggacggctcttgggcagcttcggcatctgatcggcaaccgtgctgtgccgtatcaggaattttttgcccgggcggaccgcaaaaaggtgcaggtatttgaagacttcggcgcaggatatacaccggagcattcttattatcaatatgatgcatatgaggcggacgatctgatcaacgccaggatcatctgcaaagcaggtacaaaagcgattcgcttagatcctgcggagctgccgtgtctggtacagattcatggaatcgaatggcgcggaaaagcgctgacgcgggcacagctggatcagtgcctgtcgacgaacggacaggtgcttgcagataccccgtcccatgttccgacggtactgtttgaaacaggagatccgaacatcagcgttcggctggattgtctggacaacgaggcgacggatggcgaagcactgatcatccgggcacagatcgcatggctgtcggcggaaatgctgcaggatattcaggcgcgcctggcggcagcggcaaggaggaaaggtttttggtttcaaagataaaagaaacaattcaggataatctggtaaagagaagataccgatggtatcaggagcagattcagaaacagacgctcacctatgacgagtggattcgggaaaaggaagcccaggaggacgagacactgcgcgcagagcacagggcagagcacgcggaggtgatctcctacgacgagtgccgtgcggattttgatgtgcgtcggtatgcccacggcgcgacgccggcggacgtcctgatttttcacgcgccggacgcaagcccggacacgagaggcatttcacatgtgctcagctggtttgaagcccatcccgaaacggtgatcgcctacgcggacgaggatgaaatcgacgaagccggtaagcgcaaaaatccctggctgaagccggactggtcgccggatacgttgatgtcctgcttttatttcggcggattctttgcggtgcgcagacaggcgatggagaactgtccgtggctggcagatgagaacccactgcgcaacctttatgacctggtgctgcgcctgacggaaatcgagaatggaacggcgcatatcgacagcgtgctgtttcatcatgaaaaaatcgaagtctggggtatggaagagacgtatgatgatctgaaaaaggcggcatatgtaagaagaggctggcctcttacgccctccgggaaggtttcgatcatcatcccgaccaaggatcatccccatattttatcgaattgcattcattctgtcctggaaagtggaaactaccgggattttgagatcatcgttgtggataacggaagcaatgaacaaaaccgtgcaagaattgaacggatgcgcgatatgttgaacgaggatttccggttcgtttatcactatgaaccgatggagttcaatttttccaaaatgtgcaaccttggcgtgtccctggcgaccggcgattacatcctgctattgaatgacgatatcgaaattacgcaggacaactggctggaaaagctgatggaaaaggcggttctgccgcacgttggcgcggtgggcgcaaagctgatctatccgggcacggagatcattcagcacgcgggcatcaccaacattcatctggggcctgcacacaagctgcagttccgctccgatgcgctggaattttatttcgggcgcaaccgcatggcgatggatgtcctgggtgtaaccggagcctgcctgctggtgaaaaaaagcatttacgatcaggcgcaaggactgtctgagaacctgcgtgtcgcgttcaacgacgtggaattctgctatcatgtatatgaaatgggctattacaacgtggtacgcaacgatgtgacgctgacgcatcatgaatccttaagccgcggtgcggacgacagcacggaaaagctgcgccgcctgcatcaggaactgaatttgctctatgaactgcacccgtccctatacggaaccgacccgttctatcacagatatctggtaaaggatgtgttggatgcagaattttatacgggctgccgttatgattttgacaaaagagtggaaaaagtttcccctgagaagatcgagggtgttctggaaccgcagtggcataatgaggtgctgcgcatcggtgtggagttcgccggggacatgggacgctggcaaaggggcactgcaggagcaggaactggcgactggatgatccagggctggacgtgggcactgcaggttgacaactgccggtacgatttttccctgctgttaaagaaggtggagaccggctatattgcgcccggctccagtacggaagcgattcctgaggatcggggcgaggtctggaggattccctgtacgaggcagttccgcccggatatcgacgaaaatctgcacggaattgtccataccgagctgccgggcgtgtgcgtgaccttcgatcgggacagcctgccggagggagattacctgatcggctttttgtgggaagatacctgctcgcggcagaagctttaccgcttcagtccggaaatgcttacagtgaggaaataataaaatcatggaagaaaaaaaggactatcaggacgcttacgagaaagaacattataaagccgtttatctggcaaaccgggtcgctgagctggaggatcaggtggacgatctgcagttcaaattgaaccgcatcaaaaacaatccgatctggaaagcgtccggccctgccagaaagtgcatgcattttgtgatccgccagaaggaccgtttgaaaaattgcggcagcctgtcgggcgtgattgcaaaggtgcgctataaatcctgggaaaagaaggcgatgacccattacggaacccagagcttcccgtccgcagaggaaagacagaagcaggaggcggctgtctttgaacggatgccaaagatcagtattcttgttccgttgtggaacacgccggaaagctttttaaccgagatgatcggctccgtccagtggcagacctacaaaaactgggaactgtgtctggcggacggttcggacgatgcgcacgcctatgtcggcgaatactgcaaaaggctggcggcgcaggattcgagaatcgtttatcagaagcttgccaaaaacgagggcatttcgggcaacacgaacgaatgctataagcttgcaaccggcgagtttatcgggctgtttgaccacgatgatattctgcatccctgcgcactttacgagtatgtaaaggcgatcaatgaaaaggatgcggactttatttattgtgatgaggcgacgtttaagagcccggacatcaacaagatgatcacgatgcacttcaagccggattatgcgatcgacaacctgcgcgcgaacaactatatttgtcatttcagcgtattttccagagagctgttggatggcacggagctgtttcggacaaaatttgacggcagtcaggatcatgatatgattctgcgcctgacggacaatgcgaagcatatcgtccatgtgccgaagcttctgtattattggcgctcccatgcaggcagtgttgcgggcaatatcgaggcaaagccttacgtggtcgaagcggcgagaggcgcggttgcggatcatttgcgcagacacggcttcaaaaactttacaattacgagcactcgtgcgtttgagacgatttttaaaatcagttatgaaattatcggggaaccgaaaatttctatcattattccgaataaggatcatgtggaagatctgcgccgctgtatcagctccattgtggaaaaatcgacctgggaaaattacgagatcattgtcgtggagaacaacagcgagacgaaggagattttttcctactatgacgagctgcagaataatccgcagatccgcgtggtgaccttcgagggtaaatttaattattcgaaaatcaacaatttcggcgtctctcttgcgaccggagactatgtgctgttgttaaacaatgatacgcaggtaattacgatcaactggatggaagagcttctgatgtatgcgcagcgcccggatgtcggcgcagtcggcggaaagctttactatggggataaaacgatccagcatgcgggcgtcgtgatcgggcttggcgcgcatcggacggcaggacatgtgcattaccgccagaaacgggaaaatttaggatacatgggacgtctgtgctatgcgcaggacatgacggcagtaaccggagcatgtcttttggtgaaaaaatcgctctatgagcaggtcggcggtctggacgagagctttgaaatttcattaaacgatgtggacttctgtttgaagctgcgcaaggctggttatctgaacgtctttacgccctttgccgagctgtatcacttcgaatcgatttcgagaggattagacgatcagggagaaaaagcaaaacggtataacgaagagtccgaacgcttccgcaacaaatggaaagccgagctggaagccggagatccttatttcaacccgaatttttcgttagataaatctgacttttctttacgggtctgaaaaaatagtgtatactgacttaaagaagatgcactgcagccaagggaagactgacaggcagggacgtaagagacggcaggcatcagaaaagatggaggtagcaaaagcgatgaattacatggatcagtacaaattctggctggaggattcctactttgatgaaggaaccaaggaagagctccgtaaaattgcagataatcaggcggagattgaagatcgtttttacaaggatctggcgtttggtaccggcggtctgcgcggtgtgatcggagccggaaccaaccggatgaatatttatactgtcagaaaagcaacacagggtctggcaaactacattttaaagcagggcggcgctgacaagggcgttgcaattgcatatgacagccgttattattctcccgaatttgcagatgaggctgcactgtgcatggctgcaaacggcattaaggcgtatgtattcgatgaactccgtccgacacctgagctgtcctttgcactgcgtaccttaggctgtatttccggtatcgttgtaacggcgagccacaatcctccggaatacaacggctacaaggtttactgggaggacggtgcacaggtaactgcccccaaggatcatgagatcatcgacgaggtagagcatgtaaccgatttccatacggtaaaaaccatgtccaaggacgatgccatcgaagctggtctgtatcagtacatcggcgaagaaatcgacgttgcctacatggaagagttaaagaaacagatcattcatcccgaaatcatcaaagaagtagcggatgaactgaaaatcgtgtacacaccgttccatggtaccggcaacaagcccgtcagaagaattctggctgagctgggcttcaagcacgtttatgttgttcccgaacaggaacgtcccgatcctgcatttacgacgctggattacccgaaccctgaagatcccaaggcatttaccctggcattaaagcttgcaaagaaggtggacgcagacatcgttctggctactgacccggatgcagaccgtctcggcatttatgcaaaggattccaagaccggcgagtacatgcccttcaccggcaacatgtccggcatgctgattgcagagtacatcctgcgcgagcgcaccgctaccaaccggatgccggttgatcctgttatggtatccaccatcgttacgaccaatatggcagcagcaattgcagcagattataacgtagaattaagagaagtcctgaccggctttaagtatatcggcgagcagatcaaatggatggagcaggctgggaaaggccactatgtattcggtctggaagagtcctacggctgtctggcaggcacccatgcaagagataaggatgcgattgttgcagtaatgtgtctgtgtgagaccgctgcatggtgcaagaagcacggcatgacctgctgggatcagatgcttgcactgtatgagaaatatggctactacaaagaaacccagtatgccatcaccctgaagggaatcgacggcgcagcccagatctccgcaatgatggataagcttcgcagcaatcctccgaagaatttcggcgacctgcaggttgtagagatgcgcgactacgataaggatcaggttaaagatatggcaaccggcgcggttcgcccgaccggacttcccaagtccaacgttctgtactttgaactgaccaacaattcctggtgctgtgcacgtccgtccggaaccgagcccaagatcaaattctatatgggcgtaaagggaaccagtctggaagatgcacaggcaaaggttgacaagctgaccgctgacctgaaggcaattctgtaaaagaaaaagccgcagcaccagcagcgtattttgcagcaaaaatgcagcatgcgctctggcgcaggggttatatcacgaatcaaaaggacacggcgcgtgcccggtgtcggagttttccggcgcttgggcacgcgcaggcgtctgtagcaggaaaaggagttcgacggatgtctgttttttccctatccaatctgaaaaaaacctggtattatctgcagaaaaacggaatcagaaatgccgtgtgggcggtgttggagcggattgggcaggaacaggaggtctatacctggcaggagccggacgaaaagacactttcgttccaacgggagcattctgcttccttgcgcatcagtatcgtcgttccggcataccggacgaaaaaagagcatctggaggcgatgcttaatagcgtgtcgaggcagtcgtatccgcactgggagctgattgtagcggatgcgggaggcacggcagagtctgtacaggcctgggcaaaaaagaacggaatctgtctgcgggaagcggcagatgcatcaaatcttgcagaatggaaggatcagagcatcgtgctctgcaccctttccgaaaacaaaggaatttccgccaatacgaacgcaggaattgaacttgcggcgggagacgcggtcggtctgctggatcacgacgatctgctgactgcgaatgcgctctgggagatggcggattgtctggaaaaagaaaaaaagcgcggaaaacaaaagcttgtgctgttttccgatgaagataaatgcgacggagcggcgagccgcttctatgagccgaatttcaagccggattttgacggggaattgcttttgaccaacaattatatctgtcattttacggtgatcgaaacggcatttttgaaagaactaaagctgcgcagcggatttgacggggcgcaggattacgatctgatgctgcgggcgtatgcggcaggcggacagtttgtgcatgtgccgaaggtgctgtaccactggcgttgccatgaagcgtctacggcgtcgaacccgcagagcaagcgctatgcttacgaggcggggcagcgtgcgctggaagattattgtcttcgaaaaggctggaaagcgacagtgagcgggctgaaacatcttggcttttatcgggaagactatgaagacagtgtattttgccagcgccaggaaatcgggatttgggcaaagcctctgccgggcggcagggatgtttttggcatccggcatccgaaaggcttcctggtgagcggactgtatgaaaacgacggttcgatgcggtatgcagggcttcggaaaggatattccggaccgatgcaccgtgcagcgctgcagcagagcgcaccggcagcagacctgcgcagcatggaggtttgcagcgcattaaaggagcgttacgcgcagacgatagcggaattaaaagaagcctgccaggggcttccgacggcagcgcaggaaacaaagatccttcaaaagagtatggaattttgtaaagaagcgacagcgtcagggtatgggattttatgggatccgcaggcgtaagccgcagatagagcgcaccgcggcaggcggctttgttgctgcgtaggcaggcgatccacgctctgaggcactccctcgcgcggacggcaaacacaggaaacatgaggagcaaaatcggtggatgaaaacgaccgtggtaataccgaactataacggaaaacattttctgcaggactgtctggacagcctgcttcagagcacagtggaaatcgccgtgatcgttgtggataacgggtcgacggacggaagtgtttcgtggatacaggagcattttccgcaggtgaagctgatctgtttttcggaaaataagggtttttgtacggcagtcaataccggaattgaagctgctgctacaccgtatgtttttcttttaaataacgatacaaaaaccgatcgcttctgtctggaacgtctggaaagggcaatggaagcggatgagaagattttttcagtcggggcgaagatgctttctatgaaggaaccggagcttgtcgatacggcgggggatctgtactcggcatttggctgggcgtatgcgattggcaaaggaagaccttcttccaattacacagcgtcaaagcgcgttttttccaattgtgcaggggcggcgctctaccgcaaggcacatttggagcagatcggagggtttgacgagcttcattttgcatacctggaagatgtggatatcggataccgggcgcagattttcgggctgaaaaatgtcacagagccggctgcagtcgtctatcacgcggggagcggttctaccggttcgcggtacaatgcgtttaaggtgacgcattcttcgagaaacaatatttatctgatctataaaaatatgccgctgctgcagctgatcctgaatctgccttttttgctggcgggatttttgatgaaacagctgttttttatgaaaaaaggatttggagcgacttacgcaaaaggaatccgggcgggaatctgtctgtctgcttcgaaagagggacgtgcgcataaggtcccctttgcaggacgaaatttgctgcattattgcagtttgcagttacagctgtgggtcaacctgtttcggcgtgtgtaagcggtgactgtgggcgtacacaagtgttacggtttgtctgcgcgattcgtaaaaatccttgtgctttgctggaaggtattgtatactacattttgaatatggggacgagccgtaatgataaaggataatcaacgttatttgaaccggcttcatgttgttgtagatgccgtggttacagcagcttcctatctgttggcctggtggctgatgttcgggagccgctttgcagataaagaaataggtgtactggacatgggcatatatttttccgccctttattttgttgtgcccggttatctgatcctttattactggaacaaattgtatacgccgaagcgtgtacaacgcccggaaaatgaaatactgaatattatcagggcgaatctgatcggaattgtcctgtttcttgcagggttataccttgccaactccatcgaccgcgagctgcagcatttttcccgcggcatgctggcattatttgctatcatcaatacgatttcgggaattctggtgcgtgcgctgatccgtagaatcctgcatctgatgcgcaaacgcggttataatttgaaacacattttgctggtggggtattctcgtgcggcggaagcctatatcgaccggattatcgccaatccccagtggggctatatggtgcggggcattctggacgataatgtgccgagaggcgcggtttacaagggagtcaaggtgcttggttccatcgataacctgccctttatcctgccggaaaacaaactggatgagatcgctgtgacccttgcgctgcaggactacgaccgtctggaagagattgtcaatctctgtgaaaaatccggcgtgcatacgaagtttattccggactataacagcctgattccgggcaagccttatacggaggatcttggtggactgccggtcatcaacatccgttatgtcccgctgagcaacacattaaatgcggttgcaaagcgcgctgtggatattttcggttcgctttgcggattgatagtgacgtcgccgcttcttttgatcgtagcaattttgatccgtgcgacgagtaagggaccgattattttcagtcaggaaagaatcggacagcacaatcatgcgtttaaaatgtacaaattccgtacaatgtatgttcaggacaccacggaagaaaagaagggctggacgacgaaaaacgatccccgcgtcacaaaggtggggcggattctgcgcaagaccagcattgatgagctgccgcagctgtttaatatcctgatcggggatatgagtctggtaggtcccagaccggagcgcccgcagtatgttgagaagtttaaggaagagattccgcgctatatgatcaagcaccaggttcgtccggggctgaccggctgggcgcagatcaacggctaccggggagatacgtcgattcgcaaacgaattgagtatgacatttattatattgaaaactggagcatgagctttgatttcaaaatcatgtttttaactatttttagaggatttatcaacgaaaacgcgtattgatttgaatgcgcgaaaaaaacacaaggagaggaaaacatgtcaacaggtacaaatagctctaagagagcaccgcagagaagtggcagttccagcagcagaaaaaagatgtctgcaaagaagcgtaaggcaaaacagagaagaagaatcatcttctttgcagtggaaatcgtagcgctgatcgttttactgattgcgattgtcggtgtcaatatggtaacgaagattgacaagatcaagatcaatgaagaagatattgtggtaaacccgcaggtagaaaataataaggaaatgaaaggctaccgtaatatcgcactgtttggtgtggattccagaaagggcaagctgggcaagggctcccgttccgacacagtcatgatcgcatctatcaatcaggacaccggagacgtcaaactggtttccgtttaccgcgatacctacttaaatcttggaacggacagctacaataaagcgaatgcggcatatgcgcagggcggtccggagcaggcgatcaacatgctgaatatgaactttgacctggatatcacagaatatgtgacagtgggctttgatgcgctgatcgagaccattgacgagctgggcggcatagacattgacgtgcacgataacgaaatcgaccatctgaacaactatcagcgaagcatgttcgtagaaaatgaaaatgatgcgctgaacgagaacatcgtaaaggttacgcattccggtatgcagacgctgaacggtctgcaggcaaccgcatattgccgtatccgctatgtcggcgatgacttcggccgtgcagagcgtcagcggaaagtgctgatggcatgtatggataaggcaaagaccatgagtccgactactctggtatcgatcctgaacaaggtgatggaaaatgtatacaccaacctggatgtgacggaaatggcttccatcctgtccgacgttgcaaactatcagatcgtagcacaggacggtgtgccatttgaagatagtcgtacaaccggcacaattggcaagaagggttcctgtgttatcccgctggatctggaaacaaacgttgtcaagctccatgagctgctgttcgacgtaaccgagtacgaaccttccgatcaggtaaaacagtacagccagaaggtacaggcagacaccagccagtatatgaaaaagtaaaatatggattctgtaaaagtagatgttattattccgacatttcacccgaaggaacgttttctggcgctggtggagcagctggagaagcaggtgcttgcggtgaaccggattgtaattgtaaataccgaaaaaaaagcgtttgaagcgctgatggattgcgacacatttttaaaagagcatccaaaagcgatgctgttccatatctctcaggatgagttcgatcatggaaaaacgcggaacctcgctgtttccaattcggatgcggaggtgtttgtctgcatgacgcaggatgcacttccggcggatgcgtatctgacgcaggagctgtgcaaggcattgttttccgatgaaaaaatcgcagccgcctatgcaagacaacttccggaagaaaattgcagccgaatggaacgctatacgaggcagttcaattacccggagcagccgtcggtcaaaacaaaggcggatcttttgaggctcggaatcaagacgtatttttgctcgaacgtctgcgccgcctataagcgcgatatttttgagcagctcggtggattcgtgaatcatacgatttttaacgaggatatgatttatgctgccggagtgattcaggcgggctatgcgatcgcctatgcagcggatgcgaaggtgattcattcccacaattattccggctggcagcagtttacaagaaactttgacctcggtgtatcccatgtgcagtacccggctgtgtttgacggtgtgccgccggagggcgagggcatgaagctggtcaaaaagaccgccgtttatcttgcaaaaaccgcaccgtggcttctgccgaagctgatctggcagagcggcatgaaatggctgggctaccgtttcggtaaaaaataccagaatcttccgcctgggctggttcgcttctgcagtttgcagaaaggctactggaagcaggagaaagaataagacataaaaagtcgtttccgaaaaactccggaagcggcttttttcacagaatggacacaactattcggtatactgtctgcagagcaagcagacgcaccggatacggaagcgaatgagaaaagaggtcacaacatgggttacggatacgacccggaagaaacaaccggacaggagcatttggacggcacagcgccggagagcggcgggcaggaatacacggacagtgcacagaaaacggatgcgtcggatatgtcggcgtacagtggcgtgtccgatgacacatcggcatatagcagcggaagcacgggtgcggcggataacgcacagaacgcatccgacaacacgcaggacacattcaacagcgcatcggacgctgaccagggcgcgcagccctcgcgcagccgttacgaatatcaaaattattataacgacagataccggggcgatgattcaaaacagaaatatggctatcagccaggcgtacagcagacgcctatgcccaaaaaaagagattctgcgggcaaatggattgctgttagcgcacttgtcgtcatttttgtttgcgtctgcattggaatcggcttgatcggagtttattcgatccgatcggcaaatcagctggattccgcgtcggtcggcgttttggaggtagctccggatgcaggagatgatgcaaaaaatcaggaagatgacggaaaccatgcagcaacagacagtcccgaacgctctgaggcaggactgtccggagattcgtccctgacagaggatacaacaacgggagacggacaggttgctgcagcatcggaaattgcacagcagcagagcgcatctgcagttgtaacggatgtaacgcaggttgtagaagcggtaatgccggcgtgcgtttcgattacgaataattttacacagacggtacaggatttctggggacagacttattcccaagatgagacggcaagcggttccgggattatcattggagaaaacgagcaggagcttttgatcgttaccaacaatcatgtagtggacagcacagagcagctgtatgttcagtttatcgacggggaaaccgtagaagcgcaggtaaagggtaccgatgcttctgcagaccttgcagtcgttgcagtaaaactggataccattgcgaacagcacaaaacaggaaatctgcattgcaaggatgggagattcggacagcctgaaaatcggtgaaccggccattgcgatcggtaatgcactgggctatggacagtctgtgacgacaggcgttatcagtgcactgaaccgtaagatagagagcagcaattccgaagaaggaacttctctgattcagacggatgcagcgatcaaccccggtaactccggcggcgcactgctgaatatgcggggcgaggtgattggaattaactccaataagatcggcggctcgtcaatcgagggaatgggttacgcgattccgatttcgacggcaagaccgattattgaagatctgatggaacgccagacgcggacgaaatattccgaggaagagcgcggatatcttggaatttcctgcatcaatgtgacgagcgatttgtccgagaacttcagtatgccgcagggaatttttgtggcgcaggtttattccggaaccggtgcggaagctgccggattagtgcgcggcaacattgtggtggcgtttgacggcgtaaccgttcagaatcaggaagagctgacgaagcagatgcagtattataaagctggggagagcgttgaaattacgattatggtaaattcagcaaacggttatcagcagaaaaacatgacagtcacgctttcttcctatgaccagatcaatgcggcgagcaaggctgcacaggaaagcaaacagagataaagaacggaaccgggatggctgggcgagagctgcagtcatcccggttttgcgaatagcgcgtgtgaacagtagccatttctgtacaggagacagttgtttagagaaagtttacttgtctcaggaacgatcctgcattatacttttgatagcagaaagcggaagatgaggtaaccgactatggatgaaaaagaatttgaagatatttgttatatttgccgcagaccggaaagcaaggcgggaagaatgttccacctgccgaataacatctgtatctgcgacgactgtatgcacaagacgatggatgcggtaagtcagttcgattatcagcagatgatgaataatccgatgttcatgaacatgttgaataatccgttcaatccgtatggagatccgacaaagtcgaatggaacgtcaggacagaattctgcaggcggcggaaacgaaaaaagcgacgcagaaacaactgacgcagaaacaactgacgcacaggatggaagcaacgcatccgacaacactgccgctgacattctggaggcatccgatacggacgacgattccaagaatgactccgacgaatcctcgggcaacagaagaggcttcccgaacatcagcttcatcaatcttgcggatttcatgaacgacgggatgccgcnnnnnnnnnnnnnnnnnnnnnnnnnnnnnnnnnnnnnnnnnnnnnnnnnnnnnnnnnnnnnnnnnnnnnnnnnnnnnnnnnnnnnnnnnnnnnnnnnnnnttcccgaacatcagcttcatcaatcttgcggatttcatgaacgacgggatgccgcagaaacagaagatcaagaaaaaaggaaccggcacaaagccgttgatcgatttaaagtccattcccgcaccacataagattaaagagcagcttgatcaatatgtgatcggtcaggaatatgccaaaaaagtcatttccgtagcggtttacaaccattataagagggttgccaccggcacaatggatgagattgaaatcgaaaagtccaatatcctgatgatcggacctaccggcagtggtaagacctatctggtaaagacgctggcgaagcttctggacgttccgctggcgattgcggatgcaacctccctgacagaggcggggtatattggtgatgacatcgaaagcgttgtgagcaagcttctcgctgcagcggacaacgatgtggataaggcggagcagggcatcatctttatcgatgagatcgataaaatcgcacgcaagcacaacacgacttcccgggatgtctccggggaatcggtgcagcagggcatgctgaagctgttggagggagcagacgtggaggttccggtcggtgcgaacagcaaaaacgcgatggttccgctcacaacagtcaatacgagaaatattctctttatctgcggcggcgcgtttccggatctggaagagattatcaaacagcggctgcgcaaaaagacctcgatcggctttgatgcggagttaaaggatcgctgggataaggaaaaggatatcctttccatggtaaaagtggaagatctgcggacattcggcatgattccggagttcttgggccgtctccctgtgatctgcacgctggagggcttgaaccgggatatgctggtacggattttgaaagagccgaaaaacgcgattttgaaacagtatcagaagcttctggagttggacgaggtgaagctggagttcaccgacgatgcactggaagcgattgcagacaaggcgatggaaaaagataccggtgctcgtgcgcttcgttcgattattgaagaatttatgttggatatcatgtatgaaattccgaaggatgacaatatcggacgcgtgacgattaccggagattatatccggggaaccggtggaccgctgattgatatccgcagtaacggttattcgctggaagagcgggatcagatgaaacagatcgcagcggcggaaacgaaagaagcttgaactttgaactgcatgaagaaaatgttcgaaagctgagagttcaacggaatactacaggaacatatcagcaatactgcgcatatgctgatataaaatccgcagggcacagggggaaaaatctgtgtccaaaggagacagatgaactgtcgggaaaaaattctttctgaagattatatgagtattttgctggactatgtgccggaggaagcagatcaggaggacgaagccttctgctatcagcaggtggatggaactctgggaatttattatctggatcggtctgcggtgctgccgctttctccggtcaattacctgtatcgctaccttccacagctgttttgcctcggtgcgtttcctgcggcgggaagtcggacgtttcggacagaaccgttggagggctccgggattctggcacagcagcggcccccgctggagttgacgggtcgcagggtagtgatggcgtttatcgataccgggatttcttatgaaaacccggtatttcgctattctgatggcagcagcaggattctggcgatttgggatcagacggatcagagcggacagtcgccggagggttttttatatggaacggaatacgtccgggaacagatcgaccgggcgttggagctggaagaaccgcacagcctggtgccggaaaaagatgaaattggacatggaaccgcagtggcgagcgtcgcagcgggaagccgtctggaagagggcagcctgtttaccggtgcagcgccggattgcgagattgtagcagtcaagcttcgcccggcaaaacaatatctcagggattattatcggatcgcggacaaagaaccggcatacagcacagacgatattctgctcgctgtgaaatatgtgcaacagtttgtgatcccgctgtaccgtccgattgtgatctgcctggggctggggacgtcctttggaagccacagcggcgtttcgttgttttcggagtatttgcagaggatcgcgcgcagcgtttcacaggcggtggtgatcgggggtggaaatgaaggaaacacggcgggccattttcgggggaggctgaccgaaaatcagcagcaggtggagcttcgggtcggagaaggcgtcacaggatttacggcggagctatggggaagtaagccgtcagtgttccggcttgcggttcgatcacccggcggggagcagctgccggaggtggaatttggtctgggcagcacagtggaatacacgtttgtctatgaaaagacgcggatacagattacagatactgcaaacgaacgcaataccggagatcagttgatgctgatccgctttacagcaccgtctcctggcgtctggacatttttaatccgtggagcacgggtatttccggaaagtatttttgatatttggcttgcaccgcagcagtttcgaagcggcgagctgttttttctggttccagacccggatgtgacgctcacagttccctcctatacgacagatgcggtgacggtcactttttataatagtgaaaacggaagcttttattaccgcagcggcaggggctttggcagaaccggggagatcaagccggatctggcggcgccgggcgtggagatcagcacggtaaacggtccctacagcggcagctctatggcggctgcacttacggcaggagcctgtgcgcagctgatgcagtggtgcgttgcggagaacaattacccgaggatttccggaaggggaatccagacgtttctaagccgcggtgcgcgggaacagacacaggaagaatacccgagcagaagatggggctacggacaactggacatgaggaggacatttgatgaaattgcaggaaattatccggaataactacaaatttgcaggaatcgctgcagcatccttcctgattgacgagggaatgaaaaattacgtagaagaatacgacgtgctggatacgccgaaggaaattttagatggaaaggcggttctgcggcgctatcacaacaagggcgcatttttaaatttcggagaacaaaaacgaaagctggtgacattgctgtccgttcttctgacggcggcagtgctggtggtgtttgtgctgacgcttggaatgcgcgggaaaaagcttttgaaggccggattatcgcttttactgggcggcgctttttctaatacctacgaccgcgtgatgcgggaatatgttgtggattatgtcagcctgaaaacaggaatcgcagcgatcgatcgcgtggtattcaatctggcggatctttgcatcctgatcggtacgatggcggtggtgctgggtacgtgaggaagctgaaaaattgttactgttcacacgcgccattcgcaaaagcgcatcttcgatgctttccgctgctttgcagctctttttgctcataaaatggcgctcccttcgtacccttctgcgttccgattttcgtgcaagcacggaatcggaacgcagaagggtacgagtgaactgtaaaaaaaaatcgcaatttatagttgacaaaacaggagagactgattattatacacataaacatagcaaacaaataggtttaaagaaacggcgcatatatgcacagtttcggcagcatcggatatttacagaaccaaacgatttgtgatatgataaaggctgatgtgtgatggttcggaaatccgaacctaatcctgaaaaaccaggcatctgagaggatgctgggaaggcagagtgataaaagtggaaccaatgatacggattgcaggcgtcagtaagacgttttctgtcaaagacaataaggtggaagcactgaaaaatgtcagtcttgacattgcaaagggtgatatttacggcatcatcggtatgtccggcgcaggcaaaagcacgctggtacgatgcttaaacttcctggaacggcccacagagggtactgtttatgtggagggacaggatctttctaccctggatgcaaaacagctgcgacagctgcgcaagcatgttgcaatgatctttcagaattttaatctgctgatgcagcggacggttctggataatgtatgcttcccgatggaaattgcgggcgtggataaaaagacagcccgggaaaaggcaagggaatttctaaaggtagtagagctttccgacaaagagaaagcatatccggcacagctgtccggcggacagaagcagcgagtagcgatcgcaagggcgctggcaatgaacccgacgatcctgctgtgtgatgaagcgaccagtgccctggatcctactacgacaaagtcaattctggctttgttaaaggatattaacgaaaaatacggcattacgatcgtgatcataacacactccatggaagttgttcaggaaatctgtacccatgtggcaatcattgatgcaggagagctggcagaaaatggtacagtggcagatgtttttgcaagccccaagtccagagctgcaaagaagctggtatttcagggggatcagaaggtggcgattatgaagagccgccgctgcatccgcatcgtatttacgaagaactcttctttcgaacctgtgattgcgaacatggttctggaatgcagggcgagcgtcaatattctgatggcggatacccaggatatcggcggaattgcaaccggtcagatgattctgcagcttccggaggaaaatcagactgcagacaagatgattgcgtatctgagagaaaaaaatcttacagtagaggagttgaaggattatgttgagtagcaaggaaattagcatgctgatcgaggctaccggcacatccgtctatatgacgctggcctctaccctgatggcatatgtgatcggtctcccgatcggaattttactggttgtatgcgcaccgggcggcttgaagcctaaggctgtgctgtataagatcctggattttatcgtaaatattacgagatccattccgttcctgattctgatgctgcttgcaacgccgctggcacgtctggtgacaggcaaatcctatggtgcaaatgcaacgatcatttcactgacactggcagcagcaccgtttattgcccgtctggtggagtcttctcttcttgaggtggacaagggtgtgattgaggcggctcagagtatgggtgcgagcatctggcagattgtttttaaagtgctgatcggagaggcgagagtttctctgatcgtcggttctacgattgcactggggactgtgcttggctatactgcaatgtccggtgccatcggcggcggcggcttaggggatgtggcgatccgttacggctattccagatgggataccaaaatccttctggcgacggttgtactgcttgttattctgatgcagatcattcagattgtcggcagccgtttatccaagaaactggacagaagactgacccattgaggggcaggatattctgtttagtcatagagtggttccggataccagaaaatccggccgagagaggagaatattatgaaaagaaaagtactggcactggcatgcacactggcactgagcgcaggtctgctggcaggctgcggcagcagcacagatactgctgcagaagcagagagcactgtagcagctgttgaaagcaccgaagctgtagaagcagaatctaccgaggcagaaagcaccgagactgcagcagaagtggaatccaaaggcaccattacggtagcagcaactcctgttcctcatgcagaaatcctggaggcagcaaaagatctgatggctgcagaaggctgggatctggaaatcgtagaatttaccgattacgtacagcctaacgaagtagtggagagcggcgatgtagatgcaaactacttccagcacgtgaattacttaaatagctataatgaagaaaaaggaacgcaccttgcgatcgcaggcaagatccattacgagcctcttggtctgtatcccggaaagcagagcgacctcgctgcaatcacagacggcgctgaaatcgcagttcccaacgatacaacaaactgtgcaagagcactgctgttactggaggcagagggtctgatcaagctggatcccgaagctggtatcaccgcaacagagaatgacatcgttgagaatcctcacaacatcaagatcgttcctcttgcagcggagcaggtagcccgtactctggaagatgttgacttcggtgttatcaacggcaactacgctatggaggctggcctgaccagtgcagatgcagttgctctggagtctgctgattccgaagcaatccagcagtatgtaaacgtggttgcagttaaggaaggcaacgagaacaacgaaggtgtacaggcactggtaaagattctgaaatctgatgagatcaaagacttcatcaacgagaattataagggcagcgttgttccttacgacggagaataatttccgcgaaggacagctttgaacctgtaaaagcgatgaacgaaatgaaataatggaacattttcggtctgctgtgaaaacagtgccgatagaaaactgccatctgacgggaaactgccgggtggcagtttttttatcgtataggaaacttcgt

SEQ ID NO: 214 - DNA, 22891 bp, unidentified
  source 1..22891: mol_type = unassigned DNA
tgcctcattttcaggcagcagtgccttgggctctaccagtaccggtgcatatacggtgttgaatttgtgtacgatctctctggtctgttcgatcatgggcagctggtcaccacctacgggaacggtggtcgccttgaaagcggtaatatcggaagcctggctgatgggataggtaaaaaatcccacagggatgctggcttcgaagttacgcatctgaatctcactctttacggtcgggtttctctgtaatctggctacggttaccaaatccatgtaatagaaggtcagctcgcacagttcggagatctgagactgaatgaagatcgttgccttgctgggatccagtccgcaggacatgtagtccagcgccacttcaataatattctggcgcaccttctcgggattctcgatattatccgtcagcgcctgtgcgtctgcgatcatgataaaagtcttcttatattcgccggaattctgcagctctacacgtcttctcagggagcctacataatgtcccacatgtaatcttccggtgggtctgtcacctgtcaaaataattttgtccatttcatcctctcaatctgccgtccacacggctatacatcattgtttctatcataccatctttttgcatagaagcaaatgatttttctacagaattaacgctttgtgtgcaagccccctcgcattcattctgctgttctatggctggactattgcaagcagcttatccagaattttatgtgccacctgttccttgctcatcagttccagactctcctcggaattctttgtgatcagtgtcacaatattggtgtccgtgccaaagcccgctcctgcgctcttcaaactgttggcacagatcatgtcacagtgcttgctctccagcttcttccgggaattctcctgcacattttccgtctccatggaaaatccacacaaaatctgtcccggtctcttgttttccccaagggccttcaaaatatccttcgtccgcaccagagggatcgacatgtctccgtcttttttcttaatcttattgtctgctgtcactgccggggtgtagtctgccacggctgctgccttgatgacaaaatcatagtcctgcgctctggacacgattgcatcgtacatctctgctgccgtctgtaccggcaccacatttacaaacaacggcggctccacatccgtatgggctgccaccaccgtcacttctgcgccgcggtgcattgcagctctcgccagggcataacccatttttccactggagtaattcgtgataaaacgcaccgggtcaatgggttctctggtggcacctgcggagatcagcacctttttgcccgccagatccttctcgcaggcgatctccttcaccacggcttcgaacagtacggactcctccggcattctgccgtcaccgatatcgccgttggccagcattcccgtggccggagtgatgatctcatagccgaaatgctttaatttttcgatattatcctgcacgatggggttgtgatacatattatgattcatggcaggggacacaatcttcttgcagggacatgccatgaccgtagtggtcaacatatcatctgcgatgccgtttgcaatcttgccgatcacattggcagaagccggtgccaccagaaccacatccgcccgctttgccagtgccacatgttccacactgtactggaaattgcggtcaaaggtgtccaccagacatttatgtcccgtcagactttcaaaagtaatggggttgatgaactgcgtggcattctgtgtcatcagcacttccacatcacagtgctgttttaacagcatccgcgctacattggccattttatatgcagcaatacttcccgagattgccagaactacggtctttcccttcagcatagtcgtctccttttgcctgatttatcaaaaatacttcaaaactgtactcctaaaataccataagtgcatattttatgcaaatatcacttttctttttgtccgggatatgatataaacagtaggagtgtcccgaatcaccgggacaacttgtattgtatctcccagagggagaatggtaacaaggaggaaaatttcatatgaacaaacaaagtaagacaatgcgactcacgttgatgggattgtttgctgcggtacttttgctgatggcttataccccgctcgggtacctgaacatcggccccctggcaatcaccttcaatgtcatccccgttgcactggctgcaatcactcttggccctgtaggcggagccgccatgggagcagtattcggattgaccagctttttgcaatgcatcggcgtgggaggcaccagcgccatgggagcaatgctttttggcatcaaccctgtgttggccttcatccagcgtttcatccccagacttctggacggatttctgctgggatatgtcttccgttacagccgcaaagccgtaggagacagaatcgcctgcatgatcaccggattttgcagcgcatttttcaacaccgcatttttcatgtcccttttagtactgctgttcggcaatacttcctatgtgcagggactgatgggtggtaaaaacgcgattttattcatctgctcttttgtaggtgtgaatgcggtcttcgagatgtgtgcatccacgttcctgaccggagcggtagggctggcactgatcaaggcaaaagtcattcctgtatatcagaaagcagggtctgcagcataacaggagtatacccgtggtactgacaatcgacatcggaaatactacgatcggcatcgggggatttcagggaaataagctgctctttattgagaagatatcgtcccgtcgtcccctgtctgatgctggatatattgaaaaactgaatatgatcttgaacaaacacggcctgtctgccgaggcctttgagggatctatgatttcctcggttgtgccttcggtgacagccgttttttcctctgctctggaaacttttctgggacggaaacctctgattctttcccataagctggatctgggctacgagatctgtacggaattcccggaaaaggtgggctgtgaccgactggcagatattgcaggagccatttcccgctattccctgcctttcgtcaccatcgacctgggcaccgccacgacttttaacgtgttggatgagaaccgtcgctttttaggtggcctgatccttcccggtgttggaaccgcccacagggcacttttaggcaagaccgcccagctcccgaaaggggacattcatatgcccgcccacaccatcggtgcgaatacgcaggaatgcatcaccgggggaatgctcttgggcaacgcctgtgccatcgacggactgatccgccgtatccagacagagttagggcaaaaagcaacggtcgttgccaccggagggtacgcaacgaccgtcattccacattgtgaaacgaagatccatatcgatcagaatcttcttatgaaaggtctgagatccatctacgagaataatacctctactggatcaccagattagagtagcccatcaggctctcatccacagcatgtgcggcttctctgccttcacggatcgcccacaccaccagggactgtcctctgtgcatatcaccggtgacgaatacattttccacactggtctggtatttgccgggggcagtttttacgttggtgcgttcatttaattccaccccgaaagcatcggtaatatatttctgacttcccaaaaatcctgctgcgatcagtacgatctccgcatccaggatctgctcacttccggcgatctcctgcatcttcatgcgtccggtagccggatccttttcccaggacagcttcacgatcttcacggctttcaggttgccgttcttatccttgataaattccttgaccgtagattcatagattctcggatcatgtccgtagactgcaatggcttcttcctgaccgtaatcggtcttgcagaccttcggccattcgggccagggattgttctctgctctcttgtccggagccttgggcatcatctcgatctgggtcacagacttggcaccgtgacggatggaagttcccacacagtcattaccggtatcaccaccgccgatgatgaccacgttcttacccttggtctccacatattttttatcttcaaagttcgaatccagcaggctcttggtattggctttcagaaaatccaccgcaaaatagattcctctggcatctctgccgggagcattgatgtctctaggattggaagcaccacaggccagtacgacacggtcaaaatcatgtaacagcttggatgccttgatgtccttaccgatatccgtaccggtgacaaaggtgacgccctctttcttcatgatggctatcttacggtcaatgatctgtttctccagcttcatgttggggatgccgtacattaacagtcctcctacacggtcggagcgctcaaatactgtgacctgatgtcctctctggttcagcagatccgccgctgccagtccggaaggaccgctgccgatgactgctacctttttgccggtacgcaccacagggggcttggctgccgcataaccctcgctgtaggcgttttcaataattgcatattcgttctccttggtggagaccggatccccgttcaacccgcaggtacatgccgcttcacacaaggcagggcatactctggaagtgaactcggggaaattgttggtcttcttcaggcggttgtaagcctgctgccagttgccggtatataccaggtcgttccactccggcaccagattgtgcagggggcatccgctggccataccgcagatcatcatgcccgactgacagaacggcacaccgcattccatacatctggcaccctgtaaacgctgcttttccttcggcagatgctcatggaattcattaaaatgctgtattctcttcttcggatcctcagccacgctgacttcccttttatattccataaatcccgttggttttcccatgactctctccattctgcagacgcttcggcgtcggaagaatcgcgaactaaatttcatatttagttctgcgataaactaatttgtggcgcccgcggcacaaattagtcgtgtgaaaagcaatctatcaagattacttttcacactggcctcctactttctggtgttggcatagaatgcttcgatctgtgcctgctctgcgctcagtcctttttcctccatctggacgatggtctttaagactctctcataatcatgagggatgatcttcttgaacttgggcagatactctccaaagttgtccagcacttccttacccttggcggaattggtcagtgccacatgctcctggatcatggatttcaactccagcacatcatatttggatgtgatctcgctggaggataccatttccttattcagacgcttgtacagatcgttgccttcatccagtacataagcgataccgccgctcataccggctgcaaagttttttccggtgggtcctaagactaccacacgtccgccggtcatgtattcacaaccatgatcacctacaccttcgacaactgcgatggcacctgagttacgtacgcagaaacgttcgcctgccacaccgttaatgaatgctttaccggaggttgcaccgtacagtgccacattaccgatgatgatattttcctcagccttgaacttgctgccctgaggaggatataccaccagcttaccgccggataagcccttaccgaagtagtcattgctgtcgcctaccagttccagggtcagacccttgggaatgaaggctccgaaggactgtccgccggcacccttgcacagtacatggtaggtatcctcttccacatcatcgcccaattttctggtgatctcacttccgaggatcgtaccgaaagcacgatcggtgttgctgacgtctacttcgatgctgcgcttctgtcctgcgtcgatggcttttcctaactgctttaacagcaccttctcatccagtgtcttctctaactggaagtcatagacctgcctgggatcaaaggtcaccttctgcttgctgccctcgtaaggattgcttaagatctgggtcagatccacttcctcctgacgatcggtcagatgctcttttctcttcagcagatcagttctgcccaccagttcatctacggtacgcacgcccagtgctgccatgtattcccgcagctcctgtgcgataaatttcataaagttttccacatattccggcttaccgcggaagtttttccgcagctccgggttctgggtagccacgcctaccgggcaggtatccagattacatactctcatcatgacacagcccatggtcacaaggggtgcggtggcaaaaccgaactcctcggcacctaaaatggctgcgatggctacgtctctgccgctcatcagcttaccgtcggtctcgatgcggactttattacgcaggccgttcatgatcagggtctgatgggtctctgccagtcccagttcccagggaagtccggcattgtggatggagtttctcggtgccgcaccggtaccgccgtcatagccggataccaggatgacctgggctcccgccttggctacaccggctgcgaccgttcccacaccggcttcggataccagttttacagagattcttgcctgggtgttggcatttttcagatcatagatcagctgcgccagatcctcaatggaataaatgtcgtgatgagggggcggagagatcagggacacaccgggcgtggagtgtctggtcttggcgatccagggatatacctttcctccgggcagatgtccgccctcaccgggttttgctccctgtgccatcttgatctgaatctcctgtgcacttaccaggtaacggctggtaacaccaaaacgtccactggctacctgcttgatggcggaacaacggttcagtccgtccggtccgacggtcagacgatccaggtcctcaccgccttcaccggaattgctcttgccgtgcagatggttcatggcgatggccatggtctcatgggcttctttggaaatggaaccgtaggacatggcaccggtcttgaatctggtcacaatggactctaccggctctacttcctcaataggcacaccctttttcggataattgaagtccatcagtcctctgagattcttgatggaatcttcgtcgtttaccatggcagtgtactgtttgaacatctggtaatcaccgcgtctggtggattcctgtaacatatggatggtagcgggattgtacagatgctcgtcaccgccgctgcgcatcttgtgatgtccggggctgtttaaggtcagatcgtttttcagtcccagaggatcaaatgcctgagagtgcaggtcgtctacctgctgctcaatatcttttaaggtaatacctcccacacgacatacggtgttggagaaatacttactgatcacttccggtgcaataccgatagcctcgaagatctgggaaccctgataggactggatggtgctgatacccatcttggatgcgatcttgacgatgccgtggaggacagcattgttgtaatcatccactgctgcatagtaatccttatccagcatattgctctcgatcagttccttgatggtatcctgtgccagataagggttgatggcgcaggcaccgtaacctagcagcgtagcaaaatggtgtacctctctgggttcgccggattccaggatcagtgcgactctggttctcttcttggtgcgtaccagatactggttcagggcggatacggccagcagggaaggaatgggcacatggttctcatccacgcctctgtcggacaggatcaggatgttcacgccgtctctgtaagctctgtccacttccacgaacagtctgtcaatggcacgctctaagctggtgttcttgtaatatacgataggtacgacttctactttgaatccgtctaccttcatgttcttgatcttcaacagatccgtgttggtcaggatcgggttgttgaccttcagaacattacagttcttcggggtctcctccagaatgttgccctcggtaccgatgtatacggtggtggaagtcacgatctcctcacggatcgcatcgatgggcgggttggttacctgtgcaaacagctgcttgaaataatgaaacagcgggtggttcgtcttgcttaagacgggaagcggcgtatccacacccatggcggcaatcgcttcactgccgttctttgccataggcagaatgctctgtttcatctcatcgtaggtataaccgaaagctttctgcatccgctgacgctcttcgtaggtgtactcagggacacgctggttcgggatgtgaatactcttcaattctgtcaggttgttgtccagccattcaccgtagggctgtctggaagcatatttttccttgatctcctcatcgtcaatgactctgccctgtacggtatcgaccaagagcatcttgccgggacgaagtctttcctttaacttgatcttcgtgggatcaacaggaaggacacctacctcggaagacaggatcagggtatcatcgtcagtgatcagataacgggaaggacgcaggccgtttctgtccagtaccgcacccatgatatctccgtcggagaacaggatggatgcggggccgtcccagggctccatcatggtagcgtaatactggtagaaatctctcttggtctgggacatggccttgttgttcgcccagggctcggggatagcgatcatgaccgcaagaggcagttccatgccgctcattaccaggaattccagcgtgttgtccagcatagcggagtcggaaccggtcttgctgatagcaggcagtactttgtgcagctggcctttcagatgctcggattccatgttctcctccctggccagcatcttgtcggcattgccgcggatagtgttaatctcaccgttgtgtaccatcagacggttcggatgggcacgttcccagctgggattggtattggtggagaaacgggagtgtaccatggcaatggcggattcgtaatcttcactctgcaaatctgcgaagaaggtacgcagctggcctaccaggaacattcctttatatacgatcgttctgctggaaagagaaactacataggtatcatcggaagactgctcgaagacacgtcttgcaatataaagtcttcggtcaaagggaagtcctttttccacatcggcaggctttttcacgaatccctgcatgatatagggcatgcactctacggccttatgtcccagcacattggggaaggtaggcacttcacgccagccgaggaattccattccttctttttccacaatgatctcgaacatcttcttggcttgattgcggcgcagctcttcctgcgggaagaagaacatgccgacaccgtattctctctctccgccgatgtccatgcccagagccctggtcactctggcaaaaaatttgtggggaatctgggtcagaataccgacaccgtcaccggtcttgccttccgcatccttaccggctctgtgctccagattctctacgatcttcagcgcattctctacggtcgcgcggctcttctctccgtgaatattgacacaggctccgataccgcagttatcatgctcaaattcttcccgatataacggtgccttgggcagctcctgttttacatcaaacatatagttctcctttccggttttctatttctctcatcttaatctgtctgttcctattcagaacctcattcgcaagactgtgctttcagcactttcctgcaactaaaaaaggtcgcaatgagactctttcgagcgcctcattgcgaccttttctgtactatacacctatttttctcatttgtaaatatagatttttccttgaattgtcagataatttgtcaattcagttgttcacacggctgttgtctgttaattgtgttaattttcttttttaagccatgcttttagcacaactctttggggatttccctatttttcctgtctccgaccatacactttgcttgtcagtccctgatagattgcagagaaatgtctgctttctgccattgcggtccggagaggtgccagggtcagtgccatcacagcgcggtagcggaacagttctacgggtttcatgtattttgccgtgatctccttatgctctgcggcactgcgtttcaggttctcctttgtctcggagtagccgccgccttcgtaggaagatacggtaagccccagatactgcatgggagccttcgcccggtaatagcaccacagaaaatgttcataatctgcgcggatcttgtattttggttcgtagggcttctgtcggcacaggtctgcggcatagaagcaggactgatggcagggaatgttgcggtaacagacaaagccggtgattcggggcggggatgatatcttcgtgtccgttttcgcgctgtaggtatctccgtagtagatgccttgcagtttcatagggtgctgttccatgaattgtgcggtgtgtgccagaacttccttgtcatagaagaggtcaccgcagtttaagaacagaatgtaatctccggtcacatgagagaccgcctggttcatagcctcgtagatgctgtgatccggttcctggtagagatggatccgcccgtcagtgcgcatggactctatggatccgtcacggctgccaccgtccttgacgatgacttcgaagtctggacaggtctgggccaggatactgtcaagggtctgattcagtttggtgccggggttcaggcatactacgataatgctgaatttcatatgttgctccttttaagatgtaatatctccgcagtcgagaacagggcaaggaacgcggcacgttcgcactctgtcgcagagcgtagcggcacataagtgaccaaagtacggtcactaagtgccgacgtctgcttacggcctgcttatccttaccctgttttcggctgctgggttatgaagtccagttcaatacagtttatgaatgcggtcagaactggtaactaatgtgttttgttatctcattaaaatatatttttctgtttgtgcaaagtgatcaaggatacaactgccactgccaggaaaatcacgcatacaggccagctgacgaagccggtgacggcgatggcggtataggagaggcagtaggcgaggacattggatgccacatggacaaagactgccattttgaactctccaaagtattcgtaagcatatgccatcaggcagccgatgaggaagccgtatacgccctggacgtaattcatgtgataaacgccgaaaatcagggcagacagggctatggcgagtttgatatccatgaatctgcggagatatccgtagataactccgcggaacagaagctcctctgctatgggggagatgaagccgaatacaaggattcctacgataaagtgtgcggaatattgctgggctgcaacttcggtataggcttcggatttattggtcacaccaagaagttcaaacaggaggttgaaaccgataacggcaccgatggtggctgccaccagcagggcatattttgccttaccttcttttttcagatggcttaaatgcatatcctctttgttcttcgtgatcagaagctttgccgtggaccataccgccagtgctccgccgataaatccaagagccgctatgatactagagacatctccggaatagccgttataggcgccggtctcatccctcaggatcagaagatctaccagtccaccggtggctccggactgtgccagctgatacaacagtgccagcagcgcatactgcaccgcattgcgcaccaggataaacatcagaaacgaatacaccatggtccagattctctggtacatgggatttttctttttattgtcgggattgctgttcaccagttcctcgctgccgcgaagcagaaatttttccagttcttccacggattgtacgatgtagtccgcttttgcttcctttaactcttccttgcttccgtagccataagtcacgcccacgctctccacgcccaacgctctggctccttccacatcaaactttctgtcaccgatcatgtagacctgatccggctctatgggattctccttgaacagctgatgcagggtctcctgcaccacctgatccttcgtctctctggtgccgtccagctcactgcctacaaccacggcaaaatattttttcagatcaaaatgctccagtatgcgttctacatagatctggggtttgctggaagccagtgccagaaaatagcccttggattgcaggttcttcagcatctccggaataccggcataaacttcattttcaaaaatacccgtattctgaaaacgctctctgtattttgccacggcctcctccgcctgctcagcggtaaaaccgtagaattccataaagctgtcccgtaagggcggtccgataaaaggctccagcttgtccagatcaggttcctcaataccgaaagagtgcagcgcatactgcacgcaggtcgtaattccaattttgggatctgtcagtgtaccgtccagatcaaacagcagatattttttcattcttataattcctttttttgtatctgttccaagccctgtaactatcgcaaaatattcattgaataccgggatccgcaagaatattctgtaattgttatgaggctctgaatagttaccctttctttctatagcttgtggggtccgcaaggcattagaagctgcggatcttgtccccgtcatcctcagtgtttttcagtgccttgatctctacgtcatagcccacattggcattgacctgcacatggaccacatcacccacttttttgccaagcagtgccttgcccagaggagattcgttgctgatcagaccttccagtgagttcccgcgaacggtggtcacgatcttgtaatcctcctgggtgccgtcgtcgatgaattccacggtaacagtgttgttgatgcccacctcatccacggcggagttctcggagatcacctttgcggtcttgatcattctctccagataacgaatccggctctcgttctgattcttgtattttttcgctgcataatattcaaaattctcactgagatctccgtgggctctggcttccttcacgtcctccagtgccttgggacgcaccaccagcttacgatactcgatctcatcttccattttcttaatgtcagtgggggttaattcatcgtacataatttctccattcctatctgttcaattacttatatcatttattgacagtttttctcccggttcggcacatgctgattttctaccaacagccgtccttctttttcttcggcgaccgaccttcttttccttcagcagacgcctttcttttcttctgacggccgacctttttccttccggcagccaaccttcttttcttgcagaggatgaccggtcgcagtctctatgctgtcccggtgtgcccagcattctacaactgcattgcgtagattaccgccagagacagaatgatctgaataatggcaaaacggaatacggtctgtgtattggaccagtcccacaccttacgcacatgatcatgcaagggagtacgcacatttttcaaaatatgaatcttcaggaagcggagcagggaaaccttaagcagtcccaaacctccgtccagaatcagcaccagagccagcggaataaacaaaaacggacagccgctctttaaaatagcgatgctgatgaacagtcccatggcccgggaacccgcatctcccatcatcagcttactgggtgttgcattgtaccacagataacccagaatgcatacggcaaacagcaggatcaggaaagaataggtctcattgacgtccttcatacggtccacgatatagatggacatgatcgtaatgatcgacagggttccggaaagtccgtccacaccgtcggagcagttggtcacattcacagatgtccataccaggatcaccgtgagaatggcgaataccacaggcggcagggtgaactttacatgaaacagtgccagctccaccacgttggaattatatttcaggaacgtgatggctaccagtgccgccacgcacagatctaagaagccttttttgtactcaccccagggagtcttggaagcatcgtccagaaatcccgtcatcatgcataccacgatcagcagcagatagatcaccagctctgcgcttaaaggggaaaacagcagaacggatgccacaaatgccatgacaaaaataattccggcacctctgggtttccccgcagacaattttccgtcatgggcaaattctcttcctgcatccttgggcagatacggacttaatttcgccgttgccagtaccgtcgctccaaaagcaaaaaggattccaaaaaaagcaaggagagaactgcttccctccggcaagatcatctgtaacatactatccctcgtttccacatgagatactcacttttgtactctcatgctgtattttctgataaattccgtaactgttcacaggggcattcgagaaatgaacacctcagaacagtcacaaaatattttaacacaaatatcccggaatctcaaataatttccacaacagttcagttctgaacatatctgggcgcagaaatcatgcttgcatgattttgcggacaaatatgtgcatgagctaagcgccaatctatgagcaaaggtagtcacgaagtgacataaaagcgtgttaacgcgactcccgtgaacggcgcggctgaactgttacgtttgacagtttccccacggtggactactatattcttatgaacactttctgaaaaatagccataaaaggagaaatactctatgatgatccataagatcgaaccgcataaatattacccggaattccgaagccaggatcctaaaccttccgattatctgctgttatttgacggagaaaaggtctatctgccctcccatacagaaaacagtgatgtaacggatacttccgccggtgccggcatctcggagcatcctcaagtatatcttcctacttttgaagaagtccatggactcttgggaatccgtcagcctatggaacgtttttttctggactgtgaatatctcttttccattgatgaccgagcattcttccgcaagacgacggaggatgccggtgctctcatgctcccggaagaagacctctacgcttccggtgtgttccgtaattttgagccggaatatctggcatttgccggaatcactgccacccagatcaatcgttttcgtctggaccggaaattctgcggccgctgcggacatcccacaattcacagcaccacagagcgggcctgcatctgcccggagtgcggccagattgaatatcccaagatctctcccgctgtcattatcgccatcgtggataccgagcgggacaagatcctgctgacccgttacgccggcggttcctatcgtcactgggcactggtggccggcttcgtggaagtcggtgagaccttcaaaggtgctgcccgccgggaaatcatggaagaagtcggtttaaaggtcagcgatctggtctattacaaatcccagccctggtccttcagtgattccgccatgatcggcttcttcgcgaagctggagggggatccttctattactttgcaggaatcggagcttggcgaggctgcctggttctccagagaggatgtcccggatctgccctccactatcagtgtcggtcaagaaatgatcacattattcaagaatggcggggatccgttctgccagagataattgatacatttgaaagtttttcacttctattccatgatataccttgactttgtacccccgtggtttcatgccccgggggcttatttagtttcttttcctctctgcgccccgctctctcgatctccccggggcttaaccagcatgctccttatatctacgccccatgtacgcaaaaatctgccttcgacaataacattgtcatgaggcagactcctttctatacttattctcttcactgtttcttcacccagagcatcgtagctgtcatcgcttctcattatctcaataagcggcacttcttcgctaccttcactaacagatatcccttcgggaagctgcgaagctcctgctccgtgatgccccgcatcaatatcagcatgacaaaatagactacagcagcaattacgatcgcaggaatgacagagatccgcatggacttcgtcactatatacaggccctcgtagattgcccaggctgccgctcccataaacgcggaggcgaacgccggaatgacgaaagtctttacgatctcctgccggtagcctaccgctcttcttaccgcccactggttcagcacacacatcataccggaatacagcgtattagcgatggcaatgctgtacagatccagtcttgtgaacatcagaagcagcactgctgccaccgtctgcaccaccagcgagatccccgcattgatgatcggggtatttactttgccaagcccctgtaagatcgaactgttcagagtcgacagtgcataaaagataaccgacagtgacaatgtcattaaaagagctgccgccagattcaattcctctgccgtcttattcgtgaacagcagactgatcaccggcttcgccagcacgaaaagtcctaccgcacagggaatggagatcaccatggtcgtcttcaccgccagaccgatcttctctctggctcccttcacatcccgggctgccatcagctgtgctacggaaggaatcatggcagaagccatagcagatgcaaaggctatgggaatattggacattgtcaaggactgtccggagaaaataccatatttttcataaatagataccgtatccagattgcgaagggacggataccattttgtgtagatactgttgttgaccgtactgcttaagttatatacagccgtactcaaaataaacggtgtcaccaccagtgtgatcgtcttgaatatctgtccgtaggaatccacatgttcatgcctgtcacgctgcactctgcgcaggatcattccacgattcagagcatagactcccgccataaaaagcagagccactaatacgccgacacctgttcccaatgcacttcccacagcaccgtaggttgctctcatcacctgccctgcctgatccgccggaacctccatcgttcccataaacatttggatcagaaggtatgccgcgcctacgctgactaccgcattggcgatctgctccaggatctgcgatacggaggtctgcgccatgctcttatgtgcctgaaaataccctcgtaaaactcccaggataccatagacgaagatcgtcggtgcaaaggtgcgcagtactgtgaccgctgctccggacacgaataatcccgctccgaaaaacagaaaaaggctggctataccgccaaccaccagtacatagatcatggctccgtggaacagtctgtgggcgttacggtattccttctctcccagcttctgtgcgatagctttggaaatcgccgaaggaatactataagaggagatcaacagaatgatcgtataatagttatacgctgactggtaataaccaagtcccagattcccgatgacactctgtaaagggcccctgtaaaggagccctatgattctgctgatgattccggctgccgccagaattcccgcctgcatgataaaattgttcttggaactgttcttatctgccatatgtaatcttaccttattccagttctttatccgatcagccagtcatacatctcctggtattttccggcggataccttccaggagtagtcggtggccatggcacgatccacgatcttattccactctctcttcctgtcgtaataaatatgctccgcataacggatcgtattcagcatctcatgtgcattgtaattcgtaaagctgaagcctgtaccggtgctctcatactcattatagggctgtacggtatccttcagtccgccggtctctctgacgatgggtacggtaccgtaacgcagtgcgatcaactgactcaggccgcagggttcgaacagagacggcatcaggtaagcgtcacaagccgcatagattttatgggacagtgcatctgaataataaatattggcagacaccttgtctccatacttccagtcgaaatgacggaacatattttcgtaacgttcctcaccggtgcccagtaccacgaactggatatcatcctgacacagttcatccatgacataagcgatcagatccagacccttctggtctgtcagtctggataccagaccgatcatcattttcttatcatctacgcgaagtccaagctcttcctgcagggcacgcttattcttcaccttttccttgcggaaattcactgcattataggcttttacgatatttttgtccgtctccggattgaactctccatagtcgatgccgttgacaataccgcgcagatcatggcttctcgcacgcagcaatccgtccaggccctcaccgtaaaacggagtcttgatctcctccgcataggtatcacttacggtggtcactgcatctgcaaatacgataccgccctttaacaggttcgcatccttataagcctccagcttgtcagaggtaaaataatactccggcagtccggtaatgctctgtaccgtcttcacatcccattttccctggaatttcaggttatgtatggtgatcacagacttcatgttgcggtagaaatctccgccatggaaacgctccttcaggtataccgggatcagaccggtctgccagtcatggcaatggatcagatccggctggaaattcaaaagcggtaatgccgacagcactgccttgcagaaatatgcatacttttcgatctcatatctgggatcatccccataaggcttgaaaccaccgaaataactctcattatcaatgaaataataatgcaccccggcttcctctgcctccagaacacctacatacacattctgccagttgaaatccatgtagaaatgtgtcacatacctgagcttatccttcatctcctgcttcatacaggtatacttcgggataaacactcttacatcaaaatactccttgtcaatatacttcggcaaagatcctacgacatccgcaagtcctccggtcttgataaaaggtacgccttccgatgcggcaaaaagaatttttttcatgtaaaccctccacatatgctacggcttgtattcaaaatatagattgattataccatgtttacgattcatagaaaagagggcatcgataatttacaaatcttttagagtctgccggttccacctcagcttctgtaggaaagccggatcctgtcagcgatcagtgcgataaattccgaattggtaggtttgcctttgcccgtgtcgatcgtgtaaccgaacatggcatccagggtctccatgcgccctctgctccaggcaacctcaatggcatggcgaatagcgcgctccacgcggctgggtgtggtctggaaccgcttggcgatggtcggatacaggatctttgtgatagaactgatcattgccggatcctctaccgacatcatgatagcttcccgcagatactgataccctttgatatgtgccggcactccgatctcatggatcatatccgtgacatccttttccaggtcatggatgacttcccgggtctgttcctttttttctgtcgcttttactgtgctgtctttggcgtttttcgtagaaggaaccgtgatcataatttggaattccttgttggcattcatcagatcccccaggattttgtatactttttcattatcctttgtagttgtaatgtttaatttttccattaaactacctccatgactacaaaactacttttttcacgtaccgttctattataaatagatatgcgtcgtagcttcaagcagaacccatcgcaagatttttccaaatttcgcagaataaaaaaggtaaaaaaaggcgcccggaatgacccggacgccaataagagggaaaatgtataagtagaaaaactacgagtaaagcaaattaatgatgctctgccagggtgtgaagtgcttccttgatggctgtcttcacggtctcatcctgttctgcattcagtctgtgcagcagataggtcttggcatattcggtgccgatgcttcctaacgcttttgctgcttcgacacggatcttcgtatccggattgtcgatcatgtgggcaatgctgttgacactgtcttcatccttgatccggctcaacgcttccagtgcggctaccaccaccgtgtcatcggaagaactcagatatttgatgatcttgtcggattttcctttctcctgtaatttttgaatcttacttaaatcatgttgttccataaacacgcgcctctttctttctgccagcgcgggggcggtaaaatcgtctccggatcatcactgtatgtcgcctgtggtgattggcttctcttgataatgttatgataacaccttatctgtcagaaaacaattatagcaaaatgaaggatttctaaaaattctataacctgctactcttttgctcaaataaatcacatctgtattctaatgccctgtagtccaatgccgatttcacatatcccgcagtcatatcattcattgctttctgcttagctccttgtattcactttgttggaatatacattcgggaaatcctctcgaagccattccacatattcatccgaaatactgtacaatttgaattctttcattatacttcctttcttcggtataaaacaaaaagagagcaaatattttactatttgctctctcagaatttaagattctccacttatatggcaggagctctcccgagtttaaaatcttccacttatatggcaggaactctcccgataatcaattccttatctattaatcattatatgctttcttaatgaaaaaagcaatgagtattttagcaacgatatctttcaaaatcttattattttctcccaattataataacatgattacttgctcctaaaaccgactgttcacggcatacactataatgatagtcgcaccaagttttgaactgtttttcatcccatttgtcaaccttttgtgataaaagaggagctaaaccatcttgggcgaaatggtctacaatttttaatctatatctttggtaaattgattccatttcttcttttgatgagtaataagtatctgtccaaaagcatttctcatcatcatgcttcagcacaccagtttcaataagttgtttcgccaagtgttcatccaaatatttttcattgctcgtagcaatatattgaaaaacatagtatcttggaatgtacgcagtaaccaaaagcccgcctttccttaacactcttagacattccttcatgcatttttctctctgctcttctgtaatcaaatgataaaatggtcccatattgagaacaatatcaaatgaatcatctgcgaaacaggacatatctgtagcatccaaaacagaagtattcatatgataatttttattggtaagagttcgattaataatgtctatatgccttggcgtaatatctgtagcagttacatcatgccccttatctgcaaaccagaaagcataaattcctgttcctgctgcacaatctaatattttactattggtgccgataatctcatccaaaactcttgtagttgttacaaattcaattcttcttgcattatttgtagtcaaacgattttcctctttgtaattctcgtaactgtcaacaacataattcatcactaattcctgcgattctattatttttatgtattaaaaaagataccctccttaaatttactttaaggacgatagctgatagcttcgtgttaccaccttaattcatctatatctcgcaatatagaccttagcaagtacggaaatctctttcgatactctgacgctgtaatgggcgttcccagtgtagcctaataaatatctcactcggtacacggctccaagactggttcaatatttcttcaatagagttttccaccaagcaactcctctctgtaatttccaaaatatttactatctctcttcatcgcattttaacatagtagattcataattattttttgtcaagacatacaaaataaaaattattaattattgagaataatatctattatatctttctttcctttagtgtacaatcccctattatcagcatacttactttccagttcttccttcaccctctgatactgcaaagccatattctcattatcatttagataatctctgaaatgaatataatttttccactcagttccgttccatttcacaatatgaatatggtgtgtcctgatatccttttccatatcccccattacataaagaatctgatcttccacatccgaaccacgataaaagattccttccttctgtaactgctcattatatgacattattttctcaaaatcagttaccccaacagcaatatcaataatcggttttgctttaattgctggtattgctgtacttccaatatgttgtatatcaacagcatcatcacctaatatagatttaagttttttgattgtttgaatggcagcctcatcccactgtttatcatgtggttcaagctgcactattcctctttttaatcctaatgacatagcaatctccttaatattacatcacaatttcactatcaaaatattgctcctgaaaataaatctgctgcctaatctcatcttttgaaaacatcattccgtcaggtacaactacccacttttcttctatatcatcttttctatgaacaatagccataattttacctgtaaacttgtctactggttcatttacacctaatatataagcgtcctgctcttctccatctggtgcc

SEQ ID NO: 215 - DNA, 20207 bp, unidentified
  source 1..20207: mol_type = unassigned DNA
  misc_difference 2060: note = a, c, g, or t
  misc_difference 2061: note = a, c, g, or t
  misc_difference 2062: note = a, c, g, or t
  misc_difference 2063: note = a, c, g, or t
  misc_difference 2064: note = a, c, g, or t
  misc_difference 2065: note = a, c, g, or t
  misc_difference 2066: note = a, c, g, or t
  misc_difference 2067: note = a, c, g, or t
  misc_difference 2068: note = a, c, g, or t
  misc_difference 2069: note = a, c, g, or t
  misc_difference 11983: note = a, c, g, or t
  misc_difference 11984: note = a, c, g, or t
  misc_difference 11985: note = a, c, g, or t
  misc_difference 11986: note = a, c, g, or t
  misc_difference 11987: note = a, c, g, or t
  misc_difference 11988: note = a, c, g, or t
  misc_difference 11989: note = a, c, g, or t
  misc_difference 11990: note = a, c, g, or t
  misc_difference 11991: note = a, c, g, or t
  misc_difference 11992: note = a, c, g, or t
agtgcatcgaagccatgcccttgagcggaagcaggtagttcatgtaggagaacatgcccttcttcatctcgccgccgtaccacgtgttgatgatgacctgcatcttctcggtgaggttgaagacgacggccgtctccgagttcagaccgagtttcttgtagttcttgaccttggccttcgatgcgttgagcacgacgaaatcgggctctccgtaattctccagttcggcgtcggtcggacggatgaacatgttcttaacgaagtgcgcctgccaagccacctccatgatgaagcggatcttcagacgcgagttctcgttggcgccgcagaaagtatcgacgacgtaaagcttcttgcccgacagctcctgcgaagcgatcttcttcagctctttccaagccgccttggttacgggcttgttgtcgttcttatactcgtcggaagtccaccagatcgtatctttcgtggtctcgtccattacgaagaacttgtctttgggcgaacggccggtgtaaacgccggtcatcacgttcacggcgcccatttcggtctcctgacccttttcgaaaccgcggaggcctttcttggtctcctcgcggaaaagttcgtcgtacgacggattgtacacgatctcggtcacacccgtgatcccgtactttttcaaatccattttgttcatagcaatcgttatttttaataaaacatcaaatccaagatttaacctaaccgtcgaaatccgcgcgtgcggactttaaccgcacaaaggtagaaaaacttttacacttgtgaaaaaattaacagtaaaaaacacaaaaaaagaacattattttttccggcacccgtatatgattcatttataacttcgtatctcctccgcccgaagccgcgcgcagctcaggaactgcggacataccgcaaacatgctgccgcgatttccggttgtgccggacgaatccggcagcctccgaaaaacgcggagcgcaccggctttcggcctgtttcggaaaaatcggaaaataatgtgccgtcgtctccgttttttttcttaactttggtaaccatggccggactctatttccacatacccttctgcaagcgcgtctgcgcctactgcgacttttacaaaagcgccgacctgcggcgcatggacgacctgctggcggccatgcaccgcgaactggacgaccggcgcggctatccgggcggcgaagcggtgacgacccgctatttcggcggcggaacgccgtcgctctgcacgcccgaagcgatcaggggactgctggaccacgccgcacaactcttcgactgctccggcgccgaagagacgacgctcgaagccaatcccgacgacctgacggccgagtacctcggcgggctgctcgaagcgggcatcgaccgcctttcgatcggcgtacagtcgttcgacgacgactgtctgaaactgatgaaccgccgccacacggccgcgcaggcggccgaagcggtccgtgctgcgcagcgcgccggattcggcaacatcaccgtcgatctgatcttcggcatgccgggtttcggcggcgatacgctgcgccgctcgctcgatgcggccctttcgctcggcgtacagcatatttcggcataccatttgaccgtcgaacccgatacggctttcggacggcgcgccgcgcggggcgaattccgggccgtagacgagcagatcagcgaaacggagttcctcacggtccaccacacgctgaccgaagcgggattcgaacactacgaagtctcgaatttcgcccttccgggcttccgcgcccgccacaacgcggcgtactggcacggcgcgaagtacctcggcatcggtcctgcggcgcactcgttcgacggcgaggagcggcactggaacgtaggttcggtggagcggtacatcgcgggcgatccggcggaacgcgaactcctcacgaacagggaccgtttcaacgagtacgtcatgacggcgctccgaaccgccgaaggaatcgacacgcgggaggtcgcggcccgtttcggcacagatcggaagagcgtcgtgtagggaaagnnnnnnnnnnctggagcggatgcgcgaagaggcggccccctatctgcaaagcggcgcgctccgcgacgcaggcggacggctggcggttcccccggagcggtttctgatctcggacgccgtgatcgaggcccttttcgaaacataacgacgcgcgcaaccaagtgaaactgaaatgttaagttattcttaaatttttttactaattaccctttcgagattgttaatataaatataagtattacctttgcaccggttttcaaccgattcgacaagtaaattacaaacaagcatcacaaatatgagcaatgcaaaactaacccccgattacctgttcgaggtaagttgggaggtctgcaacaaaatcggcggcatccatacggtagtctcgaccaaagcgcaaacggccatccggaaattcaacgagcgctatatcctcatcggacccgacctgcagcacgaaggcgtaaaccccgaattcgaggaggatcccaacctgctgaagacatggcgtcaggggctttacgccgaaggcatccgcatccgcgtgggacactggaaaatcaagggcgaaccgacggcgatactggtggacttcacctcgctgattccccgcaaggacgaaatactcaagaaactctgggaggcctaccacgtcgattcgatttcgggtcagtgggactacatcgagcccgtgctcttcggctacgccgcaggcgcggtgatcgcctcctatgtcgagaacttctgcaccgcgaccgacaagatcgccgcccatttccacgaatggatgaccgcggcgggcggtctctacctgcgccgccatgcgccttatgtggcgacactcttcaccacgcacgccacggtcatgggccgctgcatcgcgggcaaccacctgccgctctacaccgacctgaccaagttcaatgccgacgagctggcacgccagttcaacgtcgtggccaaacactcgatcgagaaggccgccgctgcctaccacgacgcattcgtcacggtcagcgacatcacggccaacgagtgcaaattcctgctgggccgcgagcctgactgcatcacgcccaacggcttcgaaaacgacttcgtctggaccggcgaggagtacgacgcgaagcgcgccgaagcccgcaaaacgatgatctcggtggccgaagcgtgtctgggcgaaaagttcgccgaggagccgctgatcgtcggcaccagcggacgctacgaattccgcaacaagggcatcgacgtattcatcgaatcgctcaagaaactggccgcatcgccccggctcaaacgtcaggtgctggcctatatcaccgtgcccgccgccaaccgcggtccgcgcgcggacctgcaggcgcatctggccgacccgtcgaaacccatcgacggcgggcagtacaaatacacgacccactacctcgaataccagagcagcgacccgatcgttaacgccctcaacggcagcattctgaccacgcccgattcgaaggtgaaggtgatcttcgttccgacctacctcaacaaggccgacggcatcttcggcaaggattactacgaactgctggtcggcatggacatgaccgtattcccctcctactacgaaccgtggggatacacgccgctcgaatcggtggccttctccgtgccgacgatcaccacgacgctggccggattcggtctctgggcggccaaacagcgcgagcatgcgggcgtggagatcgttctgcgcgacgactacaacgatcaggaggtcgaagagaagatcgccgagtcgctgctgcacttcagcctgctggacgacaagcacgtgaacgagatgcgcgtgtcggcctacgaaatctccgaaacggcgctctgggaacacctcttcgccgcctacgagcaggcttactccgaggctgtcgaaagttcggtcatccgcaccaaccgcgccgtgctggacgagggcggaaaccgcaacgagcagatcaacttcgtgcgccagcagcttttcgccgagaagcccaactggaaccgcatgatggtggacaagaccctgcccaaacggctgcacgccctcgaagagctgtcgcgcaacctctggtggtgctggaatcccggcacgcgcgacctgttcgaaagcatcgaccatgcgttgtgggccgagtgcgaacgcaatccgatcgcattcctcgacaaaatgagcgtggagcgcatgaaggagcttgaacaggatacgaatttcctcagccagctcgacgccgtatatgcgcagttccgcgactacatgaacgagaaacccgatccgaaggcgacctcgatctcctacttctcgatggagtacggcctgcattcgtcgctcaagatttactccggcggtctgggcattctggccggcgactacctcaaggaggcgtcggacaagaacgttccgatggcggccgtgggcctgctgtaccgttacggctacttcacgcagcggctctcgtcgcagggcgcgcaggaggcgacctacgaagcgcagaacttctacaagctgccgatctcgcccgtgcgcgacgaagccggcaactggatgacggtcaccatcgccttccccggacgtacgctctgggcacgcgtctggaaatgtcaggtgggacgcacggacctctacctactcgacgcggacttcgaggccaacctcgaagaggaccggcagattacgcaccacctctacggcggcgactgggagaaccggctcaagcaggagatcctgctcggcatcggcggtatccgcgcgctgcgcaagctgggcatcaaacacgacgtattccactgcaacgagggacacgccgcattcatcggcatcgagcgcatccgcgatctggtgacccacaagaagctctccttctcggaggcgctggaggtgatccgctcgtcgtcgctcttcacgacccatacgccggttcccgcaggccacgacgcattccccgaatcgatgatccgccagtacatgtcgcactatcccgacgtgctgggaatcacgtgggaacagtatatcaacctcggcaagaccaaccccaacgaccccaacgagaagttctcgatgtcggtgctggcctgcaacctctcgcaggaggtgaacggcgtgtcgtggctccacggcgaggtgtcgaaggatattctgggcagcatgtggccgggctacttcaaaaacgagcttcatatcgggtacgtcaccaacggcgtgcacttcccgacgtggatcgcgaccagcatgcgccgcctgtacgcccgctatttcgccgacggattcgaggggcacacctacgacatcccggcatggcagaaggtccaccagattcccgacgaagagctgtggaacgagcgcatgtatctcaagaacaagctcgtaaagcatatccgccgccgctacagcgaccccaatcaggtgcgtctcgactcgccgcgccagatgattcagatcatcgagggcatcaagcccgacgtgctgaccatcggtttcgcccgccgcttcgccacctacaagcgcgcctacctgctgttcaccaacctcgaccggctgtcggcgatcgtcaacaacaaggagcgtcccgtgcagttcatcttcgcgggcaaagcgcaccctaacgacaagccgggtcaggacctcatcaaacgcatcgtcgaagtggccgccatgccgcagttcgtaggcaagatcctcttcctgcagaattacgacatggagctggcccgccgcatggtgcagggcgtggacgtatggctcaacaccccgacccgtccgctcgaagcgtcgggcacgtcgggcgagaagtgcgtcatgaacggcgtgctccagttctcggtactcgacggatggtgggtcgaaggctacaaggagggcgcgggatggatgctgcccatggaacgcacgttcgccgatcagggctatcaggacgagcttgacgccgagatgatttacaacaccatcgaggagcagatcgtgccgaaatactacgaccgcggcagcgacggcattcctcaccagtgggtggattcggtcaaaaagtgcgtcgccgacatcgcgtcgaacttcacgaccaaccgcatgctgggggattacgaggagcggttctacaacaagctcgcggcccgcaagcgcgaaatcgtcgaaggcggctacaagctggcccgcgagatcgcggcgtggaagcgcaaggtttcggccgcatgggacaaggtccgcgtgatcgacgtccagcgcgtgaggatcgacgacgaggcgatcttcgtcggcgagaagtaccacttcgaagtgacggtggacatcgccaacctccggcctgaggatatcggcgtcgagatggtcatcgcccagcagatcgtcggcggcggcaaggtgaacgtaacccgcaccatcgggctgaaacacaccaaaaccgacggcagccgcgtgacctatgcgctggattacgttcccggcgaggccggcacgttcgacgtggcgctgcgtctctatccctacaacccccacctgccgcaccgcatggattttgcattggtaaagtgggcctagcaaatttggcgtgaataatgttaaaaaaggtattaatttactgttatcgggtattatttatctgaaaattttaatatctttataggacgaactgcatttttaagaaagatatgtcagcacttactttcgacaaaagcgaattgggcaatctggagtactccctccagcgcgaaatgctctcgacggaccgtatcggcggctacatgagtacgacgatcgtctgctgcaacacccgccgctatcacggactgatggtggcccccatcgacgacagctgccggacctacgtcctgctctcgtcgctcgacgagaccgtggtgcagcacgaccagacgttcaatctggcgctgcaccgtttcaagggggtatacgagccgcgcggccacaagtatatcaccgatttcgagtatacgccgacgccgacgatcacctaccgcgtgggcggcgtaatcctcaagaaggagatgctctggatacacaagcggacgcagctgatgatccgctacacgctcgtggacgcccactccgaaacccggctgcggctgcggccgttcctcgccttccgcgacaagcatgcgctgacgcacgccaacatggaggccgacggacactcctaccccgccgtgaacggcgtgaagtgccgtctctacaactcgttcccgtggctctatctccagacgagcaaacccggcacggagttcgtgcccgcgcccgactggtattacggattcgaataccagcaggagctggcccgcggatacgaggggtacgaagacctgctcacgacgggctatttcgaagcggagctcaagaagggcgagagcatcatcttctcggcgtcgctcgacgaaatgggctcgaccaaaaccatcgaagaggttttcgccgcatccatcgcgcggcgtacgcataagatcgacttcatcagctgtctcgaacactcggcgcggcagttcctgatccgccgtccgggcgaccggaccgaagtggtgtcgggatatccgtggcacggggtttcgggccgccagaccttcatctcgctgccgggcatcacgctcgaacagggacacaaggaggactgcatcgacgcgctggatacgctggtgcgggagatgcgcgacggcatgttcaccggcagcgcctcggccgaagtcgcggcggacgcccccctctggtttttctggaccctccagcagctcgaacgcgaagtgggggccaaggagatatgggcgagctacggcccggccatgaaagacatactggagagctaccggcagggaatcggcggccgcgtggcgctgcacgacaacgggctgatatgggcttcatcggaagaggtgcccctgacgtggatgaattcaacgatcgacggacgccccgtaaccccgcgcaacggctatcaggtcgaagtgaacgccttgtggtacaacgccgtatgctatgcgctcgaactggccggcaaatacggggacaagacggacaaggccttcgtcaaggcgtgggcctcgcttccggctcgcacacaggagtcgttcatcgaactgttccgcctgccggagggctatttggccgacttcgtggacggcagcggtcccgacaaatcgacgcgccccaacatgatcgtcgcctgcggactgaattacaagatgctcgacgagacgatgcaactggaggtgatccgcacggtgcgccagcacctgctcaccccgaagggactgcggacgctgtcgccccaaaacccgctttacaggggttcgcaggagggcatgcccgccgaacgcgacttcgccgccaaaaacggctcggtatggccgtggctgctgcccttctacatcaaggcctgcttcgacatcgacggcgacgcattcctgccgcaggccgaggaggcgctggaaaacttcgacgaggacatccagcgttacggcatcggctcgatctgcgagttgtacgacgccgacccgccctacgcttcgcgcggagccatttcgcaggcgtggagcgtcggagccgcactggacatccaccgcatgatccgcgagcggagcaaaggggattcccaagggcccaaagccgcgaagaaaagcggcagaacgaacggtccgaaagagaaaaagccggcgaagacgaagcctgcggcgaaaagcgccgggaagacggtaaaggccgccgccaaaagtccgaccgcggcgaaggcccccaaggccgcggcgaaaaaggcggcgccgaaagcagcggcaggaaaagccgcaaagaaataaaggcaacaaaatgaaaagaattaagatatgagagttttaatgttcggttgggagttcccgccccacatcgcgggcggtcttggaacggcgtgctacggcatgacgcgcggtctggcgcgcaacgacgtagacgtcacgttcgtggttccccacgcttacggcgatgaagatcagcgtttcacgcacgtaatgaacgccagcgacgtggaggctctctatggttcgaccgggagcggagccgacgacattctcgaaaaaatgtcgttcatccacatcgactcgaacatggtgccctacatctcccccgaagagtacgaggtctaccacgaacgctatgtaaaatcgggtcagcaggtctggtccacgaccgacgcatggaaacagcgttacaccttttcgggaaagtacggcgccaacctcatggaggaggtggcccgttacgccgtggtggccgcgcaggtcgccaaggacctcgaagggcagttcgacgtgatccacgcccacgactggctcacctactacgccggcatcgccgccaagcgcgtgtcgggcaagccgctcgtcgtgcacatgcacgccacggaatacgaccgcagcggcgagaacgtcaatacgcaggtctacgccatcgagcgtgcgggcatgcacgccgcggaccgcgtgatcgccgtttcgaaccttacccgcaacatcgtcatcaaccgctacggcgttccggccgaaaaggtcgtgacggtgcacaacgccgtgcgcttcgccggcggcccctgcaaaatgcccgaacgcggcgtgaaggacaagatcgtcaccttcctcggacgcatcacctaccagaaaggtcccgactacttcgtcgaggctgccgccaaagtgctcaagcgcgtacccgacgtacgcttcgtgatggccggttcgggcgacatgatgaaccacgtcatccgccgcgtggcgcggctgggcatcgccgaccgcttccacttcacggggttcctgcgcggcgaggacgtacacaagatgttccagctgtcggacgtatacgtcatgccgtcggtctcggaacctttcggcatctcgcccctcgaagcgatgcgctcgaacgtgccggtgatcatctccaaacagagcggcgtggccgaagtgctcgacttcgccgtgaaggtcgattactgggacgtggacgcgctggccgacgccatctacggcctcatccaatacccggccctgtcgggcatgttcgcgtcgaaaggactcgaagaggtcaccaacctcaagtggaacgacgccgcggcgaagatcaaagccgtatacgaagcggtcattgaagagaacaaaaaacaataaaaatacagataccctatgaaaaccgtctgcttatattttcaggtacaccagccttggcgactgaagaagtaccgcttcttcaacatgggcaaggaccacaactacctagacgacctcctgaaccgctcgatcatgcagaaagtcgcccggcagtgttacctgcccatgaacgccctgctgctgaagttgatcaaggagaacaagggtaaattccgctgttcgttctcgatcacgggcatcgccgtcgagcagttccgcgccttcgcgcctgaggtgctcgactcgttcaaggagctggccgccacgggatgcgtcgagtttctggccgaaacctactcccattcgctggcgtcgctggcgtcgaaagaggatttcaccgaacaggtgaagctccatacggccatgatcaagaaggagttcggcgtgaagcccaccgccttccgcaacaccgagctgatctactccgacgagatcggcgccatggtcgccgacatgggcttccgcacgatgctggccgaaggcgccaagcacgtgctgggctggaaatcgcctaactacgtctatgccaacgccatcaatcagaaattgcgcctgctgttgcgcaactacaagctctcggacgacattgcgttccgtttctcgaaccgcagctgggacgaatggccgctgacggcggacaaatacgtcaaatggctctcttcggacgaaacgccgggcgaggtcatcaacctcttcatggactacgagaccttcggggagcatcagacggcggatacgggaatcttcgaattcatgcgtgcgcttcccaaagcgatcctcgccaagaagaacgacatggagttcgccaccgtaagcgaggccgccaagaagtaccagccggtgtccgtactccactgtccgcacgtaatgtcgtgggccgacgaggagcgcgacgtgacggcgtggctcggcaacgagttgcagaacgaggctttctcgaaactctacgcccagaaagagaaggtcgccgccctgaaaagccccgatttcgactatgtatggagtttcatgcagacctcggaccacttctactacatggcgaccaaatggctctcggacggcgacgtacactcctacttcaacccgtacgactcggcatacgacgccttcatcaactacatgaacgtcctttcggacttcatcatcgagctggatcaagcggtggccgccaaagccgccaaggcaaaataaggctgaaaccgccgcaacacgggggaggaagcgccggagaggctttgtcggggcgcggcgtctaatacgcccgcgcacgaaacgcccgcgaaatcccgcccgaaatcagcaccgacgacgcggcgctgtccgtattgcagaaaaacggattcaggggcctttcacgccctccggggatacgatgagggacgcggaaggctggcgcatgaaacgcagccctacagccccgcaaacacgcccgtaaagcccgcatggctctgcggcgcgacggaacggcggaccgaaaaaaacgcccaaaatgccggaaaacgccggggaacatgggaagaacatccgggaaatgccggaaataggctcaaatcaaatcaaatcagccgcagtattgactgcggctgatttttcatataagtcgggacaaaggcacccgatccggcaacagcctatcgtatccggtccgacggattgcagcaacggtcggaacgataaaaaagcggcagaccgcgcctcttcagatcggaagagcggttcagcaggaatgccgagacnnnnnnnnnncctacacgacgctcttccgatctcttcggtctgccgcaagcaggaatgttacttaaaagtgggagttgttaaccaaaaaactttgggatgtgccgttcctgctttagggatttgatttcccgcgctcccggcaccgccccgaagaacggcgccggatttcgcggaaaagggggattctttattagttggctttctgcttaactttgatatcaagattgtgaacgcggtccgtgccgtaatcataggatacggtaactttcaccttgaccgtcttctcgcctacgaattcgctgtcggcattacccttgaccgtaatcgtaccggtggttgcgaaatcggccccagtatcaattcggtcaacgagaacctccggattcatcacctcgtacttgacaacgactccgagaaccgtattctcatcggcagccgtagcctcgaatacgttattgccgttgatattcgccagctggaggagatcgcccacagtcagggaagcatcgtcagcgctcgcggagatcgtagtaacggcattcttacgcaggctgatcgtcttatccttgatcgggtcgggaatctcgacattgagcacctgctcgtcaaggacataagaatcgagcatcagttttacgctgagcgccatattcaggcccttgtactcagtaccccacgtcagggtcttggcgtcggcgtctaccgaagcgccttcatactcttcggtgtctaccgagaagacaacctttccgatttcattgcccttggaatctttgggtgcaacccaagtgttgtcgaggttaagtccatcgggtacataagccgtcgtcgagagcgttgctttcagaagcaccggatccgcatagttgtcgccctgtaccagctcgcctgtaaagccttcgaaattaaccgtaacggcaaccgttacatcgagaccccagtcggcagtaagtttagccgtgagcgcgtagctcttctccttggctccggcgccgagcttgatagcgatgttatttgcatcgtcggacgcctgcatgagcacggttccgtcttccgcttcatcggcagtagcctcgaatgtagcggcatagatcgcatctacgaacgtctgcttgtcggcgaagaacttcggagcccaagcctcattccagagtttctcggcatacttctcgatcaccgtgtattcgctcgttcccgccaagtaatccaccgttacggtctccggagccatcgtgatctcaggcatgccctcgataacgacgggcagagtaatcgtaatatcggtgttctcatagttgtaacgcgctttgaccgtgtaagaaccgctcgtcattgcgctgttgccggctacgacaagttccagatgctgctctgcacgatcgtcagcaggagagctcgtaaggataatgtcagcgacatcgaacggcagctcgtcagtcatttcggtctcgccgtcgaagatacggatgtcttcgaaggaaccagccttcagtgcgttgtaaatcacatggccgatctgcggcttcgtgggatcgggattcagcaggtaatccacagcctcgtaatcgtcgccggcactaaccgttgcatagttccacgttaccgtctgcggcacggaaacgatgacgtcggtgttgtccttgatgatggtgaactgcgatttggcgttcttaaccacgcggcaggtgtattcgcccgatacgaggtcgaacgagaacggttccgaggtaatcacgtcgtcgatcagagccggaacacccttgcccttcttgatcgccgccgtggttgccgtaagcgtatagctgtccttgttatcttcgggatctaccgttgccacggcgtcgtcttcaggaacaacggtcttgagaacgggaacatcctcgccccaaatctcagccagctcctgcggtttgccgtctttcatgtagtaaatcttcacatcatggaagaactcaacgacggtttcctcgtcgttatacttcagaccgccgtcgccctcgaattccgggaactgggtatcgttgtcaattaccagttcgagcgttccgttctctttcatacggccggcaaccagatcggcgttgatcgcgccgcctgcactatactgcgtaccgataaaggcactggtgaaatcgctgcccaaatcctcgcccgaaatggcatcttcgggcgtagctccggcgacaccggtgcctgcgagtttcacattcagcgcaatggccagcgttttgccgtttccgtactcgtactgagtcttggcgacaacggtaaacttaccggtcacgacgtcctgatcgatcacgtctacaacctcgaacgacgcagcgctgcgcgtcttgatctcctccgttacgaacgatacgttctccttggtcatcttgactgccagagccgcaggcgaaaccatgaaagtagcttcgatcgcggcctcgttgccgccttcgtcgctgcccagatagaacttgtagtcctcaccttcaccgtcaaccatcgcgatatagggaagtccctcgatggaaatgacattgttcgatacctcttcgagcgaagtcggaacgtaaaccagcgactggatgcggccggcgaggtctgcgatagcgctccagagattgcggagctgcgtgtcgtaattgtcgaaacgatccttcagatcggcttctttcaggtagattgcgctgccgtcggggttgaacagtttgctgtttacaccctcctcgatcatcgcctcgatagcctctttcagagttacgttggcatcggtcagctccttgaggatcgtatcggtgatggtcttgcccatttcggctttgaccgtctcgtcattcatgtactcagccatgtacgaagcgaagttgtcgccgaggaccttcttgatggcatcggtgaccgtagccgtctccgaagatacggaattggcgacagcggtaaggatctggttgatctgagtcgccgacagctgatcggcaccggtgatgtaacctttaccctcgacgaaatccttcatctgctgctcggtaacgtacttgccgtcgaccagagcctgctggatgatcttctgcatttcggcctgcagtttacccatggtctcgtccgaagcgatcatcgtctcgaaaatcttcttgacatcgtcggcagtcagctgattcttggtagcctcttcgatcagtttctgaacgtcagccttggtctgatatccctgagccttaataagtttcaacacctcatcgctagtcagccaatctttcagatccgacttcttggcatagtctgccagccttttgtcaagctctgtctggagaccgctgttggtaacgaaagacgagaaatctatcccgtttaatttgtcggtaacagctttgagggctgaagcgtcggccttcaactcgacttgacccttcaagtcgttgatctgacccttcaggtcgtcgatgtcgtcgtcgtagtctttacaaccgacaccggctaacattgttccggttaagaacagtgcaagaaattttctgaataagttttttttcatagtaatgaagaattgaaatggaattgttttttagtgttgacgcatttagttttatcaatagagtgacgcttgctatttctcattcgcggagtctgccttttgtagtatttcatagacttttcagaccatcaaacacgttatttgtattaagtgacgcattctttataattagttgacgcattaaattttccagttatgacaccatagttgctggtatcatatatgatacgcatggtgcaaatatatatataaaaatttgcacaacaaaatttttatccaaatttttgaaatgggagttgtttatgaggaggaggtatcctatatctcctctaggatcagagagttgaggagggagaggcgtctgacggtacaggaactcgcataccgttgcgacatggaaagatccaatttgagccgtatcgaagcgggacgcacgaaccttacggtcaaaacgatgtgtatcatatgtaacgcgttgaatgtgagcttgagggaggtcattcggtaacagagatatacctatatttatatatttccgtgccgttgcaagaagagttctttttttaggctgtttaggtaaattgtcgtatatttaccaaccaaatgaaataagaacccgctgtttgtgaatacaatcgatttgatcgtctgccttattctggcattggccgtatggaacggctggcgccaaggctttgtcatgcagatatgttcgctggccggtatcgtcgcaggtatctggctggcttcacgttacggcgtttatgtcggggcgtggctgaagctggacgcaacggtctccgcggccggcggattcgtcgtggtcctgctggccgtgattcttctggtggccgttgccggacggctggtacgcaagttgtttcacttcgcggggttcggaatccccgacatcgtgctgggcatcgcggtgtcggtgctgaaatacatgctggtgctgagcgtattgttctcggcgttcgattcgctcaacgaggattacacgctcgtcggaccgcaaacgatcgagaaatcgaagagttacaaacccgtcatgcgcctgtccgaagccgttttccccttcttggaatgggtcggcgagcaggtgccgcaggaacaaaaccaggattagccgatggaaaaacgattcaccggaacagtggtgcgcgccaccggaagctggtacgacgttctgcacgacggcgcggtcgtccgctgccgtatccggggccggctgcggctgcggggcgtacgttcgaccaatccggtcgtggtgggcgacgaagtgacctgcgaggccgacgcagggggcgattacgtcatctgcgacatttcgccccgccgcaactacgtcatccgccgggcgtcgaacctctcgaaggagtcgcatatcatcgcggccaacgtcgatcaggctctgctgatggcgacgctgcgttcgcccgaaaccgccacggagttcgtggatcgctttctggtgacctgcgaagcctataaggtccccgttacgatcctgctctcgaaaatcgacctgcaggacccgcaggccgtcgcagactttcatgccgtgtacgaaagcgccggataccgtgtcatggaggtctcctccgccacgggcgaaggcgtcggtgcggtacacgagctgctcaaagggcgtacgaccctcgtttcgggcaattcgggcgtcggaaaatcgacgctcatccgcgccatcgacccctcgctggacatccgtacgggcgaaatctccgaaagccaccacaagggacggcacacgacgaccttttcgacgatgtatccgctggccgaaggcggcgcggtgatcgacacgccgggcatcaagggtttcgggctgatcgacatcgacgatgccgagttgtggcattacttccccgaaatgatgcgcacggcccccgactgccggttttacaactgcacccacacccacgaaccgggatgtgcggtggtcgaagccgtcgaacgggggcagatcgcctatccccgctacgaaagttacctcaaaatactcgatgaagatgaaaaataccgcaaataagggtgctgaatggtacgccgaacgtatcgcctgccttgcggagttcacgacctccgagcgttatgaagtactccgccgcacggtcgccatgcgtacgcgatacatgaccgtgctggccgagaatatgtaccacgggcagaatgcagccgccctgatccgccactgcgaggcgttcggcgtgcaggagatgcacaccgtcgagacgctgtgccgcttcgaacccaatcccgacatcgtgcgcggcaccgaccaatgggtcgatgtccggcgtcatccctcgacgggagaagccctcgccgcactgcgcagtgcgggataccgcatcgttgcgactacgccccaccgcgaagacgtgacgcccgaaacgttcgacgtcgccgcagggcctttcgcactggttttcggcaccgaacacgccggaatctcggacgaggtgatcgccggagccgacgaattcctgcgcatcccgatgtgcggcatggtcgagagcctgaatgtttcggcgtcggccgcgatcctgatctatatgctctccgagcggatgcggctcacggtcggggagtggcgcatgaccgacgcgcagcaggccgagaccctcttcggctggatgcgccgcagcgtgaaggatgcggacgcgatattgcagcggaaattcaaagattgacaatgaataccattttacgcaaacaatttctggcccacgtgggccagacttcgccttcgccgatgctcgtcgaagtcgaacgcgccgaagggtcgtttttctacacgcccgaaggcaagcgttactacgacttggtggcgggcgtctcggtgagcaacgtcggccactgcaatcccgccgtggtgcgggccgtgcaggagcaggcggcgcgctatatgcacgtgatggtctacggcgagctggtcgagacgccgcaggtggaatatgcctcgaagctcgcgtcgctgctgcccggaggactcgaaagcgtctatttcgtcaattcgggggccgaagcggtcgagggcgctttaaagctggccaagcgtttcacgggccgcacggagctgatctccatgcgccgcgcctaccacggttcgacccacggttcgatgagcatgatgggggcgcccgaaggcgaagagtggaaaggggcgttccggcccctgctgcccgacgtgcaggcgatcgaattcaacgatttcgacgcgctgaaccgcatcacgcggcgcacggcctgcgtgctggccgaacccgtacagggcgaagcgggcgtccggacgcccgcgccgggctatctggaagccctgcggcggcggtgcgacgaagtgggcgccctgctggtcttcgacgagatacagaccggtatgggccgcacgggcgaactgttcgccatgctcaaatacggcgttacgcccgacatcgtatgcttggccaaggcgttcggcggcggcatgccgctgggggcgttcgtggcgcggcgcgaaatcatggatacgctgcaaaccgatccggttctgggacatatcaccaccttcggcggacacccggtctgttgtgcggcggggctggcggcgttgaattacctgctggacaacaaggtcgtggagcaggccgaagccaagggcgcgctgtacgaaacgctgctggggagccatcccgccgtgcgcgaaatccgccgcagcggcctgttgatggccgtcgagttgggcgaatcggcgaaactgtaccgcacgatggaactgttcaaggatgccggaatcctgagcgactggttcctgttctgcgacacggcattccgcatctcgccgccgctgacgatctccggggaggaggtgcgcgaaagcgccgcgcttatccgggagtgtctcgaccggctgcggtagccggaacaggctgccaagacatccggcgggacacgattgcgccggaaaacacaataagaaagagggccagaaggccctcttttcattttcgggtgcaaagctgtttccgacgcgatgcccgctccgccgggcgttatttttcttcggcgaacgccttgagcatggcgatctcctccggccagcgctcttcgtcgggcgtttcgaggatcagcggaatgccgtcgaaacgcgcgtcctgcatgatgtagcggaaacactccatgccgatcatgccttcgcccagcggcgtatggcggtccacacggctgcccaatatcttcatggcatcgttcaggtgcatgcctttcaggtattcgaaccccacgatgctgtccagctccgcgaacgtcctctcgcacgcctcggccgtacgcaggtcgtaacctgcggcgaaagcgtggcaggtgtcgatgcagacgcccacgcgcgacttgtcctccacgcggtcgatcaggtaggccagctgttcgaaggcgaagcccagattggaaccctgccccgccgtattttcgattacggccgtcacgccgtgcgtcttgtccagcgcgatgttgatcgactcggcgatccggtcgagcgactcttcgggcgcaatcttctgcaggtggcttccggggtggaagttcagacggtccagtcccagctgctcgcagcgctgcatctcgtcgagaaacgccgcgcgcgacttttccagcccgtcgcgctcaggatgtccgaggttgatcaggtacgaatcgtggggc

SEQ ID NO: 216 - DNA, 16772 bp, unidentified
  source 1..16772: mol_type = unassigned DNA
aatcttccccatttagggaacttttgcaaatactgttttatgggaactctgctctagttgggagcactatttttctgaggcgagcatctactatgcggagcacggcgacctgaacgtcccgaaacgatataccacgcctggaggtctgagccttggggtgtggctgatcacccagcgccgtgtgcgtgaagggcagatccagggcgatctgacccagcagcagatcgcacggctggacagcattggcatggtttggggcaatcggaaggaaattgcatggcagcacgggttcgaggctgcaaagaaataccatgacacctacggagatctgctggtggctggaaagtatgtggacccggagggctatcccttgggccaatggattctcaagacccggcagcagaagttgaatggctgcttgaaggaagaacgcatcgcacagctggatgagatcggtatggtgtggagcatcttcgacgccaagtgggaaaaggcctatgccctggctgtggcctattacgaggaaaacgggaacttgaatattccccgctcctatgtaacagcggccggggaacggcttggagtatggcttgcaaatcagcaatggtcgtacccgaaaggaaagctgacggaggagcagatcgaacggctcaacagaatcgggatgtactggggcaaccgcaatgaccgccagtggaaccaaggatatcaggaagcaaaacgttattttgaagcccacggggatctgagggtcccggtcaactatgtttcgccggagggatatgccctcggtaaatgggtcaagcggcagcgttacacacggctgaatcccgaaaaaagcagcggcgcactgacagaagaacggatggagcggctggatgccatcgggatgatttggaacaagatgggctcgtaatagagtcaaaaagaattgatgatagagtgaaaaaggagtagttaggggattatgacaaaaattcgacacgatgtgatgttgagactcgtaaaggtattggatgtggtgatgatcacacttccgtttgcggcttgctgggtctggtactatgcggcaaaaacaccgctggatggaacttggcagggccatgcagttattttgggcctatatgcggtgctgtttattctgctgggcaagacctatgacgcattctggatgtccatgcagcgagtttccgagctgatgtacggtcagatcctggcggcgatggcgacggacgggattttttacattgtgatctgcctgatggccacgaagctgtgcaatcttctgccgggaatcgctgccattgcaggacagtttgtgatggctggcatctggtctacgattgcacatcgctggtattataaagcattccctccgcagcctaccaccgtggtctatgatgtgcgccgtggtatggaaaagctgattcgggactacggtttggatagcaagtacgaggtgagaaatgttctgagcgtagaagaatgcctggaagatctgagcgttctggacggtatgaagaccgtattcctcagcggcgttcacagccatgagcgcaacatcatcctgaagtattgtgtgatgaacgacatcaataccttcatcatccctcgtgtgggcgatgttctgatgagtggtgcctggccgatgcacatgcttcaccttccggtgctgcgagtcggtcggtacatggcaaagccggagttcctctttgtcaagcgtgcaatggacattgtgctgtccttggtagctctgatcattctcagcccgattttcctgatcacggcgattgcggtgaagtcggatggcggccctgcattctataagcaggtgcgtctgaccaaggatggtaagcccttcgagatcctgaagttccgttcgatgcgtgtggatgctgaaaaggacggcgtggctcgcctttccaccggtgacaaggatgaccgcattacaaaggttggccatattatccgtgcttgccgtctggatgagctgccgcagctggtgaacatcctgaagggtgatctgtccattgtaggtcctcgccctgaacgtccggaaatcgcagcacagtactgtgaagaaatgccggagtttgcgctgcgtctgcaggcaaaggctggcctcaccggttacgcacaggtgtacggaaaatataacaccacaccgtatgataagctgcaaatggatctgatgtatattgcccaccccagcctggtcgaggacctgaagatcatgctggctacggtgaagatcctgtttatgccggaaagcactgagggggtttccgagggtcaaaccactgcaatgagtggagacaagcagtaagaagctaagactgtgaacttttccaaaagcagacgataagaatcaatcgaatcgtggaaaatcttgttattgatagtgcgaaaaagatacagtttgatggcaatagtgcgaatccgcagcaagaaacctagttggagaaaggaactttatatgccaatgttttcagtgattgttccactttataataaggaacagtacataaaaaaaactgtaagctgtgtgcttgcccaaacaattgccgattttgaactgatcattgttgacgatggctcaacggataatggcccgcaatatgtgagcgagatacaggacgggagaatccgaatgcttagccagggcaatgcaggagtttctgctgcgcgaaatcatgggatacgggaggccaatggaaaatatatttgtttcttggatgcggatgatacatggaatgtggatttcttgcaaacagtaaaagaactgtttgatgagtttccagaagcaggaatggtttgtccttcttatcaggtggcatatggaaataaggtggttcatcctgtttggaagagcgtagacttggaaaaagatggctatgttgaagatttctatgagatggcaacggcgtctttttggatttgcaatagctcctgtgcagcagtcaagcgtgaagcgatacaaaagatggaacgttggttcccagaaggcgaaacagtttacgaggactttgacttctggattcggctgggaagcctttgcaaggtggcacatagcaataagatttgtgcaacctatcaacgtgaaactgctactaatgccagaaaaacacatgaggataaaacagtgtactctgttagctatatgaggacgctagatagtctttttaacagcgataacctaacaacagagcagaaaaggtgggttaaagaaattaaagacagacgcatggttccattcgttttttcactgcttttggcaggagaaaaaaagaaggcaaaacaggtgctgaaggattggaagccttgtaatacctatgagaaatataaaatgggcctaaaagcttgctgttgtattcccaataggggactggaaatagtacagtcgattagaatgaaagttttttaaaatctttaaggatgagtgggaagaattatgcgagagaatgaaatggtggatatttcgattatccttgtgaattacaaaaatgtcggcttaacagaaaaatgtattgtttctttgctgaactcgaaaaccgaggcgtcgtttgagattatcgtagtcgataatgactccggggatggcagtgcagagatactgagagataaattcccgcacattgtgataaaggatagtgggaaaaacggtggattcgcatatggaaacaatgtcggtgtgcggatggctcgaggaaaatacctgctgcttttgaacaacgatactgaagtgaccgatggaatgctggatgctttgtaccgttatgccgaaaagaacccggatgtaggaatgcttggctgcagagcattggacaggaatggcatggaattgcctattgcacatcagtatgagagtttgaaacgtatcatgcttcagtcctacgttaaaccggttctggagaaaatggggcttcagcgcaggctggtgaaggctgtcgagcataagaaggaaggagaaaaggcgtttactccggcgcagtggatcgcaggatcagctatgtttatccgacgtgatttgtactatcaggtaaatggtctggatgaaaacttttttatgtatatggaagatgaggatctttgccaccgcgtgaatgatatggggtatagcgtcggtgttattccgtatatgggatatgtccattactgtggtggcagcaccatacagtcgtatttcttgacaaaagaatatgtgaaaagtcgcttgatcttttttatgcgctatgagtcggataaatttacgaagattcaaaaacagctgtaccggcagatagcagttgtaaatccggatatttctgaggctgagacagaaataatgaaacgtgaactggatgagtttgttcggaataagctgtccgtggctgcaaagaatgtaataggagtaaaacaataattatgtcgggaaccatgatttttgctgcagtatgtggacttcctattggacttattctgctctttaagattgatatatgttactttccggtgcttttttttgcgataaagttcgcagcagcaagaattatggattttgatcgtgtcagaaacagtgtgatgtttcagctgctggtcattacagttcttcttgttgtcattattatccggaataacggaaaattgaaaatcggcgataaattgttttttaagtttataccggcgctgattatatatttgatattttattctatagtcggtgtactaaatggacatgcaatatttcagatatttattgattgctacaagtatctggaaataatcgtgtactatgtgttgttccgtgcttcgtgggaaaataataacgacgtattccagggcattaaagcgtttgcagccttgatgataggtttgggcattgtagagatattcattactactcgcggcggtgtgggattgaatcttatcatgagtcttttcccgatggtcttgattctttccctttatgattatctgccctattcaaaagctatcctgcttgcgtcgttcctggttgttgcaagctgccagacgagaacttatatcgttggcttcgtgctgggattcatggtgcttctattcttgttacctgcccgaaagcgtgaacctcttctttcattcacgtttttagtgggtattgttgctgttgtagcgattggtatatttggaggccaatttattgggaaaacgctggcacgttttgcagagctgtcagagggctttgaagaaagtggtggatatcggatctatgattatagagaggcattcaaccgcttcctggatcatcctcttttgggaaatggatttggctacctgaagaaaacctttatttttaaaatgggctggatcgaatggggagactttgtccactgtctgtatctggagatattgtttaaggttggtataagcggagtgctgtgcctgctggtgatatttaaaaagtttatcacgaggatatggagatatctcaaatggttcaaagaacaggatgactttatgttctcaatctgctgcggtgctttttgctcttttatcgcatggctttttacttatacttttgcaccgctggcgacaattggatcaatgttcttcgggccgctgattgcaagtatcgtactgagtaattactatagtgaaaataggtagagcttaacgggagatgtaatatatggatgaacacttgcactcgaaggagattatttacatatcgagtatttcatgggatttttcatggcatcggcagcaagaaatgatgatgtatatgtcagagcatgggtttaagattctttttgttgagccatgcgataagaaacatccatttcaaaggtttttcaaacaggaatgtgaaaatgtttggagggtgcgtccttgcggttttccgtacgaaagatgcagcagacttatcaatataataaatggtaagatggcgcgtactgaaattgaagaagcggctcgccagctaaaatttgaaaagccgatcttgtggctggatcgagtacatggatttgattttgaatacttccagaaaaacagttttgtggtatatgatttggttgatgaaatactggcgtttgggcgtgttcggaacgaccgaatgcttctcgaattggaaaatcaggtgctgaaaagagcagatattcttttgtcctcatctcaaacgttgatggaacgaaaaataaagcagagtagcagagaaggaaagtcactctttctgcccaacggagtggattgttcacggttttcaattgaaacggggaaagttactcaacagaaccctacgattggctttatcggccacatctcgaagagaagcattaattacaatttggtgcagtcggttgcagctgcaagaccggattggacgttgctttttgtagggccggggacggaagaagacaaaaattcgttaaaagaaggattctccaatattgtaatgaaggatcctgtgtcagggaatgaagttccgagggttatccgggaatttgacattggtatgattccttataatacagataaggaagatatggattatgtttttccaagaaaagcatgcgagtaccttgcggccggtaagccggttatcagtacgccactgaaagaagttgaatgcttaaagccctatgtgcaggtggctacagatgcagaggggtttatcagaaaggcagaagaagtaaccgacgaaaatgaattcgcaacagaagccagaagaacatttgcacaaaggtacgattgggactttttgatgaaaggattggtggcgattttgtcacagccggatgaaagtggaacataaaatggcaaaaaaatcaaatgaagttgtaaatgcgggaattggttatacgattggcaacatttttataaaaggtgtcagtttcctgactattccgctgtatacccggttgatggcaacaggagattatggcatctacaatacatatgttgcctatgtgggcattgtaactttttttgtctgtcttggaatggatcctactctgaaaaatgcagagaaagattttcctgagcgtcgagaaacctatctgtcaacggtttatgtgctcacactattggccacatccgtttcattggttgctgtgtggctgggaggagaacagctaagcaaattctttgggcttgcaaagggaatccttgctttaatggtgctcaatgctgaagcggcagcggtagtgaatatatataatgttaagttgtccttaaactattcaagcagaagttatttgaagattgcctttttccagacgtttttgggaattgggctttcggtaacgctgatgctcacactctttgaagagaatcggtatttgggacgcatcattggtatgatgattcccgctgtgtgcgttgcagctgcaattttatggaattcagtggtaaagctgaaacgttctgatcgatttgacaagaaaatgtcggcttattcactaaagcttggtctgccgcttattccacacttgctggctcaagttatcaatgcgcagtttgatcggattatgatatccaaactgatcggatatgagaagtctggaatctacagctttacctataatatagctgtgatcctccagattgtgtatcagtcgctggacaatgtgtggagcccttggttcttccagagaatggcgaaatatgaacatgaaaaaataaaaagttcctcaaagaaatatacggcactcgtcgctttttttgcggtaagtctgatgacgatttctaatgagttcattatgcttttttctacacaggcttattgggttggaagaacgattgcattgacgcttattgaaggaatctttttcctgttcttgtacacgctcccggttggagtagagtattacacgaaaaacacaaaatatattgcagttggcagcgttttgacagcggtgctgaatgttgtgctgaactacttcgggataaaatattttggctatgaggctgcggcatacacaacgttgatcagttatgtggttctgtttgtattacattggataattgctgacagaattttcaagctgaataaaattttcgatttaaaatggatgatgggcttggcattcgctgtaatggcctggggggctttttgcaaggggatgcagggggcctggtttgtccgctatagtgtgtatgtagtgcttgtggttgtggctggaagttattttaaggcggatattcttgcatatatcgaaaatataaaaagatgagtggaaaatatccaacggttgtcaagggggaatgtgcaatggctacctatgattcagtaaatgataagcgaaaaaaaaactgggctgtaaatgcactcagatataattggatgaaagcctttccaggaaagcggaattcgtcactttggctgttttcttcttgggaaggacaaaaatatgcagataacagtagatatctgtttgaatatatgctagcgaatcatccggaaatcacctgtatctggcagacaaggaatcaggccgtctttgatagtttgaaaaggcaaaacaagccggtgcagatgatagggaccctggaagctacaaaggcacaaaaagaagcaggtgttgttttttacacaaatggattggatgatttcggcgatttcccgcaaatatatggcgcgacggttgtgtcgttgtggcatggaattggctttaaaaagggctatagggaactgtatcatcagaccaataagctcaagaggatagtcagtgaccaaaaatggaactttttctcctgggtgaaacgagacataacggtggtgacatcggaagaatccaaaagacattttatcgatatttttgcattggataaaaaaagctctatattgattgcaggacaaccccggaacgatgtgtttgcagaaagtgtatctttacagagtgttctgaagaatacggatgttctaaagaaaatcggaaccaataaggtcgtactatatatgccgactttccgaaaaaaatccgaggcgctgatgagccagctggaagagctttggagtgcagattcgtttgaaagaatgctggaagaaaacaatgcggttttcttgacgaaattgcattatttgaatcggggaaaccttcagcagacgagcagaaaaattttacttaacgattcggacgtagttgatgtacagaagttaatgtgttgcgccgatatgttggtcacggattattctagttgtggaacggattacgctttgcaaaataaaccggttctgttttattttccggattggaaagagtatgacgcagataactgcatgcaagaaattgctcgagatgcatgcagcataaattgtgcaacgacagcggtggatctggaagataaaatcaaggcaacattgcttgatccgcagaatggaataaggcagagtgagaaattgaaccagttgtttgacggtacaggagtaaagtgcggagaatattccgaaaatgtttatcggaacgttatgaaattgctgagagttaatagataatgcggctttattgtgcaaacattaagcattcataatatgattattattgaatatggatttcgaggttcattactatttctgtgaaagtattatcgggttcaaaaatgtatgtgggggtaagctttagagagctgtgcaggtcgatgctgccgaaagcgcttctgcaaaggttgcgttgggagcattggacgttagtttatctgaatgcttagtgtttttctgatggactgcacaccagaaagacgttgacaataaaaattatagttaggagaagcttgtatgaagaatattgctttaattattgctggcggtgttggggctcgtatgggacaggatatcccgaaacagtttattaatgttcacgataaaccggttattatctatacgctagaaacttttcaaaaacatcctcaaattgatgcgattgaggtagtatgcctggacggttggcatgatgttttgagggcctatgccaaacagttcggcatttcaaaattggagaatgttgtgtctggaggacgaaatggacaagactccattcggaatggtctgtatgatatcgcagaacgctatagaagtgatgacgatgtcgtcttgattcatgatgcgattcgcccgatggtcagcgcagatgttattaccgataacattagagtatgtagacaatatgggaatgcgataactgtcgttccgtgcacggcagcaatgctgaaaacatatgactcgctgtctacggaagagcaagttccgcgtgataatcttaagattacgcagacaccacaggctttctttctgaaagatatttgcgaggcgcataaagaagcacttgataaaggaatcacaaactctgttgcatcttgtacaatgtatattgagttgggaaaaaaactgtatatgtctaaaggctcagaaaaaaacttgaaacttacaacttctgaggatattgaaatttttaaggcattattgatggctaagaaagatgagtggatgcattgatgtatgaagaaagtgtaaaaatgcttgcgagtcggctgaagctaagaaatacgtcaattttagtgacaggtgccacgggacttatcggatcatgcgtaatagatgtcttggccaaagcaaatgatgagtatggcgcaaatataaaaatatatgcactcagtagaagtaagaacaaaattgaaaaagattttgggacaagggttttcccggttgttcaggacattgttgattcgctggatgacaccattgagtatgattggattattcatggagcaagtaatgctgatcccaaaatgtatgcggtgcaaccagtagaaaccatacttaccaatatcatcggaacaaaaaatgttttagattactgtagagagcatcgaaaaactaagatgatattgacatcatcgtttgaggtttatggagaattgaaggggcaagatatctactcggaaaatatgagtggaataatagaccagacagttcttaggaatggttatccggaaagtaaacgatgctgtgagctactggtcagaagctatgttgatgaatatgatgtcaatgctgtaattgcaaggttgccgagtgtgtatggcccgacaatgttagcatctgatagtaaagcacatgcccagtttataagaaatgcattgaacggagaaaacattgtcttgaagagcaaaggtgatcagaaaagaacatattgctatgttgttgatgtcgtcagtgctttgtttgaacttttatatgcaggaaagagcggagaaatatataatatttcgaatgaaaattcagttgcgtcaattgctgaggttgcgagaatttgcgcagaaatagcaggaacaaaggtggtgtttgattctccggattcagtagaagcaaagggattttcaaagtctaagaattgcattttggatagtaaaaagttgcgagatcttgggtggaatggaagatattctcttagggatggacttgcggaaacattagagtgtatgaggagaaagtgaatatttatgctggaagatttgaagaagtctgtgtgtgatgcaaatcttgaattagtcagacggggtatggtcatttacacatggggtaatgttagtggcatatctgatgatagaagatatatggttattaaaccttctggtgttgattatgatgggatgacaccagaagatatggttgtagtcgatgttaaaactggattgaaagtggaaggaaaatggaatccttcttcggacacaaaaactcatttggaactttataaggcagttgatgagataaggggtgttgtccatacgcattcggtaaatgctgttgcttttgcacaggcaggcatgcccattccagctttgggaacgacccatgcggattatttctacggagatattcattgcacaagagaacttacacagcaggaagtaatggaagattacgaaaccaatacgggaaaggtaattatagaaaccattgagaatggaaaatatgatccgatggcgattcctggaattgtcgtaaaaaatcatggaccctttgcatggggaaaagaccctgcaaatgcagtttacaatgcggtcgttatggaaaaagttgcagagatggatttgaagacgttggcattaaacccgaatagtgcgatggctcagtatatgcttgataagcattatatgagaaagcacgggccgaacgcctattacggtcaaaaataagaatagattgtaatggtcatgtccatgcatggctacgctgcacgatatgctacctctccgtggtgagcagcaggcaacgagatttcctttcggctaaagtatatattcgttaaagcgttctttgaatgaggaaaaactataatgggaaagtattttgggactgatggtttccgtggtgaggctggaataactctgaccgccgaccacgcctacaaggttggccgcttccttggctggtattataacgccttgcgccagcgcaacggcaacaacgagcctgcccgcatcgtcattggcaaggacacccgccgcagctcgtacatgttcgagtacagccttgtggctggtctgaccgcttctggtgcagatgcctatttgctccatgttaccactactccatctgtggcgtacatcgcccgcgtggatgactttgattgcggtatcatgatctctgccagccacaacccgtattacgataacggcattaagctgatcgactgctacggcgagaagatgccagaggaaatcttgctgttagtcgaggattacattgacggaaagctccatgtgttcgataaggactggccggagctgcctttcgctcaccgggaacacattggctgcacggtggactatgtgtccggccgcaaccgctacatgggctatctgatcagccttggtatctattccttcaagggtgtcaaggttggcctggactgcgccaacggcagttcctggaacatcgctaaatctgtgttcgatgctctgggagctgatacctatgtcatcaatgcacagcccaacggtctgaacatcaacaacaatgctggttctacccatatcgagggtctgcagaagttcgtggttgaaaagggcctggacatcggttttgcctatgacggcgatgctgatcgttgcctgtgtgtggatgagaaggggaatgttattaccggcgaccacatcctgtacatctatggctgctacatgaaggagcgtggcaagctgctgaccaataccgtcgttaccacggtcatgtccaactttggtctgtataaggcttttgatgagaagggcatcagctacgccaagactgcagtgggtgacaagtacgtctatgagtacatggctaagaacggctgccgtatcggcggtgagcagagtggtcatattatcttcagcaagtacgccagtacgggtgatggtatcctgaccagtctgaaaatgatggaagtaatgcttgccaagaaactgcccatgagcaagctggctgagccgctgaagatctacccgcaggtgctggagaatgtccgtgtgaccgacaagaaagccgcacaggatgacgaagcagtgcaggcagcagtcaaggctgtggccgaagcacttggcgacactggtcgtattctcgtgcgtgagtctggcacggaaccggttgtgcgtgtgatggtggaagctcccgaccacgatacctgccagaagtatgtgtctcaggttgtggaagtcatcaaagccaaaggatacgcggtctgaacgcaaccttgatgtagcatacaggttgatgtatatttcacctgtgccattgaaaacttggtttcaaagggctatatttgagccgtgggaaatttctcacggttttgccgctcgaaactttgcacacctctacgtggtgagcggtaggcaacacaagtgattgtggctaaggatgcaaaggaatagtaaaaaaataaagatgatactatggaagagaatataaattcgagcaataaagagaaaatgcataagtccaagacaaaaccggccattggatggtttttgctaggcacagcgattttgttcataggagtggcgttgctggtacatattttttctccgaaaattgattcgctgataacagcagatggaatgttgtcatatgttatttcgtgtatatcatcagcggctacagttggattggcttatgttgcgtatcggcaaacagagcgagctaattccatggcagaaatgatgaccgaacagtcaaatttaatagcaagacaggcaaatgagctgacagaaaagtcggataagacagcccaaaaggcaaatgaactgtcccaacaggccaatgcattatctgaacgagtgactctgttggaagaaagccgatataaaatggaagttagaccattcgttcttgttactaattgggaggtgaaaacgggcagaccggatggagataatataatatcctatcaaatggctgactgtgatgcaaatgacacagtttcaattgttcttgagttgacaaatacaacacagtgctttgagatagtgcagtacaaagaggctgaaacagcatcggaaaatgataagacacctacaaaatggggactctctgtggtaaacagaaatagtatttcgataggtattccatcgggtgagagtcgaaaagtctgcttctatgccaataaaaagttctttgcaaaaacagagggacatgacattgacatccaatttatattgataaatagatttggagatcgatttaacgagagtatgaaattgtgtgttatgaggttgaattgggaaagaggagattgtatgatttttcctcaaaactataaagtacaggaatatgcaaaaaaccataaaacattgttagagtagattcttttcgctcgaataaatagctgcgtggataactaatgtaaaagagctgaatatatagactcagattggtctgataaatattcaaaattcggtcagtaaatctgttttctgggagaatattaccatcctatttccgtagtactatactaacctaaaatcatacataatcctatcggtatcattatccatatgccccatcccgatggtggcaagaacagtgccactacttctgctgtcatccggtatgacggcagatgagattctcgaaaggctgaaataaagtaatatgccgtgtggactgtgaattccagaagttcacacggcgtatttttgagcacgatatatagtttgtgacggaaataaaaatggagtgtgagcaaaatgaacttacaatgtatgggaattgcgatgatgaaaatatgcgtaaatagaaggcgaattttaataatcctgttgattttaagtattggaatattgacactgctgggaataagtaaatactcttttcagaaagcctgcctgagaagagaaattcgatggccagatttaggaattgctgatgactggcagtatgaaattcttacagaagcatataaaataaaaaatgagccaaatagaaaaattacaattacggcatctgatggagtacaattagttggtcactattatgaaagaaagaaaaatgcgccagtcataatcttttttcatgggctttggagtaattgttatacgaatagtgcgccaatctatagaataacagaagaaaaagaatggaatcttctgttggtgaacttacgagcgcacaatgaaagtggaggtgacgtttcaacacttggcgttttagaaagatacgactgtcgtgattgggcaaattgggtggattttgaatttggagaacaggtacctatattccttatgggaatttccatgggaggagcggtagcagtgatgagtagtgatttagaattgccggaatcagtttgtggaattattgatgatgctgggtttacatcaccattagaaatgataaaaataggcagtaaagagaagcttcgttttgaattattgacagatttattcgctcggatagtgaatgcaggaacaaaaatttggggcggatttgacttgaaagaagcaaacgcatgtgccgcagtgtctaagacaagtgtgccagttctaattattcatggagacaaggataagaaagcaccggtatctatggcgtataaaatttacaatagttgcaaaagtgaaagagagttgtacatagtttctggggcagagcatactggatgctatagaacagatcctgaaaaatacaaaatgattgtttctgaatttattgaaaaacatattccacaatgaagaaagaataatttatgtttttagaataataaaaaaaacatctgaagaatacgacggtggattcttatattcggtttgtcagataataaactatcaacgggggaggtgtccagctatgaatgacttgtttttacatgattctctggatacatcccctgttgttttttcagaccgcattctctacaccccgacgtcttttgcgaagactgcccttttatacttgcaggagatcgggagtttgcaggcaaagaagccgcatacttcctcgcgtactcacttgtcttcgtatttgtttttctgtgtcaattccggttctggcgagctggagtatcagagaaagaaatataagctaggtaggggggactgcgtgttcatcgattgccagcaaccgtattcccatagtacagataaagatctgtggtcgttgtcgtggattcacttttccggtgtgactatgcaggacatctacaggaaatatcaagaacgcggaggttgcccagtattccatccggagaatattaccgcatttacagaactgcataagtccctttttacgcttacctcgtcagatgattacatccgggatatgcggattaacagcggtttaa

SEQ ID NO: 217 - DNA, 7299 bp, unidentified
  source 1..7299: mol_type = unassigned DNA
gtgttgcgattggataaatggcttgccgagatgacagaaggcagtcgtgctgaagtgaagaagtggatacgacagggtagagtgtatgtaaatgagacaaaggtgcagcgtccggaaaccaagttggatccggacagagatcaagtgaccttagacggtgagcagatcatatacgagcagttttgttattatatgctgaataaacctgccggtgttgtttctgcaacaacagatagagagcataaaacggtaatagatctgttacaggaagctaatacacaagatgttttccctgtgggcaggttggacattgatacggaaggattgctgctgctgacgaatgatggtgccttagcacatgagcttctttcgccgcgtaagcatgttgataaaacatattttgtgcggatcgccggtaatttgtccgatgcagatgtgaagcagctagagcagggaatggatatcggtgatgagaagctgacgctgccggcgaaagtatcttgtttggagcagttcccagaggaacaggagcagacggttatgataaaacttcgtgaaggccgttaccatcaggtaaagcgtatgtttgctaaagtagggcatccggtattgtacttacagagagtgagcatggggacgcttaccttggatgactctctgaagacaggagagtaccggaaactgacagccgatgaaattgcagcattaaagcgatgaggactattatccaagtaaacagaataagtatttcatgataaaagcgctggaaccggccgttggtcgattctagcgctttttgctttgatagaacatgccaccatgaattttgtcgattgtttttatggcactaaccaatccgccgcctcgttggtttgtagttagtgtatgaagtttgattatattatataaatgccttgtcaaaaatattttcaatttctcatccattatatttcgggaaaatcatgggaaaactacaatagaaaaactacagtggtggatcgaaaaagcttgatagagcatgtaaaaaattacttgctttttgaggaaaattgtgataacatatacggcagtgagtttcttaggaaaccgcagtgctgaaatagctcagttggtagagcacttcactcgtaatgaaggggtcgtcggttcgagtccgattttcagctttacataaatccttgaaaattatatgtattttcaaggatttttatattattcaaactttgcggaggttgtgttatataacgacaaaggggggcgttatggacaaaacgattgctattgttacgggagcatcaggaggtcttggcagagaatttgtcaagatactatccaaagaaaagaaactttctgaaatctgggtagttgcccggaatgcgcagaaattgcaacaactggctgaagaatttggcactaaaatacgaccgattgccaaggatctaagtgataatgttcagaggaaagagctcagtgcaatgattgcagaagagcgtgcagcgatacagtatcttatcaataatgcaggttatgctaaattttgttcttatgatgatctgagtgtggaggaatccattaatatgatcaatcttaatattagtgcggtagttgcgctgggactgtattgtattccgtatatgaaaccgggtagccacattattaatattgcttcccaagcgtcgtttcagccgcttccgtatcaaaatatttacagttctaccaaagcttttgtccgcaattatacacgagcattgaatgtggaactgaaggacagacatattacggcaacggcggtgtgtccgggatggatcgataccggtctttatgagagaggattgatcggtgcgaaaaaggcagcgagcaattttgccgggatggtacagccggatgtggttgcggctagggcgatgcgggatgcacgccgaggaaaagatatttccgtatacggagcacatgtgaaaggtgcacattttgccagtaagctgcttccacaaaaagtaatgatgaaattatggttgaaacagcagcatttaaaatagcaacgaagcaataccggcacagatagatggaaagcgggtgatgtggcatggcaggaacgattgttcatctagcggttgcaacacagttggatcaattattggccaatgaaccggagcggtacttgggaaagatggcagataaatattgttcgaacgatttttttgcgggaaatatatgtcccgatggaattatggcacgtgaagggtactgtcgagagatgaaactgcatacgcacatgagagacggaataccggatggaacctttcagcaaccggaacatttacagttatttcgaaagcgtttgtcggatttttttgcaaaacataataacaaagaagaacgcttcagtttgtatttaggttatctgacacatatgcttaccgatgagaaatttatattagaaattcatccatatgtattgcagcggattgccgtgaccggttatgatcgagataatccgcaaacctacgtgaaatttggacgtgatgtagatcagatcgattttcgtcttgtgaaagagtttccggggatcgataaggcatatcaagcgttgtgtcaagtaacaccatatgaaatagcagattatattaccgaacaggaattaactgcaagtcgggaatggatcaaaagttattttttcgaaacagaacataccatagaggatccgatatttttgccgtatcaggagatgtatcaatttataccggaggctgtgtcgcagatctgtgacagactgccagagtatatcacgtctagtgtataaatgataggtcttagaaatcgcgtagaagatttacggatgagtttttatttcatcaaaaaagagggtgccacacgtttgtgtgacaccctctctacttatttcaaaaggataattcaattaagtattatacacaaccctgagccttcattgcctctgcaaccttaaggaaaccagcaatgttagcaccagccatgtagttgccttccataccatattctttggaagcctcatcacaagacttgaagatctctttcatgatatcatgaagtttgttatcgacctcttcgaatgtccaagacaatctctgagagttctgtgtcatctcaagaccggatgtagcaacaccacctgcgttagcagccttagccggaccatagagcatgttgtttgcaaagtaaacatcaattgcttctggagtagaaggcatgttagcaccctctgcaactgcatagcagccgttagcagctaatgccttagcactttctgcatcaatctcgttctgagtagcacatggaagagcaatatcacatttgattgtccagataccactgcatccctcagtataagtaacattcttatgagatgttctggcagcgtactctttgatacgtccacgctcaacctctttgatctgttttacgagatcaagctcgattccatccggatcatgaatgtatcctgaagaatcagaaagagcaacaactttagcaccaaattctgtagctttctcagtagcataaatggctacgttaccagaaccggagattacaacggtctgatccttgaagctcttaccatttgcttttaacatttcatttgtgaagtagcaaagaccataaccggtagcttctgtacgagcaagagaaccaccgaaagttaatcccttacctgtcaatacaccagaccactcattacggattctcttgtactgaccaaacatgtaaccaacttcacgagcaccggttccgatatcaccagcaggaacatcacagtcaggaccgatatgtttgcaaagctctgtcatgaaactctggcagaaacgcataacttctccatcgctcttgcccttaggatcgaagtcagaaccacctttgccaccacccataggaagtgttgttaagctgtttttgaaaatctgctcaaatccgaggaatttgatgataccgctgtatacggatggatgaagacgaagtccgcccttatatggtccgatagcagagttaaactgaatacggaaaccacggtttacctgtgtcttgccattatcatcaacccaaggcacacggaaaataatctgtctctcaggctcaacgatacgctcgaaaacaccagcctcaacgaggtcaggtcttctttcaacaactggttccaaagaggtaaatacctccataactgcctgaatgaactctggttcaccagcgtttctcttttttactgtttccagtaagtcaattaaatactgattctttaacgccattgctaaaaaacctccttatgtttagtgtttggtatacaaggataccagcctgacgtgtttatcacgttactaccttcttagtatggcacaaaaaccgtagaaattcaataaaaaaatgaaaaaacaattgaaaaataaatatagtatacaattatacaaaatttttaaaggtgtgagcataatttgaatgacatatttttgacatgttaatataatataatgtaagaattaaaagtataaattgtgtttgtgctcgagggggcgggaattttgttaaggagatgaagattttcgtaaatttccgatttgattagcacctaaatgacatttaatagaacaggaatattacaaaaatgcagtaggaaaagtgcaaaaatactatatactgtataaaataataaaaaatatgtcgaaaatcagaaaaaacgtttacgaaacagacacactttggacacatatgctcgttataataggtttcagaaagtgaaaactttctactcccaccctattatacgctgggtagtgcgagctacccgacaagaagagccttcccgggctcttcttgttttttaaataaaatttcgttataattaagtatgtgcttgtatacaaacttcccacatcggaagttattgcaaaaccacatattacttattatgtcaatgactatatagcattttgcagccgtcaaagagtggtttctgccatcagagaactatagtaattgccttgccgcattttgtttttacagtgatttctaaattttgttgtctctgatggatgatttacatgccttacagaaaactcgatgtcccggaagcaaggtattcatcatttttgaaagggactttgcgctcgtcgttacttatgtctcgtatttcagagacattaagtaacgtgacgtagcgcatcgtagcgaaagcgtcccgtccaaaaatggatgataccttgctaaaccgggacatctcagacattctttcaggcatgtatacatcagagacttaacaaaataagaaatcacgtaaaaacattgcgttctgtggcaattatcttagttctctgatagcagaacaatttaatgtattggctgcaaaatagtatattcattgctgacataataagtaatatgtggttgtgtgaaatgttgagttatggtaggtttgagtaaataagaatttataggaaaggatagtaatagaattttatgtggaaatatattttatttgatttagatggaacaattacgaactccggagagggaatcatgaattgtatccgatatgcgttagaacagatggggcgcgagataccggcggaacagactctgcgcaaatttgtcggacctccgttggtggttggattccgtgagtatactgatttaacggaagaagaggcgaagactgctacggcaaagtaccgggagcgttatcagtcggaaggtctgtttgaggcatatgtgtatgaagggtttgaagctgttttaaaatatttgaaaaaaacgcaggtaaaaatagcggtagcaacttcaaaaccggaagaatatacagaacgtattttggaacactttcatcttaaagaatattttgatgtgattgctggagatacgttgaaaggggatcgtggttccaaacaggctgttgtagaagaagcattgcgtagattaaatgtaactgagcaggataagggtacagtattaatggttggtgatcgtaaatacgatgtcattggagcaaaatcctgtggtatccgttctttaggtgtttattatggttatgcggaaaccggagaattagaagaggctggtgcagattatgtagtacgcactacggcagatatgcttgaatggtttgaacaacaaattccggaaacaccgtgtcaggcaatgtcagatgtcgataatacacagcagcctgcatcaagtcaaatatcttcttataataggaagattggcaaaaagtggacggcaattgccggtggaatgcttattcttgggattgctttgggagtcggtggcacattactcgtacaaaagcagccttggagcaagataacacaggagaataccggggctgactatgatgcaaacaaatgtgtgcgtcttggtgattataaaggaattaaagtatctttagcggttactgatgacgatgtacagcaggagatcgacggtctgatacaggataatgtcacgtatgaacagaaaaagggtaccgtacaggaagatgacaaaatatacgctaaatttaatggctatattgatggcaaaaaggtagatgatacttgcggagaagaggttatagagcttggatctgaccaatttgtaaaaggatttgaaagtgcttttgtaggagccaagaccggcaagcagatcacttttaagatcaatattccaaagggaacttatggagatgataccattgacggtaaggaagttacctttaaggctacggtaaaatatatctgtggagatgaaatcgtcccgacctggaatgataaatttgtgcagtcgatttcggattttaagacagcaaaagagtatgaagctgatattcgcacggagctagcaaaagaaaatgagaataataagcaggattttgcatggacagaagttcttgaaaatgcaaaagtaaaaaaatatccggaagaattattagaagatgccaagcaggaagtgctgcaggggtattatgatatggcggatatgtacggtatgagccatgacgaaatttttcagtcctggggcagcgaaaatgaagaagactttgtcaaaaatgagttggacgaacaggcgaagcaggctgtcaaagaaaaattggtcgttgaagcaattgcaaaagcagaggggattaattattcggacaaggaatataaagacctggtggcagaggaatatcagtataacactgaaaaatatgattctgaagcagaatatgagaagaagaatcgagaaagcttaaaggataatgcgttgagtagtgctgtacagaaatggatcgcaaagcatgcaacgttttcaaaataa

SEQ ID NO: 218 - DNA, 39958 bp, unidentified
  source 1..39958: mol_type = unassigned DNA
  misc_difference 13515: note = a, c, g, or t
  misc_difference 13516: note = a, c, g, or t
  misc_difference 13517: note = a, c, g, or t
  misc_difference 13518: note = a, c, g, or t
  misc_difference 13519: note = a, c, g, or t
  misc_difference 13520: note = a, c, g, or t
  misc_difference 13521: note = a, c, g, or t
  misc_difference 13522: note = a, c, g, or t
  misc_difference 13523: note = a, c, g, or t
  misc_difference 13524: note = a, c, g, or t
acggtggagttttgtgtttagtatcaaattaaattcaaaaaacttactcttcttcgggatatttcatgccccagcttttgcggatgtcggtcatgattttcataacatcctttgtgtagtcaaggtgcataagagccgtgtcgccctctatcgccttttccatatcttcaacctcataaagcaaagcgtcctttgtctgacctgccgagattgtttcacaatggccgtcagccgtgtatgtaatctttgcctccatacctctgggatattcaaagatttcaacataacccttgtcaaacgaaattgtgccacgctttggctgttttgcgtgaagcgaaagaatgacagttgccatttcctcctctttattctttaaaagaatactcgcctgttcgtcaacacctgtttcggcatatttaacctgcgacaacacatcgtttgggcatgagctcataaacatacgaacaaacgaaagtgcatacacgccgatgtcaagcattgcaccgcctgcaagattgcggttgaaaaatcggttgttcatattgtactctttgtaactgccgaaattcatctgaataagcctaagctcgccaaggtcacctgaatttaccttttcaagaagtgccttgtaaatcggcatatggaaaattgtcattgcctctgcaagcacaacatggtttttctctgcaagagagattgcctcgtcaagttcatctgaattgagcgttatcgacttttcgcacaaaacatgctttcctgccgcaagagccttgcgaagatattttatatgcgtgttgtgcggtgtggaaatgtaaattatgtcaacattttcgtctttaaacagctcgtcaatatcgttgtaaaccttttcaatgccgtacttttcggcaaatgcaaccgccttttcgtgggtacggtttgcaacggaataaagtttctgtcctctgcttttgagtgcggctgcaagctcatttgcgataactccgcaaccgagtgttgcccagttgtagtttttcataaaaacacctccgtatatttttcgagaaaagtttaacacacggaaatgcgtctgtcaacggtattagatggcttttctcgtatctgctccgtactttttcataatcttgcgaagttcgttattttcgctttttgaaagactaaaatacataaatccgtgcttgactgtttcatcaccgtcacacgcaggcatatatgtattacagcctattcttattgatgccttttcggaaaaaccgcacgagggtgaatcaaaatatgcggatttgccctcaaacattttcttcacggtttcggcatcttcgacagacatcttagcgtcaaccttgtcgcagtactcaacatcaaaatacacggtaggctcacacgcatagaaactgattttcggcacggcaaatactgcggcggcaacgcataaaacaactgcaaccacaattacagcaatctttttcttcataacattcactccttttcgcttatccctttaaaaatatattatattaattatattaagcttgtatcataattgtatcattattaatcggcatatacaccaattttaaaatcatttatttgtaggttaaaaaatttttcgtcaatgcttacaagagagcaattttactttcgttgaagaggcacaaattgcatacaaattcaaagccttgcttattgagaaaaatcggtctgaaaatatgcagaaaagcagtttttaccatattataaaggcataaaaagaagaattttgacgaggtagttattgtaactaaaattgtgagcaaagtaaactttatgtttataaggtattttgcttgtttatttcaggcaacaggattacaataattgtggaaaatggaaaagaatggtatcgtttacaaagattatgtgattgaagaggttagaaattaatggagaaagtcaaaaaaatgctctcacttgcgtttgcaagtctgtttagaagaaacaaagatcagaatactgtaaaagaaaagcgacggcgctcacaccagataaatatgctggaaggtccgctcgtaaaaaaaattcttcttttcacacttccgcttgcaggatccagtattcttcaacagcttttcaactcaaccgatgttgcggtggtcggcagattttcaagcagtcaggcacttgccgcagtcggaagcaacgctccgctcatcaatatgcttgtgctgttattcacgggactttcggtcggcgcaaatgttttgattgcacgatatatcggtcaaaatgaccgtaaaaaggtttcggaagctgttcacacggtaataacactttcactcatatgcggatttcttcttctgatactcggtcaggttattgcagcaccgctgttaaggttgatgaacacaccggatgatgtaattgaccttgcggcaacatacctaagaatttactttatgggcatgccgtttgtaatgctctacaactttggttcggcaattttgagaagtgtcggcgacacaagccgtccgctctactgtcttgtaatttcaggtattgtaaatgttcttttgaacctcttctttgtaatcgtctgcgatatgagcgttgcaggagtcggcattgcaacagtaattgccgacggcataagcgccggacttgttatgatgttcctcatcagaaacgaagacgagtcaatcagagtcaatccaaaaaaactttcattcaagaaagaacatctcattatgattttgaaaatcggtgctcctgcaggtattcagggtatggttttctcaatttcaaatgtattcattcagacagccataaacggcttcggttcacaggcggttgcaggctcatcggctgaactcaactttgagtacattacatactatatagtaagtgcgttcagccagacagccgttacattcacaagtcagaactacggcgcacttcaatttgacagatgcaaaaaggtgtttagactttgtatgcttttcagctgtattttcacaggctgtgtgagcgttatattcatgctcggaagcggatttttcatcaccttcttcacaaccgaccccaccgttatcaagtacgcaatcatcagaatggcgattgttatgctccttgaacttatgacaggttcatacgaaatcagcggcggtgcgctcagaggaatcggacattcactcctccctgcaatcctcacaatcttcggttctgttgtgttcagaatcatctggctcttcacggtattcaaggcattccacacctatgatatgcttcttatggtttaccccgtttcatggcttatcacaggcacatccgttttgattgcctacttcatcatcagaaaaagagaattcaaaaaggtaagcgccgcttttgaaatttaaaatcaaataggtttttatggctgacatcggcattggtgtcagctgtttttgtttagaagaggctctaaaattaaaaaaataataaaaagcaattatttcgtactttttgtgcggaataattgtttttttgctgtgttttatgttataatccaattataaacacacggaggtgcgacaatgactaaacggactgttgccaacaattttttatactacattttttgcggattcagcggtgcggttacttcgctgatagtatggctgtttctaaaacttatgggtttgggaatcggtctcgtgtgggatacaattccgtcaaattttgatttcaaattttatccgattatcgtctgtacggctggcggacttatcctcggaatatggcaaaagctgacaaatgccgttcccgatgaacttgacgaggttatgaaaaaggtaaaaaaagataaattttacccgtataacaaggtgcttttgctctgcatttcggcacttttaccccttgttttcggcggaagtcttggccccgaggcaggtttgacaggcgttatcgtgggactttgctactgggcaggaagtcatatgaaagacgctaaaagtaaaattcccgaactaatgcaaatcggcataagcgcaaccttgagtgcggtattctacgcaccgcttttcggtcttgcatcggtcaatgaagaaaggcttgacagcgaagaaaagcctaccgatatccgttcaacaaagctaatttcaaacatcattgccgtactttttgcggcgggaactctgtttttgcttaactccgttttcggcggaagtatgggacttccacgacttggcggttataacattacaaattttgagcgtttgtggggaattcctctcgcacttttgggcgctgtatgcggttttctgtttatcatatcttcaaagattttcggaaaatttttcgcactcattcagggcaagctcggcattattatcagcacaactctcggcggaattatcctcggtgttatgggtacatacctccccctcacaatgttttcgggcgaagaaagcattaccgttgtcaaggaaagctttgccgaatttgcaccgtggattctcattatcagcggtgtgctgaaacttattctcacaaacatctgcataaagtcgggttggaaaggcggtcacttcttccccgtcatcttctgcggagtgagcatcggctacggtgttgcaatgctcggcggacttgacacggcattttgtgcggcagtcgtaacggcaggacttctcggtgtcacaatgaaaaaaccgcttgccgtaacaatgcttcttttgctctgctttgacgcaagagttattccgtggattttgctcgccgcatttctcggaagcattattccgactaaaattttcggcagtaataaaaagaaagctaagtgagtatataaaaaactgccttgcgaaccaccgtttcctttggaacgcattgaaaaaatggccgctcttatgggtggcgacggttcgattaaataaaaccaagaaatccgtgttgtaaccatgcaacacggatttttatataaagaacaacctccccgtaagctgaaatgctttgcggggaggttgtattattattatatggaattttattttacttgcggataattattgctttgccgttacaatgaatctttccgtttgaaaccgtaactgtttcaccgctgatttcatttttatagtcgccgtcggggaggtcaacttttacacctgccgactttgatttaaggctgaaaatgccgacttttttgctcttgttgttgtcacgctcaagaattgcaatatcgttttcatcgtctgcatcagccttgaaataatcgtcatcatcaagaacggttttcttgattgtatcaagctttgcaaaaaggttgcttaaatcaatgcctgtgttgcgtgggaaaacatccttgtcaaaaaggcttggagtttcgtcacaaccaaactcctgacctgcatagatgagggttgaacccttcaagaaatacagaaaagcggtgtaattttcaaggtcgctcttttccttaacatagtggcaaattcggggctgatcgtggttttcaaggcaacgcattttatcgtaattctgcggataaattgcctcctgataattgaacatatcaagataatgtgaaagagatgtttcgcccttcaaatatttgtcgaaaacttcacggatatcgtagtcatattccatatcaaaagcatcaaaaagctcatagtcgcttgcggtataaattccgctcttgcgagagaacacattgaaagagctgtgtacgctttcggcaagccaaatgcagtcgggatttacctttgcaacagcctctctcgcctgtttccaaaattcaacgggaacgaatgatgcaacatcgcaacggaagccgtcaacaattctcgcccacataacgagtgaatcaatctgatactgccataattctttgttagaataatcaaggtcgattatgtcgctccaatcaccgactttgttgccaaaattgccgtccgactttctgtagaaaaactcgggatgttcaaccgaaagatttgagtcgggcgaagtgtggttatagacaacatcaatgatgcacttcatgccctttgcgtgaattttttcaacaaggctcttgaaatcgtccattgtgccgtattcgggatttgttgtgcgatagtccttgtttgcataaggacagccgagagagccttttttattcttgacgccaatcggatgaatcggcataaaccaaatgatgtccgtgccgagtgactttattcggtcaagatcctctgcaacggcattaaatgtgccgtcatttgtgtgattacggacataaatcgaataaataaccttgtttctcaagctgatttcagtattttttgccatttaaaacatctccttatgtatttttccacggtctgtttttaccgttccaacctcgttctgcccagtaatttttatcggcttcattccagccgcttttctgaatcattctcataataaagaaaaagccttttgtttttaaacctgccttaactttgccgttatttttctttaccttattagcaattgaggtagtctttttttcaattttctttttgagttcatcggtgacgcctgaataatttgttgcacgaacattgacaccgtaacgataagtttttggaacgccccaaaagaacatactgtcggcgatatccttgttggcagattttgtacccgaacctgcggctgtcgaaattacaaccgcctgctttgtgaacattttctgttcgggacggtgaaccatccaacgataaccgtaatgatcaagaaatgctttcattgagcctgtgcaatgataaacatacacgggcgttgtaaagatgagtacatcagcctcgtccatagcctcggtaatctttttcagttgctcataatgcggacaaagtgtttcggattttagaaaacactgcgtacaacctacgcaaaaattgccgaaatctctcggaagaaaaaactccgtaacctcgccgcctaatttatcggcaacctgcttgccaatatgataggttgagcctttatggttctgaccgtttattactgcaattttcattttatgtcaccaaattcatcaatttcaagtcaattttagcacaacaaagcaatattgtccatatgatttttatgccttttaagagcatttttatgcggattttttactcttataaaagacaaaaagcacctgccctctgacagatgcttaatcatcataattatcattctcatcaatctttaaaggagcatctaccataaacggaatttttcgctcacgaagtgctttttttgcgtaaatcataaaaaaggtggtcagattcatacccatttcagcacacatttcgtcaagttcttttttagtattgtcatcaaaacgaagacttactgttgtcatatcaatcaactcctttcactgcttatattatatgataaaagaattaattttgcaatagtttaaagcaagtttaattaaaactctttcatttatcagtcattttgaagtagaaaacagctccctgaaaacagggagctgtgataagtacaaatagatttgtcaaacgaatcagaagtcaatttctgtatcgtagtagcaagccttgagaagtttttccatttcttcctgatttggctggcgtgggttagaacctgtgcaggcatcggcaattgcgttcttggcaacttcggggagcttttcgaggaattctttttcgtcgataatgctctcgtcagccttaacgccgcccggaccgtagttcttaatgccctgcggaatgttgagctgatcgttcattgaacggagttcagcgatgagtgcgtcaacaagttcttctgttgtttcgcccttgaggttgatgaatttagcaatcttagcataacgctcagctgcaacaggatcttttgagttatacttgataaccttaggaagatacatagcgtttgcacagccgtgaataatgtgaccgcctgtgaaagccgcacctgtcttgtgagccattgagtgaacgataccgagcagagcatttgagaatgccatacctgcaaggcactgtgcatcgtgcattttatcacggcaagccatgtcgccctcataagacttcttgaggttgtcgtgaataagctcaattgcgtggagtgcaagcggatctgtgtactcacagttgagagttgaaacataagcttcaattgcgtgagtcatagcgtccatacctgtgtgagcagtaagtttagccggcattgtttcggcaagtgcaggatcaacgatagcaacatcaggtgtgatattaaagtcagcaagcggatatttgataccctttgcatagtctgtgataactgagaaagccgtaacttctgttgcagtacccgatgttgacgggatagcgcagaatttagcttttgtacgaagtgtcgggaaactgaacggagtgatgatttcctcaaaggttgtgttgggatactcatagaatacccacatagcctttgcggcatcaatcggagaaccgccgcccattgcaacaatccagtcgggttcaaattcacgcataacagcggcacccttcataactgtttcaacagatgggtcaggctctacgccctcgataagcttaacctccatacctgcttctttaagatagtcaacagccttgtcaagaaaaccgaaacgcttcattgaaccgccgccgacaactacaacagcctttttgccggataaatttttaagacttgagagagcatccttaccatgatagagatctctcggtaaagtaaatctgtacattttaattacctcctgaaaggatattttgtcaacttctccttgactaccgtaattataacaccgaagatttataaagtaaataccttttttgaaaataatgtgtgtttattttgtgaaattttcactatagttctttattggaatttataccatgaaatatgctcagttacagcccgtaaatgttgtcatcgcccttggcatatttcttaacagcctccataaaaagctttgcggcaggatttgaaatattctttccccatgccataacataggctatgcttgtgtccgcatcatcaataaggtatgaatcggtgtattcgttagaagtgtatgcggcaaccgaggttggtatgacagacacgccgattcccgatgacgatgacacatatatggaaacaagatcgtcaaatgaattactgattttaggagtaatgtgaaatgtgcgaaacaagtccataatttccatatacacaatcggtgcaaccgactccgaaagtaccagaatactttcgtcagccaattcggaaagcttaacgctttttcttccgctgaattttgaatttttcgctgttacaacggacaaagtttcattatgtgtaatgattgattcaatacctgagctttcgggaaccatatctctcggcataaagcagaagtcgtattcaccgcctgtgattgcaagtgtgcggtcagcctcgtcaagctgtcgcacatcaattgtaattcccggatatttttccgcaaagtcggcaatacattttgtcgggaacgaaagcgaggtaacatcacagccgagcgtaattttaccctgacctccgtcatgcatctgcttgataacggtttttgctttctttaaagtttcaacaatttcaatcgcatagggcaaaagtgccttgccctcgcttgttatgataacatcacggtgagagcgtgtaaaaagctgaaccccaaactccttttcaaggtcgcttacatatctgctgacggttgactgagaaacatagttccgccttgccgcctctgaaaagttgagcgtctgagccacagttataaagcaattgagctgatttatatccataataacctccgttttgacaatttcccacagtattttgttggtttttttcaatattatgcaaaactgtaaatttaagactgtcaaatcgtcatttttgcataatcaacggtattgaataatttttccatatttggtacaattcaagtatagcataataatatgcaaaatgtaaataacttattttaaaacaaggagcttaacgaatgaagaaaatagttgtaaccggtatgggtgcggtaacacctgtcggcatcggtgttgaaaactactggaataatatcacggcaggtgcatcgggcattgacacaattaagacttttgatccgtctgaactcgctgttcagattgccggcgaagtaaagaactttaatccgtccgactatcttccaaaagatttaatcagaaaaacagatccgtttatgcagtacgcttatattgcggctgaggaagccatgaaacagagcggaatcaagattgaacccgaaagaacgggtattgttatgggtactgcaatggcaggtattgcaacaatcgcatatactcaggaggcactcacaggcgcatcacacaaaaaggtaggtcctcgttttattcccaaaattctcggaaacattgccgccgcaaatatcgcaatcgactacaatattcagggaccgagctttacggtaagcacagcttgttcgtcaggcggtgacgcaatcaacacagcttgtatgtgtatgcagagcggcaaggctgatattatgctcgcagtaggagcagagtccgttctctgtcctcttgtaatttattcgcttgccaacgcaaaagctctttcaagaagaaacgattcgccaagcactgcaagccgtccgtttgatgttacccgtgacggttttgtaataggtgaaggcggcggtgcgctcgttcttgaaacagaggaacacgctcttgcaagaggtgcgaagatttatgcagaaatcagaggttgcggcaacacggatgacgcttaccatgtaactgctccgcatcccgaaggacgaggtgcaatcgcttgtatgaaacaggcaattgcagaggcaggaatcaatccttccgacatcggctacatcaatgctcacggtactgcaacaaacaagggtgacacagttgaaacatcttcaatcaagaaggttttcggcaacactctcccctatgtaagctcaacaaagggcgcaacaggtcatatgatgggtgcaggcggtattacagaaacaattacctgtgtcaaggctattgaaacaggcacagttccgcctacaatcaatctcaacgaggttgatcccgaatgtgccggaattgactttgttgcaaatactgcaaaaaaagccgaaatcaactttgccatgtcaaacgcattcggattcggcggtcagaactcaagtattatcgtaggcaaatacggcaaataatctgccgacaaacatacaagcaacacacatatgtgtgtataaaataatgtacacccatacataataggacagggggatattatgaatttaacatatgattcacagatgttcagagaaacatttgaaagtgaatttacatggcttaacggctttatgagaaatgtaagacgcttttcggataagcctgccgcaattgatcctcagagcggcagaacatggagctacaaagagcttaatgccgatgcaaacagatttgcaaacgctatgaaaaaagacggcgtcaagaaaaacgacatcgtgtttatgcagctttacaactcaccgcagtttttgttcggttatattgcgccgcagaaactcggtgcaatctcaaatcccgccaactttaacctatcaccgggcgaaaccgcagaaattatgggacacaacaagcctgttgtttatgtttatgatgcagacattatgcaaacagccgtacaggctcttgaaatctgcgagcataagccaaaattgattctctgcgttaataattccaaaaaggaagtaactcttcccgaaggacatattttctttgacgattacatcaaggacagcagttacgaaaatccgcctgttgactatgcaccgcatatttatgacgaggttttaagacttcagacctcgggtacaacaggcactccaaagggcgttccgcttaacgcaatcaacgaagttctttcggctcacgatgtaattatgcactttccgctctcacccgttgacattacgatgaatatgacgccgtggtttcaccgtggcggtattcattcgggcggtcccacacctaccctttatgcaggtgcgtgtcttgtgattatgagaacattcaacccgagaagctgcatggactttatcgaaaaatacggcattacattcatcacaggtgttccgtcaactcttgagatgcttgcaaaccgtcaggaaaaacatcagaaaaacctttcttcgctcaagggcattattaccatgggcagtccgcttgaaaaagccgcttgcattcgctatcaggagcttctctcccccaacatttttaacggctacggcacaacggaatctttctggaatacatttcttcgtccgtatgaccttcctgaaatggcaggttcggcaggcagatcatgcacagatgatgaggtaagacttgtaaatgtttatgacgacagaaaagcagagcccgatgacacagtcccctgcgataacaaaacagagggagaaatcatcatcaaatgtccgaacaaaactacctactgctatgtaaataacgaaaaggctacaaaagacaagttctacaagggttggatgtacacaggcgacatcggcacttggaacagcgagcagtttgttacagttgcaggcagaaaagatgatatgattatcagcaagggcgaaaatatttatcctgcaagaattgaggaaattctcaactcacacccgaaagttcaggaatgtatcgttacaggtgttcccgattcaacaagaggcgagtgcgttgcggcatatgtaatcaaggccgacgaaagtcttacggttgcagagcttattgacttctgcgacagctcaccgaatatttcaaaatatcaggctccgagatactaccgttttgtcaacgatcttccgcagactgcaacaggcaagaaacagcattttgtaataaaaaagcaggcagcagaggaccttaaaaacggtttgttgcttaaaaaataattacggattttccgaatatatgtaaaggagaaaatatgaccgagaaattatacaaagcaaaggtttcatactatgaaacagactgtatgaacattgttcatcactcaaattttatcagatattttgaagatgcaagaattcagtatatgcacgacatcggttgtgatgttgccgaaatgcagtcaaaaggattatatattccaaatgttgacgcatatgcccgttacaaaaagccgcttaaattcggcgatgagtattccgttgaagtaagccttgtattttttacgggttcaagaatgatttttgactataaactcttcaacaataaaaacggagaactttctgcaacaggcagaacaacacactgttttgcaactcccgagctaaaaccgataagcataaagcattcaaatcccgattattacaatcggcttcgtgacaatactgtcagcccggaagatattacaataagaagataaacaattttacaagcaaaaagtgcgtgacataagggtaatacacatctttgtcattttcacatcccnnnnnnnnnngtaccgaaattcggtacgcacttttttgatataggaaaataggaaaatatcagtcgtcaaagttgggagtctgaattgcatcgtagcctgtttctcccgtacggattttaaccgcctgtttaaggtagtaggtaaatattttaccgtcacccgggttgcccgtaaaggctgtttttctgattgcctcaattgtttttctctcccattcttcggaagaaacaacaatttcaaacttgattttcggcaaaacctgaacatcaaccttctgtcctcttacatactccgacatacctcgctgaattccgcagcctacaacctgatacgctgtaattccgtttacgccgatatccgtgagagcctttttgacatctacaaacatttcttcacgaacaacggcctctatttttataagctgaatatcgttattgttttccatactttaaaacctccgttagttgtcaagaccgttaaatgacggataagcagattcaccgtgctgtgaaacatcaagtcccataagctcatctctaatgtcaaccctgattttgcctgtaagaagtcttgtgatgccgtagcagatgagtgttccgacaaccgcaattacaattgtgatgccgatacctgccgcctgagcaccgaactgtgcaaactcaccgtacacaagaccgttacctgcactgctgttgattgccgtgcatgagaacacacctgtgagaagtccgccccagataccgcctgtaccgtgacagctgaatgcgtcaagcgcatcgtcaaagccgaattttttcttgccgtatgaaatcataatatagcaaacggggcttgttgtcaaaccgataataactgccgcccacatcggaacaaagccggcaccgggcgtgatacctacaagacctgcaaccatacccgtgcttgcgccgataagcgtaggctttttgttcttgataacatcgcagagcatccatgagagcattgcggctgcggctgaaacacctgttgtcataaatgcgtgagccgcaagaccgtcggcggcaagtgcagaacccgcattaaagccgaaccaaccgaacataaggagcgacgcaccgagtacaactgtcgggatattgtgaattctgtaaattgaatgttcataatcgtgacgcttgccgaggagtatgcaaagcacaagtgccgaaacacccgaactgatatgtacaacatcgccgcctgcaaagtcgagagcaccgataccgtctgcacctaaaagtcctccctgtccccacaccatgtgagcgagcggataataaacgataagcgaccagaaaattgtgaaaacgaaaattgacttaaacttcattctgcctgcaaccgcacccgtaataagagcaggagtgattacggcaaacatcatctggaacgcagagaataccatatttggaattgacgcatcatccgtgtagccctccgtgagtgaaacaccctcaagaccgagccaacggaaatcaccgataaaagcatttcccgaaggagcaaacgaaagcgaataaccgaaaagcacccacataacaattccgacaccgataataaaaattgatgtcatcattgtatttacaacatttttctttcgtacaagaccgccgtagaacattgcaagacccggagtcattacaaatacgaaagccgcgcaaagcagcacaaagcctatatttcctgaatccatttttaacctccacataaaccgtttttgccgaagcaaaaaaataaagctcacaatgtttttgtccgattttgcaagttttaaaaaatttgttgcaaaatcagaagaaaccaaagtgaacttccttgtcctttttatattcagttttccgaaaacttcgtaagacctttgccttactgtcttgaattataaagcctaattaaccgattgtcaatacttttttgaatattttttaaagttttttgctgttttttaaattacagtttacaataacaggtcaaaaatctaagctacggcacaaattcaattttgcaagtttatttaattttcttgcaaattatttttttgattacagcatattctttgtagtgtttgtagcggcgaacctcgttcgccaatcggtttggttacaaaaccaaaccgacttaatataaattatttgtttaagataattatgatataaaaatacaattgcgatttattcatttcgtgtttccacacgaaatgattggcgaacacagttcgccgctacattaaattgtgcaaacagctactatactacgctcgggcataatatattttttatattgcaaaccatcttcccgaccgcaattttccattttcaattttcaatttttcatttaatgaacctatctacacgaatcaggtacggcggctcgccgtactggcggataatatcgtccctacaaaataaaaactacggtcaacatagtcctgtcaaccgtagttaaaatcaagatattttattttgcaaaatcggacgctctgctttcacggataatattaaccttaatctgtccgggatattcaagctcttcttcgattttcttacagatatctcttgcaagcggaatcatacgctcatcattgacaatttcaggcttaaccataactctaacctcacggcctgcctgaattgcaaaggtacgctcaacaccgtcaaaagaagacgcaacctcttcaagcttctggagtcgcttaatgtagttttcaacattttctcttcttgcacccggtcttgcggctgaaatagcgtctgccgcctgtacaagacaggcaacaattgttctcgcctcaacatcaccgtggtgagcgtgaatagcgtgaataacagcgtcgctttccttatactttttggcaagatcgacaccaatctgaatatgtgttccctcaacctcatggtcaatggatttaccgatatcgtgcaaaagacccgcacgcttagcaattgtaggatcaagaccaagctcgctcgccatcatacctgcaatgtatgaaacttcaagagagtgatcaagtacattctgaccgtagcttgtacggtaacgaagtctgccgagaagcttgacaagctccggatgaatgttatgaacacctgcgtcaagcacggctctctcacctgtacgcttgatttcggattcaacctctcttcttgccttttcaaccatctcctcaattcttgcgggatggattctgccgtctgcaataagcttttcaagtgcaattcttgcaatttctcttcttacaggctcaaagcatgagagcgtgatagcctccggcgtatcatcaataataagatcaacacccgtaagagtttcgatggctctgatgttacggccttccctaccgatgattctgcccttcatctcgtcattgggcagaggaacaaccgaaattgttgcctctgaaacctgctcagctgcaagtcgctgaattgcaagcgaaataatgtttcttgccttgtcgtctgcttcctctttgagctgttcggtatattccataatcttaaccgacttctcgtgagcaagctcgttttcaagctgtgaaagcaaatagcttttagcctgttctgccgtgtagcccgaaattttttcaagcatttcaaactggctctttttcagagtttcaacttcttcgagttttgcatctgcatcacgaagctttttgttgaccttttcttccttgcgttccatattgtcaagctttttgtcaagagtttcttccttttgctggattcttctctcctgacgctgaacttccttgcgtcgatcggaaatttctttctcgctctcgtttctgaaacgatgaacctcgtctttaccctcaaggactacttcttttttccttgcttcggctgttttgattgcatcagccacaatcttctttgcctcctcctcagcacttccgatttctttctcggcagtgtttttgcggatggcaattccaaggaaaatacctgcacctgcgccgataacaactgcggcgacaatgcagataatacttatccacaatggcaatctggacacctccttagtttgattttttaatatttcacagttcccaatcaattagactttaaaggtgccgttaaaaagatattcaattttcatttttactttgtaaatatttttaatacattatatatacatacgcaaccgcaaaacaccgtacaggttgcacagagcgtttcaaaaggcgaaacgccataaaaattacaaaaaatatctatatataacggctcttttaaagagtcttaaagagtctgattaaaaaagtcgcaaaagtcaaaaactgtacttttgccaaaatccgcatcagcggactatacaattttataataaaataaccaaattgtcaagaataagcacgggaattttgcagataattattacggaaataaaaaagattacagctttttgacggttacagcttaaatttgccttaaaaaagcaagatgtgaccgtgttttttaccgtatttgtaaaaaagtcaaaaatttttcgttaaatttttgtcaagctattgaagaaatgaaaaaaatgtaatataatagaagcaccttagaattttaggaggaatttttttatgtcagtaaaagttgcaattaacggtttcggccgtatcggtcgtcttgctttcagacagatgttcggtgctgagggttacgaagtagtagctatcaacgatcttacagatcctgctatgctcgcaaaccttctcaagtacgatacagcacagggcggctactgcggtaagattggtgaaaaccttcacacagttgaggccggcgaaggctcaatcatcgttgacggcaaaaagatcacaatctacgctaagccaaacgctgctgagcttccttggggcgaactcggtgttgatgtagttctcgagtgcacaggtttctatacatcaaaggcaaagagccaggctcacattgatgccggcgctaagaaggttgttatttctgctcctgcaggcaacgacctcaagacaatcgtttacagcgtaaacgaaaagactcttacagctgacgatacaatcatttcagctgcttcatgtacaacaaactgcctcgctcctatggctgacacacttaacaagtatgcagaaatccagagcggtatcatgtcaacaatccacgcttacacaggcgatcagatgattcttgacggtcctcacagaaagggcgacaagagaagagcaagagcaggtgctgctaacatcgttcctaactcaacaggtgctgcaaaggctatcggtcttgtaattcctgagctcaacggtaagctcatcggttctgcacagcgtgttcctgttccgacaggttcaacaacaattcttacagctgttgttaagggttctgatgtaacagttgaaggtatcaacgctgctatgaaggctgctgcttctgagtcattcggttacaacgaagatccgatcgtttcttcagatgtaatcggtatgagattcggttcactcttcgattctacacagacaatggtatcaaagattgctgatgatctttatgaggttcaggttgtttcttggtacgacaacgagaactcatacacaagccagatggtaagaacaattaagtatttcgctgagcttggctaatctgaatttacagattattctttgggctgtcctttttggacagccctttttgttttccttttcggaagatatttatccttatttttctttattcgtaaaattatgctttaaaatgtaacatttagtcgcagtttataaaatatacacgaaaaattagttttaaattttttgaatttgcttgaaattgacatataattttggtattatataagtgtgagcaaacaatcaacaaacaacagatattaaacaaggagcaattcttatgaattacagctttaacgaggcaagaccggctcttgaagtttttcacaccggcgattcagtgcgtgcatatgattttttgggcgcacacctcgtgaaccgcaacgacaaaaacggagtagtgttccgtgtgtgggcaccaaccgcaaggagcgtttcggttgcaggcgattttaataattggaacaacgaggcaaactatatgtataacatcggttacggtgtgtgggaagtgtttgtcgagggtgtaaaacagttttgtacatacaaatactgcattgagagcgaatacggcgacaggcttatgaaagcagatccgtatgcttttcacgctcaaacccgccccggtcaggcctctgttgtatatgatatagaaagctattcgtggaatgacagcgaatggtttaataaacgcaaagaaaacaacatttcatcgtcaccgatgaatatttatgaaatacacgcaggctcatggagaaaatatcctgacggcaacttttttaactatcaaaagcttgccgatgagcttatcccctacctaaaggagatgcactacacccatgttcagcttatgccgattatggagtatccctatgacggcagttggggttttcagacaaccggctactatgcaccgacttcacgctatggcacaccgtctgattttatggcttttgttgacaagcttcacggtgaaggcattggtgtgattcttgactgggttccgtcaaattttccgacggacgatttcggacttgcaaggtttgacggttcacctctttatgaaagcaacgatccaaaaacaagcaagcgtgactcatggggaacctgccttttcaactacgcaagattcgaggttacaagttttcttgtttcatgcgcaatgttctggctcgacaaatatcatattgacggcttgagaatcggcgcactctcctctatgctctaccttgattatggtaaaaccgagggcgaatgggaaccgaacaaattcggcggaaaagaaaatcttgacgctgttgattttgtaaaaagactcaacacggctgttcatatgtaccaccccgatgttatgatgtttgctgaagaaaacacatcgtggccaaagcttactcataaaatagaggacggcggtcttggtttcgacttcaagtggaacatgggctggatgaacgatatgctgcactatatgtcactcaattcgatgtggcggccgttcaatcatgacagtcttactttcagcttttattatgctttttcagaaaaatttcttctgccgatttcacacgacgaggtttctcacggcaaaggctcactcataaagcagatgcccggaaagtatgacgagcagtttgcaggcgtgagagcattcataacatatatgtacgctcatccgggcaagaaactcgtgttcatgggaactgaaatcggacagtttgacgagtggaatcacgaagaggcaattcaatgggatttgcttgaatttgaaaagcataaaaagctcagaacattttttaaagagctcaataaattttatcttgactgcaagccgctctacgaacttgacacggtctggaaaggctttgactggattcaccatgacgattacacaaacagtgttattgcattcaagcgcaccgacaaaaacggtgatgaaattgtttcggtatgtaattttcagcccatcaggcgtgacgaatactgcatcggtgttcctaaatacggtctttatgacgaggttttcaactctgatgaagagcgtttcggcggaagcggtgttgtaaacggtaataatatcaaaaccgaggtaatgaaaattcacggttttgatcagggcctttcgctcactctcccccctctcagcgtaatctatctgaggtgtgcaaaagagcttgaccccgatgaagctcagaaagaaaattgatattttcagtcacaggactgtaattaataagtttaataaagataataaaataaatatcggaggtattttaagatgtttccaaaaaaggaagtagtggctatgctgcttgccggcggtcaaggctctcgtcttggcgtgcttaccaaaaagcttgcaaagcctgccgtaccgtttggcggcaaatatcgtattattgatttcccgttatctaactgtgtaaattcaggcattgacgctgtaggtattctcacacagtatcagcctcttgttcttaacgaatacataggaaacggacagccgtgggatcttgacagtatgcactcgggtgtaaactgtctcagcccttatcaggctgttgacggtgcagactggtattcgggaacagccaatgcaatttatcagaatatcaactacattgagcgttataatcctgaatatgtggtcatcctttcgggcgaccatatctacaaaatggactacaacaagatgcttgaatatcataaggaaaagaatgccgcttgtacaattgcggtaattgatgtttcgcttgaagaagcctcaagattcggtattctcaacacaaatgaggacggctcaatctacgaatttgaagaaaagcctgctcatccgaaaagcactaacgcttcaatgggcatctatattttcagctggaaggaacttaaaaagtatcttacggaggatgaattcaaagagggttcaagccacgatttcggtaaggatgtcctccctgccatgcttgacgcaggtgagcgtatgtttgcatatccttttgaaggctattggaaggatgtgggaacaatcgacagcctttgggaggctaatatggatcttctcgatccaaaggttactttagacctcaaggatatctactcaagaaacccgatgatgcctccgcactatgtttcaaacgaggcgtcaatccaaaattcactcgttgccgacggatgcaatgtttacggcaaccttgagttctcaattctctttgcaggtgttacaatcggtaaaaatgctacgattaattcttcaatcatcatgcccggtgcggtaattgaggacggtgccgaggttcagtttgctatcattgccgaaaacaccgttgtaggcaaaaatgcaaaagtcggacaaaaccccgaagaaacggaaaatattgacgactggggaattactgttgtcggtgcaaataccgttatcaaagaaaacaccgttatcaaagcaaaaaccatgatagacagcgacacggaggtggacggcaatgagaagtaataatgtactcggtttcatctttgcggcaacacttgacgacaaaatccccgagcttgcgtcttcaagaacaactgcaagcgttccgatcggcggaaaatacagaattatcgactttgacctttcaaatatgtcaaactcaggtatcagcaatgtaggcatagttgcaaaaagcaactttcagtcacttatggatcatgtgggttcgggcagtgcatatgacctttcaaagagaaggagcaatctttcaattctcccgccatatgacggcaaggctttttcaagctttgttgaaacaatctacaatatgcacggctacattgagcattgccgtgaggagtatgtgcttatttcacagggcaatgtaattactaacattgattacacagatgtttttgacttccactcaaagaagaaggcagacattacacttatatataagaatcatgcaattccgcagggctatgacagaccgattacccttgatgtagacaatgacggcaaggtaaatcagatttttgtaaagccaggtgttgttgacaaaggggtattcaaccacgcatacggctctattctcatcaagaaagaccttcttatgagtgaaatccgaaacgccatcagcgttaatcagcttgatgtaaggcgacttattcagagcagtctgggcaaatacagtatttatgcttatgaaaataagggttactgtgcggcaatcagctcaatcaacgattactttgagttcaatatggatcttatgaaaaaagaagtaagggatgagcttttcaatccgcaaagacctatctatacaaaggtaagagatgacgctccgtcacgctacggacttacaagcaatgtgaaaaattcaatcattgcacagggttgtgttatcaacggtgaggttgagaactgcgttatttcaaagggtgtttatgtcggcgaaggcgcaaagctttctaactgtattgtaatgcaggacacaaaaataggttgcaataccaacctcaactatgttatcatagataaggatgttaccatcaaggatggtcgatcacttatgggatatgattcgtaccccatttatattgctaaaaaatctgttgtataaagttgtttaaacaggaggtaatcttacaatgagaattttatactgtgcttcagaggctaatcctttctgcggcagtggcggacttgctgatgtagcaggaagtcttccgcacacactttgcagaaaaggtcaggattgcagaattgttgttccgctttacggcacaattccgcaggaacttaaaaactccatgaacttcatcacaaactttaccgtgccggttgcatggcgtcatcagtattgcggtttgttctgggcaagatggaatgactgtacatactattttattgataacgaatattatttcaagagaggcactctctacggtcattatgacgacgctgaaagattcgctttcttctcccgtgcaattcttgaaatgcttccttacattgatttccatcccgacatcattcattgtaatgactggcagacggctcttgttcctgtttactactatctgttctattcacacagaccatggtactataacattaagagtctgttcactattcacaacatccagtatcagggtgaatacggctgggaagttaacacagagtgcgtcggcattcctgcatccgaaacaaagattcttgaaatgaacggcaaactcaatatgatgaagggtgctatcgaaacagctacccgtgtttcaactgtttctccaagctatgcagctgagattaaagacccgtggttcagttggggacttcatgacgaactcaatcttcgtcattacaaactttgcggtatcaagaacggtattgacacagaaagctacaatcccgaaacagactatcagctttatcgcaactattcaaaggacgatatgagcggcaagggcgaatgtaagcgtgctttgcaggagcgtttgtgtcttgaacagcgctgggatgttccgctggtcggtatggtaacaagacttgttgcgcacaagggacttgacctcgtaagaatgggccttgaggagcttatggacacagaaaatatgcagtttgtaattctcggttcaggtgacaaggagtacgaggactacttcaactatatgcaggcgaagtatccgggcagactttgcttctgtcacggctttgttcccgaacttgcaagaaagatttactcaggcgcagatattttccttatgccttctgctcaggagccttgcggtcttgcacagatgattgcactccgttacggcacaattcctgttgttcgtgaggttggcggtcttaaagactctgttttcgacagtgctgacaactacggtaatggatttacattcaaaaactatgaatgtgcagatatgcagcttgccgtaagacgagcattgtggggcattcaggacgaccagggttggcatcagcttatgtggcgtgctatgatgagcgacaacagttgggatcgttcggctcaggactacatcaatctctacaacgataccctcaagtgggcttaatcgtgcagtcaaatcttataacaaaaaattcagtcggaaagcagatttcaaatttgctttccgacttttattttatttgaaatagcaatctcgtaggggcggatattatccgccagcacggcgagccgccgttcccaattcgagcagatagtttgatagaaaaacaattccaatgcccgaattaggtgaatttatgtttacaaaaaattatttttcacaaaaacaaaaaaggttggaaactactgcggggagcagtcgatttccaaccttaaaattttgcattagtttttcatcaggttctctttattgcgtgcggaacacgaattttacctgcaagcttaccaagagcaaacacaagaataatctcgggaatgcacttaacggcaacactgatgaatcttgctgtaagataaactgtgtacggtgttgaaccgccgccgtagagtgtgtaaagccaaaaagctatgaggaatgtttcaacgcagagcatatttgtaaaccatgcaagaacaactctgagcggagttacattgttcttataaagaaacataccgtagataaaacctgtaataaagccgttgattgtaaagccggggaaatatgcgcctgtcggggcaatgataaatgaaagaatatctcccaaagcgccgacaattgcagcaggaatcggtccgaacattacgcctgttacggcaatgggaaggaacgctgcgctgagctttacattgtttccgaaaaacggaagtgtgctgtttgcaaaaaatccgagaacaatacgaagtgcaagcagcattgcaattgccgcaagagcgtagatactcttcatttcaagcaaagagctttgaatttttttgagttgtgacatattttttacctcctgaatctctgttgttgcttcaggaagaaaaaagcggacagattgctctgcccgctgaattatatgtcccaaagtaacagcgggatgcgaaatctgtaccgcaggataaacctttcgttcttgcggcaactccccgtccgcaaaacacttcacgcacaaatttctactctgtgatagatgcctttcggcaccatatgctattatacgcctgaatttgctgtttgtcaaccaaaaattaatttagagtttactgaactgttgcttttttcttctttgtaagaagggcatcgaggctgttgataagtcttgaaagcggcttgtagattatgaaaacaactaccgaaatgatgagtcccttaatgatgttgaacggacctacgcagtacaggcagaatgtaaatgtgccgtcaattgcagggaaaattgcctgtcccattttgataatttctgtaagcggcataaatgacgagtagagcggaacaagtacgaatgtgttaagaaccacaccgatagccgccattgcaaccgtacccgtaagcattccgacaatcgcaccgactcttgtttttttgtacttgtagatgaaacctgccggcaggataaacgaacagccgatgaggaagtttgcaagctcccctactccgcctgtgcttgtgcctttgataaggaacttaacgagaatttttacaaattcaattactgcaccggcaatcggccccatgctgaatgttccgacaagaacgggaacttcggaaaaatcgaactcatagaatgaaggtgcgatgaatccgagaggaaattcaaagaacataagaactgccgaaagcgccgcaagcattgcggttacggcaagctttgttgtctttgccgtgttgtctgaattgattgtttttgcttttgattttgtcattacgaccactcctgaaaaattatttcgagttgtcgggaaaagaaaaatcccgctacaaatgtaacgggattgcgtaccaaaataaaacagacgaaccgcctgttctgccgcatcttctcgtatccggactataaccgtcggtgtctgaatttcacagactcggcaggctttcacctgttcgtggactttaaccaccggtggagaatttcactccgccccgaagacaactgttgattatattatatgccgaatttcggatttgtcaatatctcttcagtgttttgagatattttttcgtttcatcgtcaattctgaaactttcaacgcatttccgaatcattttattaaaggttgcgttatcaagcgaatttgactttatgtaccgcatagtctgttctctgcactttgcaagtgcagttgcaacaagccatgcccttgccatactcacataataatgcggatttttcgcattgtcgcaacatttaagcaccgtgtctatgtactcatcttcaagataatagtcgagcatcagcacaagacctgcacgaattatccacggattgtcgcttttggtgtattcacaaacatgagggaaaaattctgatttatactttttcgtctgctttaaatttgcacaaaagccgtcgcaaaccgcccagctgtctatacgctgtacaaaatcatcgctgtacatcaaaaattcttcatagctttcggttttgagcaaaccgattacaatacctcgcattgttttttcttcataagaattatcggttgtctgctctaaaaaactgcgtccgttgcccttagaaatttccttgccgagctttcgcataacaggcattcttactccgataaaaaagtccttgtcattgtcgggaatcaatgaggaatgaaagcttctgtacttttcatcggcatatgaacgaagctcctctacaaaatcatcatagtcatttttagtccaattatctcttataagctccataatacaccgttatttttgcttattctttcttttgctgtcataaatttcacacggtgagttcaggtcaagatatgcaatatcgtggtgtggcactctgtcctcaaccggcggaagctgcatataatcaccgaaaaccattctgagatactcgtcatagcccgacatacacggcatttttatgccctcaaatgtgacataatcaacacccgaataaatgtgtttcggatactcaattttcatccaatgagggcccgaacaaagctccgttacacacttgtttttatcaagcctgtacttaatcatatgcttttcggcagttctccaaatcttttcacggagcttttttcccctgaaaattgaaagcaaagccttactgcctgcccccacaattccgccgtgcttttctggaacaacctgagccaaaaacagcgaataaagcattgtccacacatactgcattttgcgtgcaaaacggctgtcgggacaaacatcaagcggaaagacatcaagcacaagtccgtgcggaatatcaacctcggtctgatttgtcttgaccatagtgtaatttgtgtcggttacggtcataaaaatattgcccgtgaacatatcgctgtcggttttgagaagtcgaaatcttccgtctgcgccctgttcatgccaaagcttgtacagcttttcgtagtcctctcgtggcagcataacatcaacatcatcatcccacggaacgaatccgccgtttctgagcgcaccgattaacgcaccgccgatgagatagaatgtgagattgttcttttcgcaaaagtccctgaaatacacgagcatatcaagctgtttaagctgtaactcacgcaaaagttcgggggtaagttctactttttcagtcataagtatctccgtaaatatcaaatacgggcggagattatccgcccaaaaaattatttgtatgaatgaccgggaagtgtgttttccctgatttttctttttaccttttcaatgtgttctttcgcaccgctgtttttgattttcttccgccatgacggaatctgaatcaaaccaacaatcgtacctattccgtaggcaacatggagcaacgggaaaatgaacggcaaaaacacaaactgaggctgaacatttttcattgtgcaacaaccgacagcgtttacaatatcaaacattccgtagattatcaaaagaatgtacaaaaaaagcggaagtccgagaaatgcaagcacggaacagccgagaagtgccattacaaaaagaaacggtgcaaagtgaaagtatgaaagacaaccgggacattccgagagtgtaagtcctatccaccgtccgtttgaatacttctgccttatcattccgtgaaggtcgtttcgtgaatgctgatacgagataatatcggggcaacagcacatcttgtagcccgccattctaatgcggtagtgaaattcattatcctcggttctgccgagattttcgttaaatccgccgaccttggcaataacctctctgcggtaagccgcatgaaaaaggctgtcaagatattccttttgcgcaagcggccgtctgtacgaagcaaccgaactgccgaacagagaatcctcagccgcaagcaaggtaagcttccagcttgaaacatttgaagtgatattcggtctgccgccgcctacaacattttcgccctgctttatgttataaacatttcgtgaaacaaagtttctcggaattcttgcgtgagcgtcaactcttataataacatcgccctttgcggtcatcagagcggcattccatgaggttgcctgattacgctttacgcattgaacaactgacacattccaaaagccgtagtcggtatcacggaacttttccattttctctttagtatcatcggttgacatactgtcaacaaataccacctcaattttatcatgcggatagtcctgaagtgcaatatccctgaaaagtccgctcaaagcattcgattcgttataggctatcatacaaagtgaaactaacatataatatctctgctcccttcaagctcgaacaaccattttgcagacattgcagaggttgtcagaaaataaggtacggcataaaatgccggaacaacaaaaaagcacaaagccgcccaaccgataaaaccgataaacagctttattgtggagatgaagttctttattgaaaaagccatcattctcggaagataaattccgagtggcagatgttcgttaaaaccgtaagccaaaaatgtataatgaacaaaaataatgtaacacaccacaacaaccgcagtgctgacgataaacgccaaaacaagcaatacagccacaaccgccgtgagtgagggtgaattgtcaattattttatccgaaaccgcactgagataattgaacacattgagcagaccgcttatgataaaaaacaagccgactgaaattacatcaagaataacagacttaaaaaataatttcggctttttataatagtaaaaaacatcaagaggactgcactctctgcccctgactacattacacacacttctgtaaactccgtttatgagcggcagacacacaacaacaaaagcaaaaaatacaagcccgaaaatcattgtaagcatctgctgagtctgattcggattttttacatcataaagtcctgccacagacattgcaaggctgaacgcaaacagccctgtcaaaaatgcaagcacagcgaccattatctctgagataattaccgaccgattcccctcaagaaccttttttgcctgttttctaacagttttttccgtattcattagcattcccttttcatctgaatttgttcataacgaaacgcattattctccgtcagtaaacattctgtacattgcctcaaggcaaatctgagcgtgtttaaaaaagttctccttatccatactttcgtctgcattgtgcatacgaacatcatcgtttttgaatgcaggaccgaatgcaacgccgtgacctccgagcattcttgcgtatgttccgccgcctgttgaataaagctcagccttttcacctgttacgctttcataagcgtcagagagaagctttacaagcttactgtccttatcggcataaagcggttcttcgtgattgagaacagtaaccttgaggtcgctgatttttgcaacctttttgaactgtttgagaactctgtttccgctcacggtaacgggataacggatatcaaacacagcctttgcggtctgtccctcaatattcacgctgctgaggtttacggtgagcgagcccgaaacagcgtcgctcattttaagaccgagtgatctgccgtttgtttccttgttaattgcgtagtcaataaatgaacagattgaacctgtttcctttgttgtgtaaacatttgagataaggtcaacaagtgccgctgcggcattgtagcccttgtccggttcacacgcatgagccgctttgccacggctgattatcataagaccgtcaatagtgtaattaaattcaaaattaccatcacttgcgtctgcaaggcgcatgagagtctgctcgtcatagtctgatgaatcaagcattacatacgctctgtcgggaactgcattaactgctctgcctgcatggaactggctgagtgttgttgcattatttaaaagtgtgctgacttcaagctgaagaatacccttttcggcaaagcagatgccgtagtcgctgtcgggagtgaatgccatgtcgggaagtggatttttcttgaaataattttccatatcctccatacccgtttcttcacccgtaccgtaaatagcacgcagagtgttcacgccatttacaccgctgtccttgattgctttcaaacaatagagagtaacaagagccgcacccttgtcgtctgcaattcctctgccgtaaagtctgccgcccttttcggtaagcgcatacggcggaacgctccagctgtttcctgcaggaacaacatcaaggtgagtaagcacaccgcaaagctttccgctgtcgccaagggttatatgaccgctcttgtcggttgttctctcccctgtcagtccgaaatcttctgctcttttaagaataaaattcaaggcattatcgcactcgtcattcttttcaccgtcaaccgattcaaaagaaagaagtgtgttaagatcctttaaaagttcgtctttgaagtcaagtattttgtttccaaacataataaatacctccgtacttaaatgctgattatatctttatcagttcttattttttctttttttaactgttttaacggtcacaataaccgcacagtagattaaaaatgctccgaatgcgcaaaggctgattttgacacctgttgaaaatccgggtgtttcgtaggtgaacacaatgtcacacttttccccctttggaatcttaacagccataaagccgtagtccaccttttcaacatctgccgccttgccgtttacagttgcggtaaaaccatcgctgtaaggaacgctgaaaaacaacaggttatcgtcaccctttttattattgtaaacagccttaaagccgttatctgtatattcaaatgaagtacaactgttcaaggctctgagattacaaacctttttgtaatctgaattactgtaatcaaacttttccgtaatgctgtcgtaatcctccggatgtttgccgtacaaaagcttgtacttttcatcgctgtaacccgtaatatcggaatacttcttcataaggtcacggggaagaaccattgcgtagagcaaagcctcggacttgtgtgcgttcgtcacaaggtcaaattcttcttcggcaatgaacttatcaaaggtgtatcccataggaatgtagtattcgttgcggtaaatatcaaaacggttctgcgttctgagatatttccaacccggcattcttgtgttgccgttttcgtcaacgaatgaattcagacttcccgattttccgtcgccacggtaatcaaaaagatacttacaactcagaaacgggcgaagtccgtatacatcaaggtcaggtcttgacgcaacatcccttgtaattccgagtgcatcgtaaaactgcattatagatgttgaaacagaactctgaaagcagttaatgctctgaatctgccagaacattgccgtgttgtcaacacattcgtaaaaatcactgcgaacattgtcaatatcggcaattgtgatgccgtcacgcctgtttatgatatcttctttgatggcatttgtactgctgcttgagaaatagcctgtggcgattataaaatatgatgtgaaaagcgaaacgctcaggatacctacagtcagcataaccgtaaatctctttttgtttcgtctgaattttttgatgatgaggacgaacgcaagcagacttaacaaagccataagaacatagagccaatagcgttcaaatgttgcctgagtgccgataaccgtgttttgaatatcgccgctctcctcatccgtatagctcacaggcataagacctatcagcagagttgcacctaccgtaattcctgccgaccaacgaatcgccctgttccaatcggtttttctgttttcaaacgccttgattgttgcaagaacaagcataagcacgcccatatagaaccatcttgcgtagtaaattgagctgttcataagctggaacatactgttcaaaacaggcacacacgcaaacacagcaagcacggcaagaagctttttgagccagctttttcggcaaacctgaaaatatgcgataactcccgtcattccgacaagcggcaaccatgccgcaacagacgcccatctgcaatttgagccgggtgtgaacacagggaacgcaggcatatctgcggggaaaaacaggcttaaaattatcagccaatatttttgcggttgactgtagacaagcgaatcccagccgttcggaagctcggcaagccttgggtttcccagtaatccgagcactgacggcagcagtatgaatgccgttgcaaggaatcctatgataacctcaagcgcaagcaagagaaaatttttaactttaaatttgtaggttttggtaagcgtaatcataagaaaatagatgattacgaacagaacctgtcccacaaagaagtagtagttcacaacacaggcggagaataccgcaagtgcgaacaccattctttttccgtcatagatgaatgcgtcaagtgccgcaagcaacagcggaaacattatcatcggttcatgaaagtggaaaaagaacacattgtagattgaaaatcccgaaaatgcatacagcaatccgcctacaagagcgaaattcctgtcagccacatatcttttcaaatagagatatgcagaaagtgacgcacagccgaattttaaaatcagcaacggtccgataagatacggtacagcctcactcgggaacggaattgtcagccaaaagaacggactgccaagaagataaaagctgaagcttgagagcatatccgttccgaggtcaacattgtgcatccaacccgtatcaccgtttcttacggcgtcatgcacaagctgataaaacggaatttcctgaacattgaaatcaccgtaataatagaaaacaccgccacccattatgataaacggtagaaaaagtgctgttgcagttataattgatataagaaacacacgcaaaccgaatagtttttgtgttggatatttttgcaaaattctgctcggcataaaaccctccacggagcaaaaagtctgaaaaaatcttttttcgataatttctttacttttaaattatgaatagtataatcagtaatataaatgtccttcaccgtcatttattcaaaagacacctacataatagattcaattcggagcaacgctctgctttgcttgcagagaacagaggacactcgcatttagattacattataacataatgcgatacaaattgcactaatttttagcaaaaaacaggagaaactacctatgaatatttcacatttttacgcaatgctttcaagaatgaggtacatcaaccgttggggacttatgaacaacacacgctgtgaaaacctcagcgaacacagtcttgatgttgcagtgattgcacattgccttgttttgattcacaacaagcgtttcggcggtaatctcaatgccgaaagagccgcattgctcgcaatttttcacgatgcaaccgaaatcataacgggcgatatgccgactcccgtaaaatacttcaaccccgaaatcaaaaatgcctataaggagattgaaacaacggcaggcaacaggcttgtgtcgatgcttccggatgattttaaggacgatatggataaaatcatcaaaatgaacggtgcaggtgacgatgaacttaaaaaatatgtaaaagcggcggacaagttttccgcactcataaaatgtattgaagaaataaaaatgggcaacagcgagttttcaaaggcaaaagaggcaaccgaaaattcaattcacaacatgaatatgcccgaaaacgaggtgtttgaaaaagagttccttccgtccttctatttgtcacttgatgaacaggattgacagttaccgacaaaaaaatcaatattttcagtcagatttttcgctaaaactttacgaaaaggcagattttaattctaatttagcattaaaagaaattctcatatggtataataaactatacttatgtattgtgtgctttttacccgattggaggagtaatatgccaaattacgaaaaaagcagtcagaaaagcaattttattgacataagctcaaataagcaggtcaaaaaattatataataaaaaaggcagacttaaaagaatcctttgtcttgtgttttcaataatcttcctgttgggcggcggcggaatgctctactactattcgttccttgacactctcaacttcaaggatcttgatgacacaaacaacaacaacacagcagctaccaactcatcggttgccccgcttgagggcgacacaacaaacctttcgctttcagagggagagcttctgcagaactccaaggagcttaatgttatgctctttggcgaagacaattcaaacgacgataaatacggcagaagtgatacaatgatcatgatgaccattgataacaaccacaaaaagcttaaactgacatcattccagcgtgacacctatgtttatattccgggttacggatatgacaagctcaacgcatcttataactacggcggagcaaagctttcaattcagacaattgaggcaaacttcggcatcaaggttgaccgttatgcggttgttgactttgacagctttaagaagattatcgacaccctcggcggtgttgatatggaagttactcaggacgaaattgactacatcaactatcagatgtacaagaacaatcaggctgacacaagaacaactatcacagacgcacccggtactgttcatctcaacggtcaggaggctctttggtatgctcgaaacagaggtcttaaaaagggcgaggacggcaacgaaatcggtcttgacggtgacgactgggacagaacctcaagacagagaaagcttcttgaaactttgttcacaagtatgaaaagtgcagacctcggtcagattgtttcaattgtaagctctgtcggtccccttgtaacaacaaacctcaagaaggacgaaatcacagcacttgtttctcacgctctcacatatctttcctatgatgtagaacagtattatgttcctgaagaaggtctttggtactatgatgataaaaccgaaacatggaacggtgcaatcacatcaacaatcaaaatttcagaccttgaagaacagagaaagaagtttgcaagcttcgtttttgaagaattgttcacaggcggtacttcttcaaaagaaacaacctccgcatcaaattgaatattaaacaaaatgcagacagccaattatcggctgtctgttttttacggcgagccgccgtaccctattcgtgaagatagtttgtttaatacaaaacatattacacccgagcgtaacattgcggttattcgctctaaattagggcgagccgccgttccctattcgtgaataaagtttgcggtattaaaacatattatgcccgagcgcagaattgttattattcgcacgattcaacaaccgcattgcacataaaacaaaaatgcatcagaaccttacttggaatctgatgcattttatttgtttgattattattctattttcgtataataaatactcaaaaacagctgataaaattctgcctcgctgacattgaattctgcgtactttgaacccattgtaacctgaccggggactgaaaccatatcaattccgttcataccgccaagcacagcctgctgagcaagatatgacacctttgacgggttaagatttgtacatgaatacggagcggacgcattgaacaaatcaatcggcgtggttaaatcttcctttgtctgctgaagaaccgtattcataaaagactgaatgtaaaccttctgtctttgcatacgcatattgtttgaatcggtcttgcttgtatcacgggttctgacaaagctttcagcctgctgtccgacaaggtgatagctttctccctcaacaaactccccgattgtttcgggtgacacaacatcaacaccgccaacgctgtcgttgagagcggaaatgccgtcaaggtcaagcgaaaagtatgtattaatcggaatgttatagaacagcctctgaactgaatttaccgtattttcacagcttgattccttaccgtcaccgtatgaatacgaaagacaaatctgctgtttttccgtgccggcatacgcaccgcctgctgaatacattgtgacatcaaccatcgaatctctcgaaatgttgaagagtgttattttaccgtttgaagtgtcgattgacacaagcataagcacatccgcctgacctccgctcgccttgactttgctgttattattttcgtcaaggttgcgcttgtcaacaccgatacacagaacattcgtcaccttttcgttgaactgatatgtttcaccgttgtatacgacatacttaccgttttcctcggtttcaatgccctgtggggcggtaacatgaatatccgtattaaacagctcgtttccgccctgataaatcaaatacgcaaccgtgcctacggtgagtataattaaaccaagtaatgtacagccgattgacaaaagcacctttttccaggttttcatctttcgatgctttgaatggtgatgatgcgactttgatctatgctttttatagtgatttgtggtgttactcttcacgacaatgctgtcggaatcaactccgtacacatctgtatatacttttttctttttctttattaacttgctgtccttgaaaatataaccttctatatccaaccttgaaggattgcttacatgctccttactgttcttttctcttttcgattcaagaatttccggtgtattcggatcaagcttgttttctatattttcagttgttgcctcagccgaactttcattttgtcggttcatctttcttcagcactccctgcacaagatatcttccgtcaccgctgtttaagcatgtgcttaaaacaagaattttatcatcggtagtaagctccgtatttctcttgttcacagaaacagaatgtggatttttaatcatattgagataatccgaaaatacattatcatcggaaaaatcaaacgaattcataatgtgtcggttatcatattcaaatgctgacacaatttcgtatgtaagctttctgtcgggagtgtaaacatagatgtacctgttcttgttaaagaaatcggcatcataaaagcgatggagcgttgcaaacattgagccgtttgccatattatgaccgtaaagcacagtcactctgtcggaataatcacgcttgttgcacatctgcgaatagatactgcccgaaaagctgtaattcttataaatatcgtggtcaagatataagttatcgtcaagatgactttgcaaaacaggataatttacatttgtattcggaatgtaaatccacgaataaatgtcgctgttctgctgttgaagcgacttgaaatcaatcggattttcgacctttttcacattgattgacggtgaagtcacttctgttgcagaggttgtaccgttctcaatgcctgacgcatacgagcctgcgatgttatcaagactttttcgttcgttattttcatttaagtttttaacgactatgtacgcaagtgtgccgataattgcagccacaagcaaaataatcaaagctataagaaatttgtttctttttctgctcatatcaaaaactcccaatcggttatattgtatcatttttgtgtcagtatgtcaattaatcattgcctgttagtaaaattttattacaatttacaaactactgcatctgcaatacaaaacctgattattcaaacatctaatgaataaaaaagagacttccttatgagaagtctcttgatttttagttaaggttggattatttgctctttacaagcttaaatacagccgcaccgcaagccgcaagagaaagaactaaaattgcatacggtacaacatcgcttgcgcctgtctttggtgaagttgttgaatcatctttctttgccgtagctgtagcaacaggacctgttgtgccgccgctgcttgccttacggtaataaggagtacaaacaatgtcacctgaaataataatattcatattaggatctgtatacttgctgtcggttctgaaaggaccgcccgaaatttcccagtgatcaaaaacataaccgtcataaggaagcggctcaataaatacatgctgttcgcccttttcgtcaatacctgttgtgaacttataatcaccgtcaccgccctctgtcggaataatttcaaccttatatttgaatgtactcggttccggacttgcggcagcaaatgcgggaactgccgacaataacatcatcataactgcaaataacacagcaattgtctttttcatcacataatcctcctaatt

SEQ ID NO: 219 - DNA, 24664 bp, unidentified
  source 1..24664: mol_type = unassigned DNA
ttatacaaccgtcacaacacctatttcaacctgattattgattctggggatgaatacggtgttgctcagacctgcgcagacaatcatttttgtgccgtcaaggtcaaattcgcctttgtcatatttcggaaaaagtccctgattcggagcgattactccgccgatgaacggcaattgaatctgtcctccgtgggtgtgaccgcagacgattaagtctatgtcggttttcttcgcgtcatcggcaatgtattcgggctggtggtgcagaagaattgtgaaattgttctttgctttttcggcaaattcttcccacagcgttcttgacggaacatcgtcatcgggagtgtagaactcataataagggtaatcgctcattccgccgataagcacactcttgccgtttttggtgaattttatgtattcattatcgagcaatacagcgcctgttgaatctgtttcgcttttaaaatccgttccgaatttggcggcattgtcacgctcatggttgccgagacagcagtatgtgggtgcaatttttgaaagcttttcaagcacatctttcatctttgttgtgtcgggatcgccacggttgaccatatctccgcaaactgcaataaaatcgggattttgttcctttacaagctctgcaaggtctgcgttcttttctccgtattccttgttgtgcaaatccgcgatgacaacaaatttcagctttgcatcgttcttagtattgtttacacagtaatttgtgattgcaattgtgttgtcacagtaaacgccccatattacgagagtcacaaacagcacaagtattattgctccgaggattatcgaaaattttttcattcaattcaccgctcatattaagtatggtattattttaggctcgttttgtgcggttgtcaacaaatgtgtgtcgaacaagtctgattattactgttccttgtgctttgattgtcggattttaagttgatttaggaattgctttgtttgacattccttttgcactgttgtataataaatcataattgtatttatatgttactcgggaaatttacacaaagttaaacagaagaggtatgggttatgaagaagattaatttgcgtaagatgttgctggctctcgcagatgtgtttattatcgttgtcagcggtattcttgcaaattatattctcttgcttgtcggctacataggtgctgcttcaagcaaaggcttgttgagctatattgttattgatcttgtcatgtgtctgtttacgctttatataagcggaacatattcaaaattgtggcgatactttaacgcaaaggactatatggtgtgcggaattgccgtcttttcggggtttacgctcggctttgtaatctcgttgtttttgcagattccgcagagaaagattttttgtatagtacatttcgcaatagcccttgtcggaattcttgcattccgttttgtttttagaagggcttttcttgaccttaccgaggcaggaagggcagagggcggagagcgcacccttattgtgggcgcaggcaatgccggcagaatgattgttcgtgaaattcacaatgcgaaagagcagggtgatgttaataatccttcaaaaagcatcattccggtatgctttgtcgatgatgatttgaaaaagctgaatcagaaaatcgaaggaatccccgttgtcggaacctgtcccgaaattgttaaaatatgtgatgaataccgcatagacaatattattgttgcacttccgtcatgtgaggaagatgagaagaggaagattcttgactactgttccgcaacagagtgcaaaatcaagattatcccttatctcggcgagcttttgtttgatgacgggcatacacagcttatttcacaggcaaaggaaatcaagattgaggaccttctcggcagaaaacccattgagtttgaccgaaaggagattcatgaccttatcaacggaaaggtttgtcttgttacaggcggcggcggttcaatcggcagtgagcttgtaagacagattgcaaagaatgatccgaaacaaatcatcattgttgatatctacgaaaacaacgcatatgacattcagcaggagcttgtgcttgaatacggcacaaagcttaaccttgtaacgcttatttcatcggttcgtgattacgacaaaatggagcttatcttcaagacatatcgccccgaactcgtattccacgctgccgctcacaagcatgttccgcttatggaaaccgttcccgaggaggctgtaaagaacaacatcttcggcacattcaatgttgcaacccttgcagaaaagtacaaggcaaagaagtttgttatgatttcaaccgacaaggctgttaatccgacaaatgttatgggcgcaacaaagcgtgcgtgtgagatgattattcagtacaaggcgcagcacagcaccgataccgaatttgtaacaacaagattcggtaatgttctcggctcaaacggctcggttattccgctgtttcgccgtcagattgaaaacggtgcgcccgttaccgtaacacatcccgatattatcagatattttatgactattcccgaggctgtttcgcttgttcttgaggcaggtgcaatggcaaagggcggtgagatttttgttcttgatatgggtgctcccgtcaagattacaacccttgccgagaaccttatcagaatgtacggtaaggttccgtacaaagatgttccgattattttcacgggacttcgtccgggtgaaaagctttttgaggagcttcttatggacgaagaaggtcttaagtcaacacagaacaagaaaattttcataggaaatcaaattaaaatagacgaaacagatatgctgtcaaagcttgaggttctcaaaaagaccgcagaaaacaatgacagtgaaaagacagttgaacttttggcagaacttgtacctactttttgccacaaggtcaatgattaaccgaaaaggagaaattttatgtgcggtattgtaggttatgtaggacctaaggattgcagtgaggtgcttgttaatgctctcacaaagcttgaatacagaggctatgactcggcaggtattgcggtttttgataacggagaaatcaagaccgtaaagaccaagggtaagcttcaggacttaaaggataagcttgcagaggtcggcactccgaaaggtcatgtcggcataggtcacacccgttgggcaacccacggcgagccttcggatgtaaactcacatccacacagcggtacaagggttacaatcgttcacaacggtattattgaaaactatatggagcttaaagacttcctcatctcaaagggaagaacttttttaagcgacacagatacagaggttgttgctcagctcctcgactataaatacaacggaaatcctcttgaaacaattgacagtgtaatggctgagcttaagggttcgtttgcactcggaattatgttcaaggatttccccgacagagtttttgcggttcgccgtgaaagtcctcttatcgtaggcgttgcagagggcgagtgctttattgcgtccgatgttcccgcaattcttcagtacacaagggattattatcttcttgaccatgatgaaatcgtaacactttcatctgacggtgtttcgttcgttgacgaacaccttgatccgattgaaaaggaacttcagacagccgactgggatatggaggctgccgaaaagggcggttatccgcactttatgattaaggaaatcaacgaacagcccgaggctatcagaacaacgattatgccgagaatcaaagagggacttccgtttcttgaggagtgcggcatcacaacggaaacaatcaagaatttcaaaaatatcacaatcgttgcctgcggtactgctatgcacgcaggtatggtcggcaagtatgttattgaggatctcgcaagagttcccgtaaatgttgacattgcgtccgagttccgttacagaaatccgattgtaggcgagggcgaccttgtaatcatcatttcacagtcgggcgaaacagccgacagccttgccgcaatgcgtcttgcaaagcagaagggtgcaaaaactcttgcaatcgtaaacgcaaagggcagttcaattgcccgtgaggcggatatgctcatctacacactcgcaggtcccgaaatttccgttccgtcaacaaaggcatacatcacacagctttccgttatgtatctctttgcctttgagcttgctcttgcaaaggaaacaatcagcacagccgagtgcaagcgacttgtttcggctcttacaaaaatgcctgaggcagttcagtatgtaatcgacaactgcgaggatacctgcaagttcgttgccacaaagcttgttgcaaccgacagcttgctttacataggcagaggtcttgactatgccctttcaatggagggttcgctcaagctcaaagaggtttcgtacattcactcagaaagctatgccgcaggcgagttgaagcacggcacaatttcgcttattgacgaggatgttccggttatcgccgttgcaactcagacaggtattatccccaagacaatcagcaatgttgttgaggttaagtcaagaggtgcaaaggttattcttgtttgcacagacgcctgtgtaagagaactcaaggacggtgttgcggattatgttatcgaaattccgcatacagacgagcttcttatgccgattacagcagttgttccgctccagattcttgcttattacacatcaatcaacagaggtattgatcccgataagccaaagaaccttgcaaaatccgttaccgtggaataaacggcggtcttgtatttaattgaaaattgaaaatgtaaaatttcggttggcggtgtgccaccgcagtcaattcgagaagatagtcagataaagaaattgcattgatgcccgatacggcattgatgcaatttttgttttatatgaaagtgaatgtttatttatataattttaatttgtacaaatctttgcgtggttatctgcaggcggataatatccgtacatacagttttgcaacaacttccgtatataccaaaaatatacaaaaacagtcgggcgacaatgttttgtattcttgcgaattgtcttctcgaccataattttccattttccattttcaattttcaattttatgcgcgctcaggcgtaatatgttctttaatatcatactgtattcacgaataaggcactcttgttttcaaatttcaacggtaaaaaccttgtatttttttgacagattatgtataattaattagatatacattctaaaaagcagtattgatgaatctaatttagtttcgggggaatatacggacatgatgaaaactgtttttaaaagagctgtaacgcttgcaatttgtgccgtaacggtattttgcggtatttttgcctgttcaggcgcaacaaaagattacgagattccgcagattgacgatatgacgctttcaatgcctgacggtatgagcgctgttacaagggacagtaaaagcacagataaatatttttctgttttcggtcttgattatgacacaacaatgaaaacctttcagaacggaaatatctatcttcagggtatggataatatgtcatcggttattctgaccgtgacaatgacaaaaaatgagagtagtgagaatgtcggcaactatgctcagctttcttcaagcgagctttcaaatatacgcaacaattttcttaattccgacgagtatcggagctgtactcccgaccaaaaagaaaaagctgtgtggcttgtgtttgacgcaactgctcagagcagtaagggcgatgtgaaaacctttgttgccaacacggtttatgacggtatgaacattaatatcacaatgcagagaacagagggtgatgttacaaccgttgactacgatactttttccaaagttgtatcttcggtaaaattcagcgacctgccgttttcaaagggatttattccgtacataatcatcggcggcggtgttgttatccttattttgattgttctcatcataatttttgccgtgagaatcagaaagcataaaaaggctaagaagaataacgctattcttgaggagcttgcagtcaagtataaactcggtgaaaagggtacggactacgacattgacaattttgacgattctcccgaaaagcccgataaacgctcaaagaaaaagcagaaatatgcggaagaggttgaagaagaaccggctttgtcgggcagaagatatgctcctgagccgataatcgaaaatatggaagaaccggaagaaattacaagtgagtattcaaactttggttatgatacggatgatgccaaggaaaaagaaattgacgagataatcaactccgcaaaggcttacaagagtgagcttgagcgtgaggcatataaaaacaactacggttacgaggaaaacagcacggaggacgaaaaaaaaaaggagcctaccgcagcagatacctcagagactgaacccgaaaaaattgacgaaaacgaaaaagataacgcagaaacacctgaaaaacacgaggacataagcccttcgtcaggtcctacactcgttatccccgaacccgaacacgatctttttgaaacaagcgagcctgacgatatcgaccgtgaggacgatgccgatgttgaagaaaccgaggaggtttccgaacaaaagcatccgcttgaaaaaaaggttgacaagtacgcaaacatcattttcggcagtgacgatcccgaggagaaaaccggggaagaggttgatgacgaggagcttgtaagggcaaaggctaagaaaaacaagtttgacagcggttatgacttttttgacgaagctcccaaaaagtcaatgggggttatcaaaagctcagacctcagagatgccgaggacgttgatgttatcggcgaggttgaaagaaaagcagaaaccgtaaagcagaacgctcttgaaaaagagaataataaagaaaccgagggtgaaccgaatgataaacggtcaacggaagaggttcttgccaatgtaggcaaaaacatcggtaacgctctcaggggctttgcaggcggagttaagaattttggcattcactgcggatatttctgcaagaatgtttcaataatgataaagcgtaagcgtgcaattgccaaacgcaaaaaggcagaggaagagagaagagagagagaaagacaaaaggcagagcgtgcaagaatgcgtgccgaaagaggcgaaagtgacggacttgttcaggttcacagcagaaccgaccgccgcccccagcagaatcgccaccctgcaaacagaaacaagagaagataatttcttttcttaacggaggaaaaacatggaaatgctaattaaaaacgcagtggttgtttcccctgccgacaagcttaacgaaaaaacagatattctcataaaggacggtgtgattgccgaaatcggcagcggcattacatcagacggagagattattgatgcagacggtctttgtgccgttccgggatttgttgatatgcacgtgcatcttcgtgatcccggtcagactcacaaagaggatattatcacgggatgcaaggcggctgccgcaggcggtgttacaagcctgcttgcaatgcctaacaccaatcccacaaccgacagccccgaaattgtaaagtatattcttgacaaagctaaagacgccgacagccgtgtttatgttgcggcaagcgttaccaaggggctgaaaagcgaagaacctacagacattgacgctgtgaaaagtgcaggtgcaatagcacttaccgatgacggcagacctgttgaaaacacaaagtatttgagtgacgcaatgaaaaaagctccaaagctcggcatgacaattgtcgcacattgcgaggacttgtttcttgccgacggcggtaaaattaacgagggcgaggtttcggaaaagctcggtgtcaagggaatccctgccggtgccgaggactgcggaactgcaagagaaattgcacttgccgccgctcttaacgagcctattcatatctgccatgtcagcaccaaaacaagcgttgcacttatccgtgatgccaaaaggagaggtgttaaggtgaccgccgaaaccgctccgcattatgtttcgctcacggacagggagcttttaagaggtgacgctgattacagaatgaatccgcctctcagaactcaggctgatgttgacgagattatcaacgggctttgtgacggtacgcttgatgccatagcaaccgaccacgcaccgcacacacccgaggaaaaggctgattttgtaaaagcccccaacggttcaatcggcatggaaacctcgtttgcggtctgcaacacatatctggttaagacaggcagaatgacgctttcacagcttgttgagaagatgagcgttaatcctgcaaggattttgaaaatcaacgcaggcactctttcagtcggtgcaaatgccgatgttgttcttataaatcccgatgaagaatggacagttgatgctggtaaacttcacggcaaaagcaaaaacaccccgtttaaaggcagaaccctcacaggtaaggtcaaaaagacaattctcggcggtaaggtagtttttgaagattgagtttgttttaattgtagatgttgatactattaaaattgtgcaaacggtagctgtactacgctcgggcataaatgttttttatttgtcaaactgtctgcacgaattggggacggcggctcgccgtgttcgctcaccaaataaatttaatttaatataaactttaacataaaggagtaaaattatggcacagaagggtgacctcctgtcggtaagacaggatatcagagtagtagacgcaacaatccgtgacggcggtctttgtaacgatttcagatttgacgacaaattcatcaaggatctttacaatgcaaatgttaaagccggtgttgattatatggaattcggctacaaggcatcaaaggaaatctttaacgaagaagatttcggtaagtggaaattctgtaacgatgcagatatcagaaaaattgtaggcgacaacaagacttctcttaaaatcgctgttatggctgatgtcggcagaacagattttaagaaggatattatcgcaaagaaggacagcccgattgacctcatcagaattgcaacatacatcaacgcaattcctgcggctgttgaaatgattgaggacgctgcaaagaagggctacgaaacaacaatcaatattatggctgtttcaaaggcaagaaccgaggatattacagcggctcttgaaactctcggcaaaactcccgtaaacgctttctacattgttgacagctacggcgcactctatcccgaggagtcaagacgacttgcagacctttactgctcaattgccgacaagcacggcaagtcggtcggtattcacgctcacaacaaccagcagcttgcttttgccaacacaattgaggctatgactcagggtgtcagctaccttgacgcaaccgttgacggcatgggcagaggcgcaggcaactgtgcgcttgaacttcttctcggtttcctcaagaacccgaagtatcaggtcgctcctattctcaaaatcattgaggagtacacccacaagtttaaggctgagggcgttaagtggggttacgatattccgtaccttctcacaggtcagtacaacacacatccccgtcctgcaattcagttcgtaaaagaggacagacaggattattacaagttctcaaatgaactttatgatattatcaacagctaattaaatttgtagcggcgttcattgaacgccaatcgaaccgattgcaaaatcggttcgaccatacaaacgatttgaattaaagtaattaaccacgatataacaatacatttgttgtttattcgttttggtttcacaaccaaaacgattggcggtcattgaccgccgctacggttaagcaatgacattgtttaaatcaaaatatgaacgaacaaattgtttttacattacaaaaaatgaggagaatcactatggcatttgacagacttatcgaaaatattgtaaaaatgcagaatcctacggttgcaggtcttgaccctaagcttgactatgttcccgaatcaatcaaaacaaaatgctttgaaaagtatggcaagacgcttgagggtgcggctgctgcactttttgaattcaacaaggcgcttattgacgcactttatgatattgttcctgccgtaaagccacaggctgcatattatgaaatgtacggctggcagggtgttaaggctctttgcgacacaatcgcttatgcaaagtcaaagggtatgttcgttatcacagacggcaagcgtaacgatatcggcacaactatggaggcatatgctacggcacacctcggtcatacagatgttgcaggcgaaagcattgacgcattcggtgcagacgcactcacggtaaacggctacctcggaacagacggtatcaagccgcttgcaaaaatttgcgattcggacgacaagggcatttttgttcttgtaaaaacttcaaacccaagctcgggcgaacttcaggatatgaagcttgaaacaaatgagagcgtttatgagcatatgggcaagatgtgcgaaggctggggcgaagaccttatgggtaagcatggctattcggcagtaggtgcagttgtgggtgcaacatatcccgaacagctcggtgaaatgagagcaaaacttccgcacacattcttccttgttcccggttacggggctcagggcggcggtgccgatgatgttaaaaacgcatttgacgaaaacggtcttggtgcaatcatcaactcaagccgcggcattatgtgtgcatggaaaaagcaggggcttacagaagatgactttgccgttgccgctcgtaaagaggctgagcgtatgagggatgaaatcgttggctgtatcggcaaaattaagcttggatgattcatttgcacaacagaatcacgaaatttttcgttttttatgctttagtgctatgaatttattgactttagcgtgctaaaagcgtataattaaaacgtatttatttttacaactatatttttaaattttctttaaaaagggagatatcagaaatggcaagagtatataatttttcggcaggtccttcaatgctgcctgagtctgtgcttaaaaaagcagcggcagaaatgctcgactacgaaggcagtggtcagagcgttatggaaatgtcacaccgctcaaaaatttacggtacaattatcgagggtgccgaggctcttttgagagaggttatgaacattcctgacaactacaaggttcttttccttcagggcggtgcgtcaacacagtttgcggctatccctatgaaccttatgacaaagagcggtaaggctgattatgttatcacaggtcagtgggctaaaaaggctcatgcagaggctgcccgttacggtcaggctaatgttgttgcttcatcggctgacaagaccttcacatacattccaaagcttgatccttcaacattcacaaaggacgctgactatttctacatttgcatgaacaacacaatttacggtactgtttatcacgagcttcccgacacaggtgatgttccgctcgttgcagatatttcttcctgtattctttcaagaccgattgatgtttcaaaattcggcgttctctatgcaggcgcacagaagaacatggctccggcaggtcttacagttgttatcgttcgtgaggatcttatcggcaacgctatggatatcactcctacaatgcttaactggaaaactcacgctgacaacggttcaatgttcaacacaccgccttgctacacaatctacattgcaaagcttgttcttgaatggattaagaacgaggttggcggtcttgataagatgtatgaaatcaacaagaagaaggctgaccttctctacggtttcctcgattcttcagagcttttcaagggtactgttgttcccgaggatcgttcacttatgaatgttccgttcgttacaggtgacgctgaccttgacgctaaattcgttaaagaggctactgaaaacggtcttgttaatatcaagggccatcgcacagtcggcggtatgagagcttcaatctacaacgctatgccttatgagggcgttgaaaaactcgttgagtttatgaagaagttcgaggctgaaaacaagtaattattgaatattatgatataacgggcgaacgctgttcgcctgttattgtaaattcttaaaataaaaaattaaaaaggattgattttgatgtataacattcttacattaaacaaaatcgccgctatcggcacaagccgtctcggtgataactataaatacggtgacgatgttcagaaccctgacgcagttcttgtaagaagtgccgcaatgcacgatatggaatttgccgataaccttcttgcaattgcaagagcaggcgcaggcacaaacaacattccgaaggataagtgcagtgagcagggcattgttgttttcaatacaccgggtgctaacgcaaacgctgttaaggagcttgttatcgcaggacttcttatttcaaaccgtaaggttattgagggttatgaatgggcaaagactctcaagagcaacggtgcagctgtcggtaagatggttgaaaagggcaagagtcagttcgtcggtcccgaaatcaagggtaagaccctcggtgttatcggtcttggagcaatcggtattcttgttgcaaatgccgctgttgctcttggtatgaatgtaatcggctttgacccgtttatgtctgttggcaacgctctcaagcttgctcctacagttaagctcatgaagagcgcagaagatgttatggtaaattgcgactacctcacaatccatgttccgcttactgacgacacaagagatatggttgatgccgatatgattgctaagatgaaagacggtgttcgtattctcaatttcagccgtgacggtcttgttaattcaacagcagttcttgaggctgttaagagcggcaaggttgctaagtatgttacagacttcggaacagacgatatcctcggtgaagagaatattatctgcctcccacacctcggcgcatcaactcccgaaagtgaagaaaattgtgctgttatggcttgtgatcaggttaaggagtacctcgagaacggtaacatcatcaactccgtaaactatcctgcaatttcacttgcaagaacaaatgctgacgatacccgtttctgcgttgctcacaagaatgttcccgagcttctcaagaaggttctcacacagatcagcggcaatgttgaaaatatgctttcaaagagccgtggcgactatgcttacacaattattgatgttgcaggcgccggtgcagatgaccttgcaaaaatcgcagcagttgacggcgtaatcagagttcgtgcaatctgatttcgattaaaatttaatcgttgaaaatttaatctatgaaaaaagtccgaacacgcaaaatgttcgaactttttgtttgtgtgaatctaaatatgtagcggcgttcagtgaacgccaatcgaaacgattgcaaaatcggttcgaccgtatttcaaaatattggtgtatggttgatttggctttgcagccaaatcaaatggcgatcactgatcgccgctacgtatcgctatatattaaacttttaccagatggtatttttttgcattggcaattataaatgttacggaaattgcaacggcacacaattctgcaacgggcaatgccgaccatacaccgtttatgcctataaatatcggcaaaatcagcattgcggcacactcgaaaacaagcgttcttgcaactgaaatcacggctgaaatcttgccgttgttgagtgcggtgaaaagtcccgatgcgaaaatattcattccgcacaacagataatttattgcaaaaattctgaatccgctgagtgcaatctgctgaattttttcgtcgcctgccgagaaaattccgacaagcggttctgcaaaaaattcagatgccgtaatcattgcaaccgaaattatcagcgtgatttttatgcataatttgaacagcttttgcagtttttcgtgattttgtgcgccgtagttaaagctgatgacgggtgaaactcccgaagtgaatccaaacgaaaccgcagtgaaaataaagtgaatgtacaaaatagcacttatagccgcaacgccttttgcacctgcaaagtgcatcatttgaatgttgaacagcgctgttgtcacggctgttgaaagatttgtcacagcctctgacgagccgtttgccattgcaaagaggatttcacttgccttgaattcaggcttgccaaagtgcagagtctgctttttgttgaaaaagagcaaaagcggaattgcacccacagccattccgataattgtgccgagtcctgcgccgattattccaaaatcccacactgccataaaaagaatgtcaagcacaatgtttgtgcaacccgacagtatcgagaaaacaagcatgatatgtggcttgtctgctgttacaaggtacgattggttgagcatctgccagcacattacaaagccgtacggaatcataacgctgccgtagtcaatgcagtaggggagaattttttcgtttgagccgaacatcatgtacataggttcggcaaaaattgtgaacagcacagcaatgataacagaaatgaccgttgccgtgattgcaacaccggacataagtcggtttgcttcctcctgtctgccttctcccattttctttgcgattatagcatttgagcctgttgaaaacattaagcccacagccataaatacgagcgtgaacggatatacaatattgattgcggacaatgcgtcacttccgacacagttcgcaacaacgattccgtcaacaaccgtgtaaagtgacataaaaaccatcataagaacggttggcagagtgaatttcagaatcgtttttgctttgataggttttgcataaattgatgttgccataaaacttccttaccctcaaatttatatttttcacagactattcaaacgattgtatcataactttgtcgcaattacaactgatttgtctttttttgtaaaatatgctattatatacagacttaaaagcgaaaaaaggggcggttttatgtttaagggcgcagtttttgatatggacgggcttatgattgacagcgaaaggcttgtttattcaatttggcaggaaatgcttgatgaggacggcaaagagtttaatctcgacattttcaaaaagacaatcggacttcgcagtgaggattcctacgaatattacaagtcggtttacggcgatgattttgactatcccgcttacaaggcggagtcgagaatccgctattttaagcgtatcgaaaagaacggtgtgcctgtaaaaaagggcttgtacgaaatttttgattatttaaaatcagtcggttgtaaaatttcgcttgcaacttcaacctcgtcacaaacggctttgaagattatgaagaaaatcaatctctatgataaatttgacgcatttgtgtgcggtgatgatgttaaaaacggcaagcctgatcccgaggtttttttgattgccgcaaagaagctcggacttgagccggtggactgcgttgcgtttgaggacagcattaacggcataaaatctgcacatgccgcaggtatgaccacggttatggttcccgatttggcagagccgacagacgaaattaaaccgatgatagattttttgtgtacggatttaagcgaagcgatagaacgaatttcaaattgaaaatggaaaattgaaaattaatgtcgggcagacagtttgtaatgtaaaaaacatattatgcccgagcgtagtattgcaaccgttcgtacaaatctgtaggggaggatattatccgctacaggcggcggtcgcaaggctacccctacgagtttacggttctggcatattgttgactcaattatccgagaaaattacaaataattacaaatggttacaatttacaaaaatacaattgagcatggttaattattatacacattttccacatagttttcaacaattgttaaaaaagaacggcaatgcctgttgagcgttgccacggttactgcggaaaagggtaaaattaaaaataatcattgaataacagcacgataatatgttatactttggtaaacaacaatctttacggaggacaaaatgaagaaaattataaataaaaaatcactcaagggtgcgcttgctgttatgttgtgtgccgttatggcattttctgtctgtgcctgtgactttgactctgacacagaaccaaccaaaacggatgcacaaattcagtttgataaatattgtgacgatttgttttcggaagaacttgaggatgacgctcttaccgcacattttgacatttcaaatccgtcggactacggtctgaaatatgacgaggaggactataccctcggtcatgtgtccgatgaagatacaaaagaatcctttgatgaactgaaaaaggcaaaaacggatttggaggagtttgaccgttcgggacttacttcttctcaaaagcagacatatgacacccttgaaagctactttgaaattcagctttcatatgagggtacaacagaattgcagagtatatttgcaccgcagtcgggagttgttgcaaacctctttaccaccctgtccgagtttactttctatgaaaaggatgataccgacctttaccttgctgttttgaaggacacaaaacgctatatggacgagtgcattgagttcacaaggaaacaggctgaggacggttactttatggctgaagatattgcacagcagtcaattgacgagtgcgaaaagcatattaagaatgacaagtccgtgcttgttgacgagtttgagtcgagaataaagtcactcggtcttagcgattccgagaaaaagactgttgtcgaaaccaacaaaaagtattttgaagaatactacattcctgctttgaaatcagcaaattcagcacttgaaagtctcaaaaaatcaggcaaaaacgaagaaggtctttgcggttacggcaaaatcggcaaaaagtattatgaggcaattgtcagggacaaaacaagcagcagcatgactcccgaggagcttaagtcataccttacaaacagctttacaaaggttggaatgagcatgagtaatgtttcacaggatgacttgagcaaatttcaggactacaaacccgactttaaggacgccgatgaggtgcttgaatttttgattgagaatatcgaggaggactttccgactcccgttacaacatcttacacggcagattatatgagcgattccgcaaagagcgacaatgtgggagcgtactatgttccgggacgaattgacgatacaagcgttaatatcatcaaaatcaaccccgactttgcaaataagggtatgactcagatgtacacaactcttgcccatgaaggctatcccggtcatctttatcagtttaccgcatcaaatgcaaacaaggatatcccgaatgtccgcaagattttaagctttatcggcgcaaccgagggttgggcgcagtatgcctcgaaatgtacacttgattaccttgatacaagcgagggcattaagaagcttatctacgcaaatgatattctcggctatattctctattccatggtcgatgtcggtgtgaactacaacggctgggattatgaaaaagtcaaagagtatatgtcaacggcactcggttcggctgacgatgagagcgttacagccgcaacaaaagaggcgtatgaccttgcccgttcaaatccgggttattttctcccctataccgtaggctacctcaagatgattgatatgcgtgaaacagccgaaagcgagcttggctcaagctttgacgcaaaggagtatcacacattcattatgaatctcggaatcacaagcattgatgtctacgaaaaagcccttgatatgtggcttgaaagcaagaagtaaatttttggtgataatcttgaatattttttacaggtatgatataattaactcattgatatgataaatctaaattggtatggatttttctaagatgtgattcttattttcgccatacactcattatgggtgtatggcgatttttattttacgcaaggggtgttaatatgggcgttaaagcggaaaacaaaatggcttatgaacctgtcaacaaacttataattcaaatgtcggcaccgccgctgatttcaatgttctttcagtattcatacaaccttgttgacagtatgtttgttgcggggataaatgaacaggcacttgcggcagtatcgcttgcattcccgattacaacgcttatgaatgcgttgtccgtgtggataggtgtgggtgttaatgttttgattgcaggttatttgggacagaaaaatcagcaaaaggcaaattctgcagcggctctcggagtggtaatttcggtagttgtcggagtgctgataaatttcctttcgcttttcataataaatccctattattcggcttttacgcaaaacaaagagatttttgaatacggaattgcgtatatgagcgtctgcgtttttatgcagataccaaatatggtgcatattgtaattcaaaaaatacttcaggcaacaggcaatatgattgctccgatgtggtttcaaattgcaggtgttgtattcaattttgtgtttgaccctttgctcattttcggcataggtccgtttccgaaaatgggtgtgatcggagctgcagttgccacggttttaggctatgttgtttcaacaatcattgcgttgatacagctgtttcttacaaaacaaaaggttaagccggtgtttaaaaactgccttgaaccgcagatgataaagctgatattttcctacggattgccctcgtttgttatgaatgcgttgggagcattcaccgtgaattttgcaaatatgtttttggtgcgatattcggacacggcggttgcatttttcggagcatatttcaaggttcagcagttgatttttatgacggtgaacggactgattcaaggctgtttgcctataatgcggtttaattacagagcgaaagagtacggtcgccttaaacaagcaaataagagcggaacaattattgcgactgttatgatgattgtcggtatgctcttggtgctgattttcccgaaagagatattgtttttgttttcggcatcggaagaaatgtgtgcttttggagtgccggcaatgagaattatgtcactcggatttgtgttcagcggcttttctgcaatgattgcaacctatgaacaggcaacagacagtattatgcccggcgttgtagttcaactgttgcgacagggcgtgctgttagtccccgtaatttggcttttaaacagcgctgttcaaatgacaggcatatggcttgcgttcccaattacagaatttgtcacatttcttgttgctgttgtatttgcaaaaattaaaaatcattgaataaataaaaataacaaccgccaaaacccgatataatggattttggcggttgtttgttatttaaaatatgtttaattttaaattgtttttgcaaaaacattatcagatgattttgctctgaaaattgtttttacgagcaagaatgttatataaacataaagtgcggtgtagatgattgccgtaaattgaaggctaataagctcgtaggagaacagatagtagcaatagcctctcaggcttataagcgttgacacaatcggaatccacaaatgctttgcacttaccaccgcatagacaattaaaataatgtcaagcagataaccgtagcgttcgtgcattgacgaaaggaacatgatacaggtgaacacagtccacgctgttgtcagaagaaaagtttcaaggttcttcaaatcaccctttttatagatgataatgcacatcataattccgagtacggcaattgtcagaaagaccgaaaactgcttgaacagataataatatgtcatatcgtttccgtcacatatgagtgcataaaagttcggacagttcatctgaataagctttccgtagtcggtctgttccgcatatattgtgataatatcgataaacggtctacccataataattgcaggcaggcacattatcacatcaaccgcagggattataaagaaatgcagaatcgaaattttctttgtcgaaatccagtaataaagcagaacaggaatgatgaatacggtttgtagcttgaatgcaaacgcaatgccgatgaacacaaacgatgcaatcggcttgtctttgtgcaaaaacaggattgcaaggattataaacgaggtgtaaattgaatcgcactgcgcccaaaacgatgagttaaaaatcaccgttgccgaaagaagtacggctgagtaggtgagtatcgctttgagccgtcggttattctttgcaaacgaataaacaagtattgcggttgaaattgcaagtacaaaatcgaatattattgatacgattttgtacgcatacagagcatttagcggcaaaagagtcataagatagattatgacttgatacggaatgttgtagttgcccacctgagttgcaagccccgtgaaatcattcagcttgattatgctccaccacgaatttaaaaagctgttgaaatcatcgctttgaaaatccattccgcaggctctgaggaaaattgcaataatcgttaccgcaacgagtaaaaataaaagaatgtgtttttttataaagtcaatgactttgctttctgcttttgtcatagagaaaattcctgttcgggtttaaataaaaccgattttcttcataaccttgcccattgtgcgactgctgattttaagggcaatttcatcggcttttctgtaacagctttcaagatatgccttgtctgcaacaagcttttcgtagcgttcacgaatcggacgaagttcttcaacaactgcctcgcctacagctgtcttgaagtcgccgtagcccttgccgtcaaaatccttttcaatctgctcgtatgaaagacctgtaactgcgctgtaaattgccataaggttatttacaccgtctttgccctccgcatagcgaacctttgcctcgctgtccgtaacggctctcttgaacttcttcattataacctcgggtgcatcaagaagatgtacacagccgttgacattttcatcggacttgctcatctttcttgtcgggtcctgaagactcataacccttgcaccgttctttggaatgaaaccgtccggaatcttgaacacattgccgtaaatgccgttaaaacgctctgcaatgtttcttgtaatttcaatgtgctgtttctggtctgcaccgacaggcactttgtcagcctgatagagaagaatgtcggcagccatgagtacgggatatgtgaaaagacctgcgttgatgttgtcggcatgctttgcagacttgtccttgaactgcgtcattcttgaaagctcgccgaactgtgtgtaacagctgagcgcccatgcaagctctgcgtgagtgtgaacatgactctgaatgaagaaaaggcttttttcaacatcaataccgcaagccataattgaagcataagcatcaattatattcttacgcataacggcaggagtctgtcttaccgtgattgtgtgcaaatctgcaagagcgtaaatgcagtcatattcgttctgcattgtaacccagttgcgaaccgcaccgagatagtttccgagtgtaattgttccgctgggctgtattgcgctgaatacaacctctttttttgtctgattttccattattcccctccgtgattaaagactgtttgcatactcgccgaggatttttattcctctttcaagctgttcgtcagtcggtgttgaaaagtttattctgaaactgtgacaggtttcgttttcgtcagttaaaaatgcgttgcccggaactacgcaaacctttttgagaacgagttctttgcagaaattcggcatatcaatatcctcgggcaagtcgcaccaaatgaaaagacctccgtcaattttatgatatgtgattttcggtgcgcagtatttgtcaagaagctccatgcagaagttcgctttctttgtgtagatttcacgaagctttgcaaggtgagcgttaaagtcatactttgtgatgaattcatcgcatacatattgtgcccagatatttgtatgtacatcgttgccctgtttgcacacaacaagcttttgaaaaatcggctttggtgcaattgtgtaagcaacacgcatgcccggtgaaattacctttgagaatgaaccggcatagattacaattccgtccgtatcaaagctttttatgttcggaacatattcaccgctgtaacgcaggtcgccgtacgggttgtcctcaatgatgagaacaccgtattttttggcaagctcataaactttcttacgcttttcaaggctcattgtaacacccgaaggattttgaaaattcggaattgtgtaaatgagctttgcgttcggattggcttttaaagcctcttcaagcttttctgtgctcataccgtcaggctcaacgggaacacctgcaagctttgcgttgtagcttctgaatgtgttgagcgagccgatgaatgacggtgcctcgcagattacaacatcgccctcgtttacaagagcctttgagcataaatccataatctgctgtgcgcctgttgtgatgagaatgtcgtcattgtcagagcctgtgttatgctcctttttcatatattccgtaaggtgctttctcagcggagtgtaaccctccgaaacgctgtactgcaaaaccgaaatcggatcttctgcaaaaacctttgccgagatttccgcaatctcctttgagggaaatgcatcgggcgacgggtttcctgccgaaagcgacacaacgctcggatcggcggcatatttgaaaatttctctgatagcactcggcttcaggcttgaaaccctgtcggaaaacctgtattccataaaaatatctccttttaagatgataaggattttttaaaattccataccctgtaattctatcacgaattgcatatatgttcaagaaatttgactgtttttactgcgattttattcaaaaaatgtgtaatttattattttgcatttgtaaatgttaattcacggaaattgtattttttgtgctttttgtattgtttttgatgagtttctgttgtataatctaaatgataatgtccttacggtcagagcaaggcttgctttgattcaaacaggagtacactgcgagtaattaatacacttatataattcattgaattcaaattgaatttaaaaatcttcagtttgggagagtaacactatgagcagaagaaacgattacgattattttgatcttgataatttcgatgacagcattgattcccgtgaatatcgtcgcagacagcaacagcgccgttctgcaagctatgccgcaagaccgtcatcacagcgtcccgccagaagacctgtaaaaagaagaaacaaaagaagaaccagaaacagaattattatcgttgtgagcgcattggtaattctgtttgttattatttttgttataacttcaatttttaagggttgttcaaaggaagatgcccttgcaagcgttcccacgggaacagtgggcacaacggcgtctcccgacgaaaccgcaaaatcttcgaccgctaacaaagcagacgagctttctcctacatactttatgacaccgggcataaaggacgacaatacaaacggaactctttcgtacggcatttatgtgtggaacaaaataggctacgaattgttcagcagtgatgacgcaagagcgcagaactatgctcagacaatcaatggctttgcagacaagttcggcagttccgtaaaggtttatgatatgattgttcctaaccataccgaaatgggacttccgcaaagactcaaagacagcgacgctccgtcaacctcacaggctgacaacatcaaggcggcttatgcggctctttccgataaggtaactccgattaactgctacaaccgtcttgcggaacataatacagattacatctactttaagagcgaccaccattggacaggcctcggcgcttactatgcttacacagcatttgccgatacaaacgatttgccagttctttcgcttgatgattgcaaggaacagaaaattgacggctttacaggctcgtttaccaactcggcagacggtcttgacagcgatacggtaagttattggaagttcccttataatgtaacaatggatatcacacaggcagacggttcttccgcaagctatgacagtccctactatgaagccgcagagggcggttcaaacacctacggtgtgtttattatgggtgataatgccctcacggttctgaaatcagcttcgaaaaatgcggcggcaggcaagaagattgctgttgtaaaggaaagctacggcaacgcttttgttccgtatctcaccaataactacgaagaagttcatgttatcgatttcagatatttcaaacataatcttgttgattactgcaaaaccaacggaattgacgaggtgctttttataaacggtgtaatgagtgccaacactcaggttcagcttgacagtatgagcggactttttaactga

SEQ ID NO: 220 - DNA, 71084 bp, unidentified
  source 1..71084: mol_type = unassigned DNA
  misc_difference 336: note = a, c, g, or t
  misc_difference 337: note = a, c, g, or t
  misc_difference 338: note = a, c, g, or t
  misc_difference 339: note = a, c, g, or t
  misc_difference 340: note = a, c, g, or t
  misc_difference 341: note = a, c, g, or t
  misc_difference 342: note = a, c, g, or t
  misc_difference 343: note = a, c, g, or t
  misc_difference 344: note = a, c, g, or t
  misc_difference 345: note = a, c, g, or t
aattatccggcagccgccctgttacaatcattgcgtataaagcacccgcaattattttaatgtaacttttgctccctcagcttcaagtttagctttgatatcctcagctgttgctttgtcagctgcttcttttaatactttcggagctccatctactacgtctttcgcttcttttaagcctaagcctgtagcttcacgaacaactttgataactttaactttgttcgggccaacttctgttaactctacgtcgaactcagtcttctcttctgctgctgcgccctcgccagcacctgctgctgcaactacaacgcctgctgctgcagatacgccgannnnnnnnnnaactttggaagctcctgcagatacgagttctacgtcaaactcatctttttcttctgctgctgcgccaccgtctgctgctgctgcaactacaacgcctgctgctgcagatacgccgaactcttcttcacaagcttttactaaatcatttaactctaatacgcttaactctttgatagcatcgataaattctgctgttgttaattttgccattataattttcctccattataatttattgtcgcaccggtcagtctctcctgccgtgcccatatactgtttcatccagccgccggatagattactctgccggtgtctctgctggttcttctgcagctgctgtttcttctgccggagcagcctctactgctgcatctgccgcaccgcctttttctgcgatctgattgagaacgcgagcaaggttggtaatcggagactgtaagcttccaagtaatttggaaagaagttcttctcttgatggtactgctgcgacagccttcatgcctgcctcatcataataagtaccctcaacaacacctgctttgatttcaagagcaggagctgttttagcgaacttagctaaaactcttgccggagctgttgcatcctcagtagagatagcgaaagcattcggtccttcaagaacgtctcttaagctttcgaactgagtaccttctactgcacggcttactaaagtatttttgtatactttgtaagtaacaccagcttctcttaatgctttacgtaactgagtatcttctgctacggtaagtccacggtagtcaactactacgaccgactgtgcatctttgatgttttcagaaatttcctgtacgataggctgtttgagttctacttttgccacgaatcgtgcacctccttttattattttgccgacggataatccgccggatcacagtgattttctcactgctgctgcataaaagacttgaggtatataaaaccgctttattcagattaaaatctgcaataaaaaactccctgcaaagacagagagatacggtcaaaaaaatcttgataaagatcccctcggcaggtcgtcttacgtttacgccatatggcacctgctgtcttcggcatatatgcaaatcgctgagtaccggaaaaccggctcaacgatatgcattataacattgtatattatggttgtcaacaattttctgcttttactgtgtaattttaactacgtttaatcttacaccaggtcccattgtagatgcaagagttgcactcttaacatactgaccttttaagcttgcaggttttgctttgttgatcgcacccataagggtctggaagttgtcgcttaactgttcttctgtaaaagaagcttttccaactggcacgtggataatatttgttttgtccaatctgtattcaatcttaccagctttgatgtcgttaacagcttttgtaacatccatagttactgttccagccttcgggtttggcattaaacctttcggtccaagtacacgaccaagacgtccaacaacgcccatcatgtccggtgtagcaacaacaacatcgaagtctaaccatccctcgttctgaatcttcgggatcagctcctcgccgcctacgtaatcagcgcctgctgcctgtgcttcatcaaccttggttccttttgcgaatactaaaactttaactgatttaccagttccgtgtggtaatacaactgcaccacggatctgctgctctgcatgacgtccatcacaacctgttctgatgtgaagttcgattgtctcatcaaatttagctgttgcgtttttctttaccaggctgattgcttcagcaacatcgtactgagcagccttatcaaaacttttcacagcttcctgatatttctttcctcttttcattctaaaaaaacctcctggtggtattatcgggagagggccctcccacataatcgttaataaatatcgttaatttttgcagaatttctcagaagaatgccgttcttgcattcttccaatgaatttgctgtttttgcaaattctattcttccactgtaacacccatacttcttgcagtaccagcgatcatgctcatagctgcctctaaagatgctgcatttaagtcaggcatttttaattctgcgatttcctgtaattttgctttggaaagtgtagcaacctttgtcttgttcggtgttgcagaaccagatttaatgttgcaggctttcttgattaatacaggagcaggcggtgtctttgtaacgaagctgaagcttctgtctgcgtatactgtaataactacagggatgataagatctccctgatcagcggttcttgcgttgaactgttttgtaaattcaacaatgttaacgccatgctgtccaagagcaggtccaactggaggagcaggtgtagccttgccagcaggaatctgcaatttgatatatccttctactttctttgccatttggaattgcctccttaatccaatgtttcagacataatctcatgcctgcgcacagatcctggtctgtgctttaattgttaagttttacatctgcgaaacttatttctaccggcgtctcgcggccgaacaattcaacattgatcgtcacactctgctttccgtgattcatcgcctggatcactccgatagtgtctttccagacacctccggtaaccacaacggtgtctccctctgtaaagtcaacttcaatgttctctttcttgattcccaaaggtttcatttccatatcggtaagcggaaccggcttgcttcccggaccaacaaatccggtaacaccacgggtatttctgacaacataccatgtgtcgtcattcataaccatattgataagaacgtatcccggaaacattttctttgatacggatttttttgcgccatttttcatttcgacaacatcctgcatcggaacgcggacctctaagatctgatcttccagatgtctgttttcaattgtcttgtcaatgttcgcttttaccttattctcatatcctgagtaggtatgaacaacataccagtgtgcctctgccataaatcactctgcctccattaaaaattaaaaccaacaaggaaatcaacgccatactgaattgcgaaatccaaaagcgcgatgataagacctaatacaacggatacagcaataaccgctgtggtctgtcttacaagtgattgtttctccggccaaataatctttttgaattcagccgaaagaccggtaaaccagctctcttttggagccttgtctaacttctcggtttctcccattttttcactcctttgccacgcgcgtcttatttggtttctttgtgtaacgtatgggtcttgcagaatctgcaatactttttggtttccatcctgtcaggatgagcttttttgtcttttgtcatgttgtagttacggtttttgcattccgtacatgccaatgttatttttgtgcgcacaacttccacctccattaaaattctttgtgcttttttctgccccggtctccgtagtgagacgttttttaaggatcagcgacagtccttaaaaaaaggcataaaaaaaagacctacttccatcgcctgtctactatatcatatccacttgtttccgtcaatctttttttgtatattatacccttttaaacctttttgattattttttcctatttcacatttttttctcaaatggtataatatttttatatagttagaccgaaatacttttaaagaatttttaaaaatataattaaaatccccacatttatcatgccaggcggcaaggatgctgtcctataacctgataaatgtatatatttcatggaagaaaggaggggttttcttggctgctattgacagtgcctatcattattatttaagcacttatggcacttcgaaggtatcgcgttatgatacccataagaagagtcagcttcgtgctgtctataatcagattgtaaaaacaaataaagatactcctctgtataaaattccagattccacggatgtgaaaaaatttgcgattgacctgaaagaacatacccgttcgatccagaatgtaatcgctgccctttctgacaacgacgaggggattgaaaatgcattcaacaaaaaagttgcaaagtcttccgacgaatcttctgtcaatgttacctacattggtgaggatcagagtctcgataattctttgcattttgatgtggaggtaaaacagcttgcagccccacagatcaatgtcggaaagtttctttaccctgatgaatgcgatttcaaaacaggtacttacacattcgatatatcaactgatttaagttcatatgagtttcagtataccgtaagcagaaatgatgacaaccagcatattcttgaaaagcttgcacgcctggtcaattcttcaggtgccgggattcatgccgatcttgccaaaaatgccagtaacaagattgccctgcgtttaacttcaagtcagaccggtcttgcagacggtcagtcctatctgtttgaagttaccccaagttccgatcatgcatccgcaaaagcaatgcagacactcggtattgattgtgttacccagacagcgagtaattcttctttcttattaaacggtacggagcatgcatctctgtcaaatacttttactgtcaacaatgcttttgaactgacactgaataaaccaagctcccaggcaaaccctgtacagatcggctttaaaacaacagctgactccattgtagacaatgtccagtctctggtaaatgtatacaacaatctgatccagttaagctatcgctatgacagcacacaggaagcagataaactgcggcgcgattttacacaggtggtaaaaccttattacaatgaatttgagtcgtatggattaaaactttcagatgacggtgccatcaaggtcgatacacatcttctgacagatgcagttacttccgcggatgcaaaagaatgctttgcaacattaaataagtttaaaaacgatctcggaacgaccgccggaaccgtctctgttgacccgttaaattatgcaagcaaaacgatgatcacttacaaaaaaccaggtcataagaatttttcctgcccttacctgacctccgtttattccggaatgatgttagacagatattgctaaacggacacttacagattttctgtagtgtccgtttaatattccaatatcccagatgcaacttcagattatgcatctttcgcactgatcatgtactatatatcattttcctgattttcattttcttctataatatccagcatcgtatttattctctctatataattgtgatgctcccttacttttcgataaccattttctgcgattgccagacgttcttcctcatgtgccagataatattctgctttttcacaaagatcattgattccgtcaaagcataccaggtcttccccctctttaaaataatatggtatttccgcctgataatttgtcatcagaaagcctcctgccccaagcacatcccataccctgagtggtatgccgctcttgatattcggaatcgtaaaattcagattaatctttgacatacgaaaaacctgcggcagctcactccagtaatcaaccgaaccacagtactgaatccgcagcatatcacttacatcactgttactgtacacattgacatgataacgttttgacagttcgatcaatgcacgtctgcgctccacttccgcaattttaaacccaagcaccgtcgtctgaaagatcagtccaaggtctgaaaaagatccttctgatttttccagttcaaaatattcctgcagtttttccaaaatatccgtagtcagcataggttccactatattggcaccgctaatgtttaactgtgcctcgatcacagcatcaaaatatccgcgcaggtattccggcagcctgctttttatcttatcataagagttccgttcataaagacttccgacaaacgcaatgtctcctttatatttctgtatttccggtgaatttgcaattaccgtatccatccggtccgtatccacggcaagtggcagataccagatatgttccactcccatctcccggaattccagatagtttgtcttatcaaaggtaaatatataattacacggatgaaaaatagactcatgatacatgctgatcagcggattatcacagctccaggatacatattttatccccattttctggcagacattcgagatcagtgcaaaataattgaccgtaaataccatatcatagtgcgtttcccgcagtttgttttcaatgattttttcaaattccggatcgatatcataattgccaagatgctgttcgatattatccaccgtatgtcccagtaataaaaaagtctgctctatgtctctgtaattataagctttccagcgatacattaatatgtgcataataatctccattcctgtgccgtgtcagccaaaataacgttttcatctgtatgtaaaacctgttgcagggagggaatgagaacctccgctctacatccaggcttcccggatccactccgctctgcttttccacgtatgatgctcttttgctgactgatatccacagtctgccatcctttgtgtggactgcatgtgtccgaacagatcaaatacacgttccggcagggtacggatctcatttcttgaaaacatgacaagttcttttccatccgtaaattctctgcgcagataggtggaatcgtccgtcaccactgctgctccggcaagcattccgttaaaaatacggtcatgtgctccggctttgaaccaggtcattgtatttaagacgatcttactgtcgttcatcaaaggcagaatctccggtgcaagtacttttccaccatacaccagatacggattgtcactccactcacactgatcccagcctgttccatatgccgttacccgtattccgttttccaccagaatacggacagcctgttcacggaaaaatgatgtcgcataggaatcaatgaaacgcatctgtacaatgatctcatgaacacgtttctccgatatgtcattccgcttatattttaagtactcttcgatcacatcctccgtcgtgcggtccggatgatgcaccagttctgacaataccgcctgtgccatctcctctccgtccacttccgggatggatgagagatccggaatcatcttcgctactgtgtagattggaagtgcccccgcatataaaacatcgattccacgctccgcgagcggtttatgtctgctgccaagttccaccccggcatgtggcagaaaatccgtataccggatatttttaaaatatctgcggatataccagacatggttgcggtccgtgcacaacacaatagatgttgccggtgcattctgcagtggtttttcatagtgaaacggatgatccatcaggatattgatatatggaatattgtaagtttcccagagatttggctcttcttccgcagaacctgctctttttgatcctgctgtactttggaaaatgtcctgcttcaaaagcatccctgttccggtcatgcctgccggaagtgacagattatatcccaggttattaaacgtcacacagaaaaacctctgatctttttttgcaccatctccgatacattcgatcagcgcctgcttgctcacctcttcgagacgggcatcataggtaaaggaagcatatcccatggattcaaaggcatttttcagttcctgggtgaataagtcaagagtatcgtagatgccggtgatgtagatgatggttgtttgcatggtggtctcctgttataacttgattctttctatcctgcagctatgtcttttataatcgtcctttacagaatctgtattgtcataattaatgccaaccaggatcacttctccatggtaatctttcagactctgcatgtattccttcttctttatctgtgcaatggctgcatccgaagatttatcccattttaattccaccacgatcgctggcacatctctatattttctcggaacaaacacaatatctgcaaatcctttcccccctgcaagttcccgatacattacataatctttccgcgcggcataatatgccagtgaaagcacacatgacattgaattttcatcattatactttaagatagatatattttcctgatgcacctgttcaatcatttgtgcaacatattcttcttttccatctattgttgcccaaagcagtgcttcagaattacggattgcatccataaccggttcccatccgccatcctctatgcagttaataaactctttctgcacctcctggtttggaatagaaacagtctgattttcaaaatcataggtcaggtaccccaaatgcaccaaaagtgtaaatatatcatctacgcttgcaaacgtggacatatcattctgaaatttatctggattaattttaatatgactgcctgaaataagctgcgtaactaacgctttcaggtgatacatatccatctggatatatttttttaatgcctcatatgtctctgtcttcgtccaataactgtcaaagtcatgtcccagcaatgacataacaaccgatcttggattataaatctgaattccctttaaatcatatccatcgtaccactgcttcatcctgtcataagacatcccatatgacatacacagactttgaacttccgtttctgtaaaaccggtaaattcagcaagttcacgctgattggtcatggaatattcgtcaaacatattaagtgcagaatgctcgccatattttttgatcggcagtattcccgtcatataagccaacgcaatatatggcttatctttcatccacaggcgcaagaaatccagatattttttttgcgcttcatcatcccccggatatcttcgaaatatgcagtcccactcgtcgataatgatgataaatttctgttttttctgactatagatgttctctaatacatcaataagatcttcccagtcaaagcagtctacatccccgtattcccgcctgatatcccataaaagtctcttttgcatataatcgatcattgcatccaccgactgcgcccggttaagaaagtcaagcatattgacatgaaggacattatatttattcagatttgcctcaaaactttcatcctgtgcaatcttataatccgcaaacatgtttttcgaatcacatcccttgctataataagctacaagcatatttgcagtcatagattttccaaaacggcgaggtctgcttacgcatatattctgatgttcggtattcagattctgattcatttcagaaatcagcatggttttatccacatatatcttggaattaagtgctttctgaaattcttcatttcccggatttaaatatattcccattctaatctccattctgcatttgaaaaattatatttttcactctgtttctccaataagctgactataacaaatttaactgtttatcaattttaaacgtttttttgccggctcataattaccgcacttctgataataatactttgcctcactgattttctccagacattcataaataactccaacattataataagctgcataggaatttactcccgccatcctgcagtcccggtgtttgaccgctttcaaaaattctccaactgctgcatcaaacatagcgttgttcatataaatgagtcccatcaggaactgaaaatccgcactatttccaaattcttcataaatattttcaaagaaaagtgcttccccggcgcgtccgctgttgatcaaggcatagccgtaggtttccaccatatcgatgacatattctaactttggttcaaggtcataactgagcccatgggcgaaccagaagcatgcctcgttataatcttctgccatgtaatagctttttccaagctgatacaatagatacgggatctgctgctctttttttgcatccgtaattttagatttctgctctgcatccgtatcctgctttgcgatattctgatctaactgcgtggcatgtgcttcggcatcccatcctgaattctttaattcctgctctaacagtcttatgttgcgcagcgcttttgcctttttttctttcttcggaagatcataacccgtatggccgatgacgaccggtgcttcgtatgtacgatattccttttcgtcacaggcagttacctgctcatggattcttcccgtgtaatgaaaactttcttttgcaaaaatgcggttgatccactctttattttcctgctttccatcttttccggaaataatattgattctccggatcctgccaacctcacctggatgttcggcaatcattttctctaactgtacccgatcaatctgctgtaaatattcatcgctgtcaatgaccatcacatacggatgtgctgcttttgaaaccgcaaaattctttgctgccgaaaaatcatcgcaccatgggaaatcatagatattttccgtatattctgcggcgattttttttgtctgatctgtcgatccggtgtccgctacgatcagctcaaatccggttttctggaatgatttgaggcagcgcgctatattgtgttcttcgtttttggtgatgatgcagactgataacatgtggttgttctcctgtgtgccgatcgctatattggtgggcatattcactcctccctgtctgtcccaatcaaaacttttttgccttcaaatgcaaatccataatgatatatctgttcctgtctgattcctttatcaagcaggtctgcatcgtattttttttcacaaatctgctttaaggcagacagaactgtctcttgaagacttttttcctttcgtggatttcgaactttaaattctaaaataactgcattgcattcctttgaatttttgggttctaacattacatcatatctgccaaacccactttcgcggttggatttaaggtgatatctatcccgcaggtcaacaagcagacctaatacaaagccatgataaaaacgctcaggctctgccccggatgccctttctccggtgtcgaaataactaaatgtctgtatagcaattcgattcatgtattcattcatcgcatccacatcatcaagtaacatcgcctttacaaaatcattgtaatctggttgtacaggagcgaaccagtcatgtaccataccctgaaacattaactttacttccagattcgtcaacgcaagctggtatttcggcatcttcccctcctcaatatcctgatacgtttcataagataatactttcaaatatccactcgccagcaaaagactccaaaccgctttttcatttccatttagttgattgtatacaatctgctcatcaatttctgaccagatgcattctccgcataataatttttcaaatttttccttaattgtacggtttccttcctgaatcaattttcctaccagactattcgcacttgtatttgcccaaaatgttttgtataactgtgtatcgagataatttaaaattgaccatggattataaatatctttgtgctccccaaaaatgaaaccatcgtaccatctttttacttcctttttttctttctcaagaccatactgttccaatgcatcaaagacttccttctctgtaaaaccaaatacagaagcatattcatttgatgtagtcgtaactatctttaagttattcaaatctgaaaaaacggactccttacttactcttgtgattcccgtcataattccacgttccagtgccggattcgttttaaatgtcgaattaaacaggcttcgggtgaatgcgacaagttcatcccagtaaccatccacaaatgcttcctgcatgggtgtatcatattcgtctaacaaaatgataactttttttccataatatctatacagaaaatctgataactgatataaagaagatgtcgcatccgtctcttttatattttcctccaacatacgctcataatatgctctgtcggcatctgtaagcttttcactgtctttaatataacaaaactttatatatatgtttcttaacacctcacacatcttttgttttgttttctcataatctctctctttaatccgcgcaaatgacagactgatgacaggataagttccctgcagctcacggtatttttcttctttccagattgccagatgttcaaacaaatctgacctgccggcatagtctatggaaaagaactgctccaccatactcattgtaagtgtctttccaaaacgacgcggacgggtgatcaaagtcgcactgtccccgcaatcccaccattctttaataaaaggcgttttatctatataaaaatagtttccctggatgattgtggaaaaatcctgtataccgatcgctatatttccagacattatgacctccctgcttttcagactgatattgtgcgttcctttttgttgtgataaattaataatataccatttttgtttattataccatatgtaacctttttaccaggagaatttcgatctatgaaaaaagtaagtgtcatcatcccatgttttaatgcaacaaaatatcttccgaaatgctttatgtcacttgtacagcagacaatcggaattgaccagatcgaactgatctttgtagacgatgcatccacagatgaggatgctacctggaacatgctgcaggaatttgaacgcgcctatccggaaagcattatgatcttaaaacttgaggaaaatatgcgccagggcggtgcaagaaatgttgccctgcagtatgcaacgggtgaatatattgcatttgttgacgctgatgactttgtcgctgagaattttctgttggaaacttatgaaaaagccaaagaatcggatgctgatatcatccagtttgaatatttttattatacagaccgtctgggtgccgtggactccggtcggaacattacaccggaagtaattgaaatttcttctgtcagtgaccgaaaaaaatttctaatctcagaaaaagttacctatggctgctggaataaactttaccgccacactctgctgaaagaggctcatacagcctacgcagaacatgtcatttatgaggagccactttttgtatacccgcttttatattttgcaaataaaatcgtaatcttaaacgatgcctactattattacagacaaaatgattctggaaccatgcgaaatgatatgagacaggaagaaaccctaaaaatgcatgccgacgtccagcttgctgtctggaatttcatgaaaaaaactccatttttcaaagaatactatgatgaaatcaaactatattttctccatacctatctgtatgagacactgtattttgcaaaactccgggattttaaaccctcctatgctttctacaaagaattagaaaaaacggtgattacagaggttccggattatgatgagtccacttacagtgctctgattccgaagcagatggagctgtatcggatgatcggggaggggatgacggaggtgaagtttaaggagtattgggagcggctgtgaggcactccctattataaaaaaagcataccagatcatctaacatctgatatgcccatcttttttatctataacttctaattgcgtctttaaaatattattttgttcttctacttcaaagtacttttccagcaaaaagaaaacatttgctattaagggagtagataaggaatttaactgattagccataaataatgatcttgtaatagtatccaaaaaagaattattatgataagtgtctggcaatcggtaatttttgtccgtttcttctttgtgaagccttatgaaacccaaaaataactcccacgtactcataaaagccagttgttcgttaatcctggatgcagcggataaagaaaaaccatcatctgtttggatatttccgcttaccagcctgaccttaatgattgcagctgtcatacaggcacatactttatgccggtctaataaagttttactttcaccattttttttttggtataaaactcttaatatggtcttttgattgagatattcttcatacaatgaatccggattatcgcaaaaacgaaattgcctgtactcattttctaaatgcacccctagttttttgactacaccattgtaaaattctaaaaaatctattttattcattatgctttgatccttacatcatctggcatttctattttcttaatggcctttgcgatatcataatctccattttcatcatttcctgttccttcgatttcaacaaatttcagattgtctacataaaagccatatgtcaattctatttttttttctttggattcactatattgtttcattgcatataaattccatactttacacattgcagctatagtaaaaatgaaaccaataacaatcacaatttcatttgccatattttcaagcctccgctctattctctttctctatattaatcttatagtcattatatacgactgctaacggtatggttacaaaaaaaattaccagtaattttatccaaatagacttcataacaacatataattcaagtattgcaactatggatacgatgattgcaataattgcaaaccacacaatagcaattgattctctttttaccatagttgaatactttttattgtctgtaaattgataaaaatcatacatattattacatgcctgcaccaatatagttacataacatgatttatagtcaaacaatgatgcaactatacttatgccaatagtaagtgccagtacacaaacttttaaaaaagcctctctggaagaaagatatatcacatctcttttctcttccatatttctcctcttgttacgtattttaccatgtatcaccacgataccttcttgaacttcaatagcatttacaattgtaacattattgtgcattctatgcaagcattttctactatctttgcagttgttaatatgttttccaaactgtatctcttccatccgttatctcattatccaagtttataactgaacaagatacatctggctatgctcgcaccgcttcccgcaacattcttgccatataatcgatcatttcatcagtcatacctggatacactccaatccagaaagtacgttccataatcaaatctgtcgtttccaaagaactgcatttccgatagccagtctgcattttccgcatttcatcaaagcatggctgcttaatcaaattaccggaaaacagcattcttgtctgcacgccatgtgattccaagtactgtactatatgattcttatcaataccatttttacatgttatcaaaaaaccaaaccatgaaggtcttgagtccgggcatggttccggcaaaataaactgatcggtcagatcgcacagctggtctttcagccgttcaaaattatgtcttcttttttccacaaaagatggtagtttttttaactgcgcgcatccaatagcagcctgaagatccgttgctttcagattatatccaaaatgggaatacacatacttgtgatcataaccaagtggaagttctccatattgtttgtcaaaccgatgtccgcacagattatccttaccagatggacacatgcaatcacgcccccagtcacgcaaggaacggataatcttatgtagcagcggatgatctgtatacacagctccgccttctcccatcgtcatatgatgaggcggataaaaactgctcgttccaatatccccaatactacctgttttcttccatgttccgttcagacaatactcacttcccaacgcatcacaattatcttccaccaaccacaaatcatgtgcgtcacaaaattcccgaactgtttttaaatcaaacggatttcccagtgtatgagcaatcattactgctttcgtcctctcactcaatgcctgctctaactgtctgacatcaatattatactgcggaatcgtcaaatcaagaaaaacaggtactgcaccatactgtaaataaggagtcactgtcgtaggaaaccctgctgcaactgtaatcacttcatctccccggttaatccttctgtcacccagcagcggagatgttaatgtcataaatgccaatagatttgcagaagaacctgaatttaccagggaacagaattttacgcctatatattccgccagttcccgttcaaactgttctgtataacgtccggaagtcagccagaattccaatgcactatctaccagattcttcatttcactctcatcataaactcttgatgcataaggaatcctgtccccctcgtgatactctttttcttttaaatgaaacgttttgcagtactcccccaccatggaaagaatctcttcccgcgcctctgcttctgtcttatgttcaaacattgtgtccacctctcatcctcaaactttccacggagcttgtccactgctccataacttttccaaatactctctgtcatgaatattatccataggcgaccaaaaaccggtatgcttataagccgccatctgcccatcggatgccagccgttcaaatggctctgtttcaagcatggttctcccatctccaagataagaaaacacagacggttccatgaccataaatccgatatttacccatgcctgatcctctctggctttttctttaaatcctaaaacctcatttccagatccatccaggcgcaatgccccaaatcttccttccggctgcgttgtggaaattgtgacaacctttttgtgttctttatgaaattccaacaatttgtttatatttacatctgaaacaccatctccataagtcagaaaaaatggttcatttcctatataatcacgcacctttaaaattcttcccgacgtcagcgtctcaagtcctgtatctaccatcgtcactttccatggctcactgtttcctcttaatacctgaactttctgatcctttaacgaaattcccagttgactattattctgataataatttacaaaatactcctttatcatatgccccttataaccacagcatataataaattcataaaaaccatagtacgcatattgtctcataatatgccacaaaattggttttccaccaatctctaccataggctttgggcggagtcttgattcttcgctgatccttgttcccttgccacctgctaaaataacaaccttcatacttacatctgctctttcgtcataaattctttgatctgtctctccatacaggctctgatatctccctgtttttcatagactctcgtccattcgatcgtcttttccacagccatccgaatatcccaatgtgatctccatcctaatttactttttatcaaagaacaatccaatttcaaaaaagatgcctcatgaggtcccatttcgcatgtatttttccaggacgctcccccctgccatatctcgcaaaaaatttctgccaattctccaaccgtaatacagtcactttcttccggtcctacattataatatccctgtttatcggcattttttgcctgctgctccgcaatcatcagatacgcatacaacggttctaatacatgctgaaatggacggatagaataaggattacggattaaaatctcatttccctccatacaggcacgcacacagtccggaataatcctgttctttgcaaaatcgcctcctcctatcacatttccagcccttgctgttgaaactgcgattttctgttcattcagaaaagactttttgtaactgtgtgtgacaagttctgaacaggacttactgtttgaatatggatcataaccatccaatacatccgtttccctgtatccccaatcccactctttattttcatatactttatctgttgttacatttaacaccgatttcactcccggcgttgttctcacacactccaacatgtttaccgttcccattacattcgtctcgtatgtataaaccggtgtttcataactctcacgcacaatcggctgtgctgccagatgaaacacaatttccggatgaacctcatcaaaaacagcttttaaatggttgagatcccggatatctccttctatggagttcatccgcccttttatgcccgataactgaaataacttctgctcctctgccggttttaatgcataacccaccacatttgcgccagccatctgtaacatcacacacagccagcttcccttaaatccggtatgtccagtgacaagcaccgtcttaccctgataaaactccagactttccatatattttaccctccatggttcattcacagcattgcaaacagctttgtcataacctgtattctcttatgttccacacactagtcttcccacaccttccatggtgcatttccggaaacccacaagttttccagctttgttttatcacgaacagtctctaccggtgaccagaatccgtcgtggcaataggtctgaacctttgtctcgcctgcaaaacagtccatcataccaaccgattctttttttcccatgcccgcccttaatttcataaaagcttccggttcgagtaccatacaacacgcatctacccatgcatcctgtctcgtctgatattgtctgatcccgcgataatttccatccgaatcaatggccaaaatttcgtttcgtcctgtcggatgcgctacggcaaaggttgccaacgccccttgtcctttatgatgttcgagcaacttatttacatcaatatcagacagacaatcaccatatgccacaaataccggttctccctgcgtatattcacccgcctgtaacaaccgttccataacagatgcatcctttcctgtatcaataatcgaaacattccaatcctcggtctgctttctatgtacctgaacttcgtttgacctaagatccactgtaatatcggactgatagatataaaaattcataaaatagtctttgatcacatttcccttatatccggtacatattataaaatcattgtatccaaaatatgaaaactgtttcataatatgccataacattggtcttccgccaatttccgccatgggtttcggcattttttcatcttcctctataagggtacttggcaaccctcctgccaatatgattactttcatttgcgactccgtttttctctttcaaattctattactctttcgattccttcctcaaatgacactttaggaagccatcctgtgtccgcatataacttggatatatccgcttccaaatgcataatctgcttatccgaatagggaatctttcctataaaagcttttggatcttcttctaatttttcacataaaatatgaatatattcctttaatgggcgtgcttctccacttccgattggataaatctctccgctttctcccttttgggcaagcaaaaacatcgcttctgctatatcatccatatatacaaaatcccatatctgctctccttttgaaaatgctaacggttttttctctatgctgttgattatatttgaaataagcattgaatcaggattgtcaaattttccatacccacttaaaatcctggtccatatatgcctaatatgatacctttcacatagcattttcgttgtatagcaagcacataatttcatgacgccataagcagtttctggtctacacaaagtatttgcactgagtgcttcctcacaccttccatattccgcctgacttcctgctccaataaaagtatgacaccccattttatgcgcagcctcaaccgcatagcatgaataaattacatttttattttgctcatcaatattgttacgcattgcgcgttgtgtgtttgcccatcccagatgaaaaaaaacatcatatcctgtctcttttgggcaatagtcctttaattcctctaaagaacaatattctattttcaacaatttatgtttcggcaaattgttttttctttttgaatctttcctctgaaatacaacaacctccacattttcggaaattaatttttgtataagggcaatacctactcccccgcttccacctgttattacagcttttcttatcttatattcattcatttatattcctattccctatacacaattttttcaaattcatctcttggcaaaaatggagccatgtcatctaaagatggcgaaacaattttcccatctggaagaatctttgatgatgatttcggttcaaatttctgtctgctgtctacaaaaacttcacaaatgacaggatctccggtatttaaaacatcagatattactttgtcgcactccttctcactttcaattttataataatccagatgaaatgcttttgctatatactgaaaatccggaaaccctactccgctactctcatctattccaatatatggctctttaaaaagattttgctgtgtttgtctgatcgagtgatacccatgattgttgagcaatattattttaacgttaaggtgattatgggctatcgtcgccagttcctggatatttatcattatactgccgtctccatctatgcagatcactctgtccgagttatctgacactgcaacgcccaatgccgccggcaatccgtatcccatcgctgcacagcctgaatttgtaaacattctttgcccttgttttatctttccggcctgaaatgtaattacacacgcacttccatttccacagataatcctgtccctttcatttaatgcatcaaataacctgtcaataaaaacatatgggttaataattgcatctccaccgttaaaatactccggtaatgctgccggatatttcttcaacagatctttacaccattttcgccacttatcatgattttcattcggaatatattcaatgctgttgcacaattgtaataactttttcacatctgaatgaattgtcatatccggtttgatcgttggtttgatcaattcatttttatctatatctacaagtattttataggctttttttgcaaaatcaaaatggttataaccgatcatccgcaaatttaacctacatccaagactcaacagcaaatcgcaattttgcactgcaaaattaccagaacgtgttcctaatgtacccggcattccaacaaagtatggactatcaaacgcaagttcgtcatttgaattccaagctgtaacaaccggaattttcaatttttgtaccaattccaggaattcattttccgcatcccctagtctgattcctgcccccgctaatatcagcggcgcttttgcttcttttattttcgcaaatatctctttgaccgtttctttatctggatcaggaatatcccatattttttcgctctctggatcaaaatgtcttaactgctccgtatcgaccacagccccctgtacatccaatgggatatcaagccaaaccggacctttccgcccagttactgcataatgcagcgccttttccatatgatacgctatttcattcggctccattaccacagccgcatattttgtcatgttctgaaccgtatgaacaatatcaaattcctgatcgcccaactgtctcaactttacatccgggcaggaataaatcgtcacttctttttttacctgtcctgatatcacaaacattggtatggaatcgagccatccccccatcaccccggtgatagcattcgttcctcccggtccactagtcacacatactgctgcaatttttccggtcattcttgcgtatgcttcagcagcaatcgcacatccctgttcatgatgattaaaaatgcatcttattccctcctgatgccctattgcatcatctaaatgcatagcacctccaccagtcaccataaaacaatcaacaataccgtgctttacgaaaaattctgaaatatattttgaaacttttattttcatgatttcactctcatttcttctccaaaaaatctaataaatatgtcacagcatcaacaatctcatttactttaacatcgtttacaattcgtaatttcatatcatcatacatcaatactgctgtgatctgtcggctggtttgtttcttgtctttgtgaattgcatctacgatgttatcgatatttaactcaatattctctatatctatgtttatgatacgaccaagaacattttctattctcagcacatcttccttttccagccattttctttccaatgaaatccggtttgccacaatagtgcccatcgccaccgctgttccatgtggaattttataatgactgaccgtctcgaacgcatgtccaaacgtatgtgcaaaattcagatgtacccgaacacccttgtcaaattcatcttcctcaataaaatctttcttaaattccagcgaagattttacaaattcgcataattttgcatcgtttcgctgtaacaggtatgatatattttgttccatcctctcaattccactacggccaaacataatattaaattttacaacttcccccaatccgctttgaaaatctctctcctctaacgttttgaaaaaaggtgtacaaatattaatctgatccggcggataaaaagttcccagaagatttttatatcctttataatttaaagatgtctttccaccaatacagctatcacacgcagccagtaaagtcgtcggataaaactcccactttattcctctgtaaagaagatttgccacgacccctgtcacatcctgaacaatacctcctccaaaagaaatcagtctcgcatttcttttggccggtatattcgtcatcctctcacaaatttccaatacggtatccattgttttattttcttcgagtgcttctaaaatataacactgctccggtgcaatccgcccaaacaacttttctccatacaatctcaccaaattctggtcaatcacaacaaatgtcttatcatctatttccagatgttctattactgaaaaatcttcaaaaatatttacctggtactgtttcgtactcgacttaatggtcatctttctgcatatcctccgtccactgttattttctgccctgttaaatatgtattatcatcactgcataaaaagtaaacaacctgtgctatctctttcggttctgccattcttcccataggtatctcatcagatattttctttatttcttctgcagtattatttttctttgtcaattccgtcaaagtaaatcccggacatacggtatttactaaaatgttatactttgcaagttctactgccagtgtatttgtcactccatgaattccatttttggtagcactgtaaacacaccgtccctctttcgagacaactccccaaatagatccaatattaacaatccgtccatattgtgcctgtttcatatttcccacaaaccctctgagtaactttataggtgctgtcagattaatggcaatcatttggtcgatctcgatgtcttttacgttttcgatctcatttatatcattaattcctgcattatttataataacatcgtatgtaacatcctgatgtgattgtataaacttttcaatacttttttcatcagaaagatctaattcctggtgacttggagcacttacctcatacccatgtactttaaatatctcagcaattgccgcacctatcccccgggatgcccccgtaactaacacctttcgcattttcatttccctctttcacactgattctttttatctatgatatattttgattcagtcaacggatatatctcaatgtctttttggaactctgtcagaaaaatccgggcatattcattaaaataatctgccatatcccttacaaaatcatattccatatctttttcggcataattttcatcacaattagaatatccatcaaatccagccagcgttactttttgggaatccaacacaatcaatgcttttagaatcattcttaacgaatgatcacaaaccttcgcatcaggatccatcagccggctaaaatttaatcggaattgaaatgcttttggggaaattgccgccacatttgatgttgcgatcactttatagtgtttccgactcaatgacgttgccatctgtacataacgcttcgcattgcttacaaagatataatccggttctatttcatttggaatataattaacagaaattacaactggttctgactccctgatatatttttgtattttatccttttcctgtttaactgagattcccggtcctactaataatatttcttttcctgctaactgactttttaatctcctgatatcatcctgatcattaatttcctgattctgatattccacatataatttttctatgtaatcctgatcatataaaagctttttttcgccctgtaattctttcagtatttcatttacagatttaatggaaagcgtgcgcttgtccatcagatactttacatagctcggatggcaatcattcgaagcagcaatatagtaaaacatattatatccccaggtagcacccgtataaaattgcgaaatatttgcatcaatcgcttctagcatctggctgatatcatattttttcccatatgtatgattcatgtgcattgctatcagttcaaccggtgcattacctgcactttttcccattccatagagcgttccgtcaacaagaatcatacgatccgtcttttttgcaagcatggcaatgcaattcgcatatcccatctgaaaattattatgtccatgataacccaaacctatctgtgcatctaagtttgcatttaacaattcaaaataatgtgacagattatcctgatgcattaaaccataggtatcaaccattgatactgcatacggctttactttatttgccaaagaaataagatccagcatttcttcatcactataacttgtaacagagactaactgtgcaaaaaccttatatcctttgtcttttaatccctgacaaaactgcattgcttcacgacggagatgttttttaaatatcacacggattccatccaaccaggaatcctcacaatcctgtacatgttctaatccacatgttccataatcgatcatccctactatcatactgtttttccggtctagatttccatatatctttctcactgcatctgtatccggcatgatacttctgtctttatcatatgttcttctctcatccaggaaaccaatctcaacaatatctatatctgcctctaccaatcgttcaaacacacttacaatattattatgtccaaatttccagtcgtttacatatccaccatcccgtagtgtgcaatccaataatttcaattcgcccatcttatatcggtttcctctcattttcaagaagttcattgttataattgatcatctcaattgcttcgtattttataagcattaatatttgtacctgctctttatcacttaatctaagctcatccattcccttttcactaatttttacaaactcctccactacatcttcaaatatttcctttttatagtcctgtcgacgagctaatttcaataaatatgccagcttatgaattgccattcttaatcctatctgcgttccactttgattatctttcataaaaagctctaaaaattcaacctgtccctgaaattgttcaaaacgactttcatatgttgcatagaataccaatttattaaccttatctatcagtgttccttcttccacaagtcccattttttcatacattgtaatttcttcttcaaggacattatcattttcaataaccaatgtcactggttccctcatgcagtccccggccatacttaaagctgcacaccaccattcatgcggataattctgataaaaaacattatccttatacttgtcatattttaaaacattttgttctaaaaatatctccctgtttacaattaatcctgacaaataattttgctgcagaaaaacctttgaaaacgcatctacacctttttccccgtatgctttttctaatctagcatattctcctgttgtttttgcacgcacctgacttaattgcgggtttttcttcaatagatacaaatagtgccctaatgcatcaatgttaagatcatcctcatctgaaataagcaacacaaacttacctttggaattttttataacattataccagttttcatgcggttttaattcctgatctatattaaaatatcttaatctcgcatcttcaatttgacttaccctttgatattcttcctgatataatgcatttccattttttgaaaccacaatctcaatttctgcatcatacggcatttccatcaaattttttaatcgctttaataatatatttcctctgttatgtgtgggaattccaattgtcagtataatatgatcggtatttcttccttctgcagtaattctgtactgatgttctttctctattaattggcttaattctttcagtctttggttattttccgtaaacacctgtcttggaagatatacgtcagtatgggtatgaaaaaaaatttgaaaatcctccgcactttcaaatatctttactttttgcattgccacggcaaactccggtattttccagaaagaatcagcacgtttgctatccgtggtaatcagataaacacttttttcccttgctgcagatatgaagtccgtaatttttctgtaatcccagtcgaattccgctaccacactgctgaattcgtctttcataaatgtttcttttggatttaatccataacacgcctctacatcataaatccctagaaacgtttttaattcacgatcaaaaatataatattttccctctagatatggaaaaaaatccaggatacactcttcatatttacattgaattctagaaatattgctttgataatttttataaaattcatccgtattagggtttatataacactcatataaagtctgcaagatccattctttttcatatcccttttgatatgccaatataaatgcttccagtgcttcgccatacctgcccgcttcaaactttagacatgcgtattctaataactctttctcgttcatattaagattttcacctttccaaatacgttcatctatatgccgttcttttttctgacttaatcctttataactatgtgtttcaatacactatgttttattgtcaaaaagagaccagtttatacactgatctctttcttatatttcttatttcagcatctccaacacatattttgcatcattattatactgtgccaaaatactctgcgatgcatttaccagaattttatttgtggaataaagtaccagttccatattcatattggtatcccgtctacttgactctgctctctgtgtattttctgatgtgttatccgttccacgcaatgcatgttccaactgttcctgttgtccaccaaaagtatcacgccataacgcagcctgttcaatagcattctgtaccgtagctatagattctgtggcttttgcatgagaagatacatcaaccttatctatcccaaggctctccttacttgcattgacaaacttaatctttacactctgaccgttcaaacttccagcctgaatcatataatatccaggtctcgcctgtggtgttccatccgcaagtatatattgctgattaaaattcgtcgtatatgcaatacgatctacttcctggttcagctgatcaatctctttttgaatcgcatcacgatcctcatccgtattgatatcattagctgcctgcgttgttaattctaccatacgatccaacacttcctgtgtctcctgtaatgctgcatctgctgtctgcaacatactgattccatcctgcgaatttctggatgctttgttaagacctctggtctgatgacgcatggtttctgatatctgcaaccctgctgcatcatcattcgctccaagcaatttataacctgtcgccagcttctttgaagacttctccatcttcttcacgttgcatcgtaactgtctgctctcacagatcgatgccatattatgattaactaccatgttatcctacctcttccctgagaatttatgctatactactataaattatatcgaacattttcaccggtttctttagaaaattaacatatcatttttattttattttaaatttatatttctttcctctattcttcaaccacctgttttaccaccttgattacttcctcctgctgttcctccgtaagtcgtggaaagacaggcaggctgatgatatgtgaatacacttcttctgctaccggacaatgcactcctttatatccatgttcctgataatatggatgttcatataccggaatataatgtacattgacaccaattcctctttctctgagtttttcaaaaacttctttcctgtctcgattttttacctggatgatataaagatgccacccgctgttagtatccggcatctgataaggtgtcacgatattccggcaatctgcaaaggcttcattgtaacgtgctacgatggtccttcttcttgccagaaaataatctaattttttcatctggctgcagcctaatgcacattgtatatctgtcatgcgataattataaccaagatctaactgctgataaaaccacggtccctcattacgtgtcatcagactggtgtctctagtaataccatggctgcggaataagacaagttttttatacaattcttcactattggtaacgatcatgccgccctcaccggttgtaatcggttttaccggatgaaaactaaatgtcgtcatatctgaaagaccaccaatctttttccctttgtattcagaaccaagtgcatgagccgcatcttcgatcactatcagattatgttctttcgcaatttcatgaatggcatccatatcgcatggctgacctgccagatgcaccggtataatggcctttgtccgtggcgtaatcttgcgtttgatatcctccggatcaatattgtatgttttaggatcaatatctgcaaaaacaggtgttccaccgcagtagagcacacagtttgaagatgctgcaaatgtgatcggagtagtaatgacttcatcgccctctccgatttctgctgcatgacatgccgcatgaagtgctgcagtatcattggaaatagcgaccgcatactttgcccccacataatctgccactgccttctcaaactcagcaatcttcggacctgttgtcagataatccgactttaacacatccacaactgcctgaatatcatcctcttcaattgtctgtcttccatatggtatcataataattatcaccctttcatcatctatttatgtatatcgtcacattcgttcaaatttccacagatcagaaaatcagcaatccgttctgcgcctcttccatctacaagtgcctccatacaggcggcctgcctttttcgcagcttttcctgtcccgccagttctgtaagtcgcatgcagataattctttctatgttttcttcttcccttgcatcccccacatagcacacagctccgtaattatccatactggctgcaaattccatctggttatctgcaaaagaaaaacatatcgtcggtattccgcaggcacacagttccaataacgttgtaccgcttgccgaaaccgcaagttcacaggtgcgcatataatcactcatattagaaatatttttatgaatacagatcctcttattactctctgaaagcctgcgcaattctgcttcatgactgttcatatttccaacaatcacatgaaatctgtacccttgaaatacatccttatccaaacactcctgtaacagcctgccggcaatattataagtatcagtccccccagttgtaatcagaatgcttttttctctctgttccccatgtgattttaaaaattctttccgcagaggtgcatatctaaacccacgcaaataaactggcgtattttgctttgactcttctttattcaataaattttccgctctgaccggaatatattgtaacactgctgccaccggatatatctgcattctcatatcatcaatataaagtaccggaattctgtcattcaattttccaagataatgtggagttgcctgatacgagtctgctaccagatatgtaacttttttcccctgcctgtctaaatcatcaagctgtctctctaaaaacggaagttctttctcaagatcatccccttggcttcctaagatccggtaagaaaatcctgcctgcctgagccgttcggtctctttgtcttctgcaagccagaattcacattccacgcctttttcccgacaggcatctgcgattgtcatacagcgcatcagatgtcccgtcgctaccgtctcattagcatctgctcgaaatatgatcatctctgctccacttccagctgcccaattggttccccaaaacggtatgccttcttcgccggtttgccaagcaattctttataatatttcggcttgattccgattgccggtcgaatacttcttacattctcttccgtaaacaactctccttctgcaatcggttttactgctacaagtgagcgtctgtattttaaactgcccttctcatgctcgttcagttcgtaagtcggtctacccttgataaggcaggcattgcggacctcctgtaccatatgggcaaaatctttcatttccattgaaaacgctgcatccggattctcaatctcatgacttaagcacacatgtttttcaattacctgcgcaccaagagaaactgccaccacgtctgcaagggaacccatggaatgatcagacagaccaaccggtacgccaaacctttccttcatatccggaattacagacacattcatatcctcatactgtgcagggtactggctgcaacattttaacaatacgacttgttcatttccctgtcgcctgcatgttgcaagtgcttccgcaatctcttcttccgatgccataccacaggacatgatcatcggttttcccttgcccgccgtatattcaatcaacggaatatctaccagttcaaacgaggcaatcttataaaattcaattccaatcccctccaggaaatctaccgcagtgcggtcaaacggtgtggacaggaaatctacacctacttcttcgcatttatcctttaactgctgctgccattcccacggagtataagcttcctgatatagctgatagtaattatatccgtcccataacccgcccttgatccggtatggttcgtcgtcacagtcaatcgtgagcgtgtccgctgtataagtctggatctttacacaatcagcaccagcttttgcagcttcctcaataatcttaaatgcattttcaatctttccggcatggtttgcagacatctccgcaataacataaacgccggatttcattttttcatataaattcatagccgctcctttatgcatttattcacttttctgaatataatatcggcatttttttcaaatcattcactgatttacagaaacccgcttactgtatgcaaatggcagcttctttccttttaccctgtcatagaatgcctgcagtttctgtgcaccgtcattatctcccgctgcttcacaccatgggatgacttttcgaagcactgtcgccttatcatagcttccgtgcaaaatcattaaaagaagtgtctccgcagaaattcttccttccaccactgcatcctttaactctgaataagccgcactctccatttcgcactctacccggcgcaaaaggaatcttacggtcatgtatttctggcaggctgcctcatagccacctgtcttatcaaaaaagtgttcttttataccacactcctgttctttttcatagatttcacacattacaccatacagttctaacgcagagtttttcatctggtttttgtgatacaactctatgatctttccagcatcttcccaattccccacatcaattagtctgcgcacctcatctgccagcgcctcgcttagattctcccattcctcctcatagacgaatgaaaatccatcctcctccgtaaaaaaatccggatacgtttcaagtgcaatttttcgattctcatcataatgattcaactttgcaaaactgctgtcgtgaatcacccacggtgtcttctgataagggaccaagatatgatatcctgctttacgcatctcaaaggactgcgatacatcataaaaatcaaagttcacaaataaatcttcccgccatgccacatcatactgtgtcgcgatcaaaagtccgtccaccgcatccactgggcagtctgcctgctgcgccgggtcacagatgagctgatatgcaaaatccggctccctgcaatccacagtgccctcattccacgcaaggtaagcaactccggttttgggcatcccgcatccgccgaccattccaatcatgccgacatccggtgcactgtgaaaccgctctaacagataaaaaataaacttcggttctttgataaacacatcatggtgcagatatactttatatttagcatcactgctctgcatcccggcattgtatcctgcacacatcgacggcgcatcctcaataccaatgacatcccgctcgaatccttccggcagaagcagcctatttatgtaatagcagcactcattaaaatataattgattgtttgtgcatatgataaatgcgattttgttgtcattcatacctgtttttctctctaacaatctgttctgcggatggtatactgcatctgtcttccggtgcattacaccattcacatgcagcacatgactggactttgtaaaatttttctaattttatgtgcatctcatcccatgaatgtatctcatcaaatcgaatcacctcatccccctttgaatataaaacgcccatattttctaaggcatagattctcgggcaatgatacagatttccctcataaataccagcgcagtcctgcacaaaacaagtcttaaaccatctttctctttcaccttcactaagttctacccgttcttctggtgtcccaaggtctgtccaatccattgtagtatcataataactgcagttgttatctttcagaaatttgataaattcatcatatgtctttgcttgtctgtcttccaatttatctttataattgcttaccaatatcagaatattcggattacataatgttttctgcagcttttcatccggataaacagtaccatttgtgacaatgcggataaaacctattttcccctctgcctgatacgtaagcatctctgtcagaatatctgcaaaatccggatttaaaaaggcctcccctcaaaacggtgatataatatgtatataatcaatccactgaaatatcttttcaaaccacgcatgtacctcttttgctgaaaacattttccgtttcttcaaatacggcatccactgggtacacgccttacagttcagactacacacctgcgccactgaaaagtccataaacgcaattacatttttgttctcaaactttacactgagttcctcatacaaatctgtcgctaacggaattctatgaaaatatcttttttcaatctcaagcatctgtttctgtaaaatatgttcccaaaaatgtttaaaatacactaattcttctgtttccaacgcttctcctccctcacctttcatctatccttaaaacagtaaataagcattgttattttaaaaaatatatattattctaactattgtaataaaactttctatctgttttttcaactatggagatgtgaccatgaacgaaatcattattttttatcatacattttatgaagagctgctaaaaaactccatccggcacaatatcagacacgtcacatgggttcccaccgattcttcctgtgatgccactgattacatcaaaaacaactttcctccgtttaccgcatctaaccccacaatctgtttcatgcttccaaactttcacacacagacgacaatccttcagcttttatctactttaaacattcatgcctgtcagatattagacctctatcagctttatatgagcaaagtttctctccttcactatgaaagaatcatcgggaactgctgtgaaccgcttgacggtatggtttttggaatttctcatggacagaccggtatcatggaagagctcttgccggggaatgttttaaatttctgttcaagctctcaggacatttactttaataccaaagtcctgtcctctcttgtcgaagaatattatgactttgtatcgagtgcacgatacgtgatttttgatttatttgactacacctactttaactatgatgtccttttatccaatgaatgtctggggtatcttgcatataatggcttcttctgtgaagaacgcaattcctctgccaaaaaaccagacacagatgccatcaatcagcttttgacagaacggtataccacacattccaatgcctctgcaatggcagaattccaatcactcttcccggacatctgctgtccggatattgccgcatatcaggcagaatacaagaactggtactgtaaagaaaccatcctaagtgattcatctgtaaaacagtatctctcccctggtacgcctgttttctcttccatccaacgccatatatttgagccgaccatccagtttcaggtcgctaattttgaccatttttgcagattattatgccgcatcaatccggatgtaaaaatcattggtctcttactacccaaatattatgtcgtagaggaaacggaaaaagctgtaaatcaaatctggaagccatactttgaaagcattatttcttcctttcagcaaaagtacgcgaacttttccttttatgatttcaaaaatctttccgaaatctctcgaaatcagacttactatcaggatttatcgcacttaaaccgcattggcgcccgccacatgacagaaattatttctgagctgatttccgaataagttccgcctgattattgcttttttaattgaccaatgagctgtctgtatttttcaatcagctcattctggttctctatgcgcttttttaccgccggactcataaagatttccgaaacattattccggtaaatatcctgcagagtcaagccgtatctgtcatgcagggcttttctgcacacctcatcttcaaccagctctaacagccggtactgccccatcccattgccataacggatgcgaagcagggctttttcacataatatctctgcttccgtatttgcggctggattgcacaactgctctgcaaataattctttaaaagtttctgcgggaagttcccctataaaatggtctaacgaatagtgttgttcattggttcttcttacaaatgtttctgccgtttcactgcttaaatttttcttctcatcttcaaatctgcgatataatgtcagattttcttctataatcgaaaccggtgcacaggctaggatgcgaatccacaagtcgtagtcctgcagctgtacaagcccataacgatagccgcccactttcttaaggatatcctttcgtatcaacgcacttggggcacaaaaataattaccgccggttatcagtttctgtacccactcttttctggtgcagtttgacgagtgaaatctgtctgacaaatcctgatatttttcatttaccttcttttgttttccgtcaatgatatctgcccatgtaaaacaacagccacactctgtgtgctgttccatgtaatgaacctgtttttgcagcttatccgcaagccagatatcatcatgtccaatcagcgcaccatactttccgtctgcctcttcaaacgctacatttcctgcattgcagatgttcagattctccgtcagtgggataaattttattctgtcatcctgaaattcccgaatcaactccggcgtttcatcttttgatgcatcatcaacgataatcagctcaaagttttgatatgtctggtttaatatgctttcaatcgtttcttttatatgagcagctccgttgtaagaacaaagcatcacacttaccaatggttccacgtctcatctctcctgtcatcactcactgaagtttgcacgccacgcaggatactcgtctttttttaaggcataccacaggatatccttaaattctccctgtacacacaaatgctgttcaaagcatccctcaaaccgcagcttcatcttctcatagaatttcacggctctttcattatcttttctgacatacagatatactttctgcaattccagtgtttcaaacgcatatgacatgatttctgccatcgctgctgatgcaattccttttcccatatactctgtgcacaaggcaatggcaaactctgcattgctgttcttgtggtcaacgtttttcagactgaccgttcccatgtaccgttcatctgcatctgtaactgcaaaatgtaaattactttcatccgtccagctattttctataaacaccctacagcgttccaatgtctgctcttctggattatactgcatatttttataaatatcaggattcttcatccaggcgagcatcggttctgcgtcttctgtttttaattttctgagttttattttcttattccaatccattctaagtcataacccttttttctaactagcataatgtgcatagcgtctgcatctgcctgcaaatcatctctgcacacgctgtgtagtcatgattctgtatatattgtgtcatctcatctctattctgatgttctgatacaaatgttgcgatggataatcccaaaatctgtttcttttcgtgtggctcctcttcgtggtaaatataatcaggttccctgtactcgtgagatgtcagcaatttgcgcacgattttttcccatacatgataatacatctctgttccgcccggcatactgttgcatatatctctgatatacaacataatttcgtaattgaaggtctttaattcgtcgtatgtagtatcgccgtcatctaccattgccaacagctgttccacactttttcttctctgcaattccttttccgaatctatcccctgctcgtactttcttacgctttgtttcaggtctgtaatctcagtgttcttttcccatatttccttcatcaggaaatgtcgttcttcatcgcaggaatacgctttttgtgtatccgaaatttttatattcaacatttgttttacttcatcattgaaaaacgttgaattttcactgagcatttctgtatatgttggcacatttaatacttccggaatcaatccaaacccataaagcggatattgtaaagagcacgacgcaattccacattcacatccaatcggactacactcaaccggctgatttatgtcttcaaaaaaattagcctccgcacgaacgttatgacatttcgataacagtcccgacttcatttccactacaaagctccattttcctgcataacagaaaatgtctcttacatcaacattcagaaatcttaccgcttcttcaaacagacgcgatttcattttctcattcatggatgttacaaattcgggtgtacatgccggactcgtggttgccccaccacctccatttagaaagtcttccggcttatccgctgtaacgcatggcgtacatgggggcaattctcctatttcccgcatacatacttcgcatatttcgtctaataccggcatatactcgtcgcagattacaagaaacggataagaagatgctcctgctgcaattatccttctgatatttgcaaagtagctttcaaccttatttaaccgtttgagctccacataatgtagcgaacacttcacgattaagcgttttaagtcttctttcggagcatctaaaagttcctcaattctctcatcaattgtattattagtaataacttccactacatgtccctgatgcagcaatccctttacaaacggtacaatctccggcggaattaatgtttctccttcgccaatcaccataatatatgcgattccacccaaacgttccggcgcaaatgccgcaatcatatgctcaaccgagtaattaaattgcgcttttgttccatgcgaatttttcagacattctgtgatatagcaatagctgcatctgagattacagatatttcccggcacatacacagtaattgccttttttatcttcattttatccatttttcttcctcgcttttaaatgtgcatttttatgccactgtattcttctaatttcaccagtaagtgtttaaaccggtatctgctgtcaatgacttcctggcactgtgatacaatttctttcctcctgccctcatctccaagcagttgtctgcatacctcgtatgcctcactcggggaattgtatacaggaatcggtatgttcccgaacagccgttcaaaatctgcatgataatcggtcacaaggcaggcattacttgccataatatccattacccgccatggaaatccgcttgttgcctgcacatgggatacattaatgccaattttagagctgttataaatttcctgattatgtgcaatggaatatacttttttctcaatatacgacatattaagttttgaatcaaagtaataggtatttccccaattttccgtgccatataattgtaaacccaaatctgccatcaacgataataccttcacccgtttttccctgctgagaagctgcaacagctccggcagattcaaattccgtgctaccagttccgatgtaatattacacttatacaccagctctatcggtgtgatctgcgggtttttctgcaactcattcagacagcttttcatcatattccgttcttcttcggacgggttctgtccgacaaaggactttagggcatggttttccctgaccgtaaacaggcttccaataaacgaaacatttgccacctgttctacccgttcatctgcgtaaatttccgtaaatagcggtgcataaaaaatacgattttcgctgacaccataatcctcttttaagatttttctgctgtcttcctgaataataaaatacaaatatcggtccgggtgctggcggatatcttctttgttggaaaaataacgcggactatccacttcgtatatcacaatcggacagtctacaacatttgccaaatcataaaaacaattgttaaacacaaaacagatatccggtgcaaaattctgaattgccgtttttgtttccgcatccatttctccaaaatcaacgccaaataaatcatgtgaaaacatggcaatttcattccccacacggtctaatccctgcacaaatgattcataaaaaaccggcattgcattcgggttttcatcatctttcatgcaattataaaatgccaccagtattctcgccatttcgctccatgccagcctttcttaaaactcattcacgcacgcaattaccctgtttatctcaccttgcgtcattcccggatataacggcaggctcacttcctctgcgcagattcgtcttgtcacaggatagtgttctacctgtcccttccactcctgatatgcttcctgttccatgataggggtcggatagtgaatattggtcatgattccactgttctttaaatgctccacaaacttttcgcgttcttttacaagcaccgcataaatatgaaatacgtgctcctgtgagtcatccggcatctgcggtaacactactttttcattcacgattcctgcctcataactttctgcaatcttgcgccgttctttgttccacttgtcaagatatggcagtttcaccgtcaaaaaagccgcctgtaattcatccagtctggaattgcagcctttatacacatgacagtatttctgataggaaccataattgccgtatgcgcgcactcttgccgccagctcttcatcattggtcacaactgcgcccgcatctccgagtgcgccaagattcttgcccggataaaagctgaatgcagccgcatctccgagttttccgaccttttctccgtggacagatgccccatgtgcctgagccgcatcctcaattattttaattccatatttttttgaaagcgctcttatcggcgctacatcaactgcacgtccatataaatgaactacaataaccgcttttgttctatccgtaatcttttcttcaatcgctgataaatcaatggtataagtttcactgtctgcatccacaaataccggtgttgcgttcacatatgtaattgcaagtaccgttgcaataaatgtatttgccggaacaatcacttcatccccggctccaattccgtatgcaagcagaatcagccggattgcatccagtccgtttcccgttcccacgcatgccttcgcgccacaatatgctgcaaacttctgctcaaatgtatggtctgcttcccctccgataaaccactgcctgtccatcacttccctgtaagcgcagtctaactcgttttgtatcggctcatgaatctttttcaaatcaagataaggtatttcatgcattttcaggttcctctttcatcatctttaagaaggtatcataatcccggatgtaatcttcttccttatacacctctgacgctaaaaccatcagaacagcatccggcgaaaagtcatacatctctctccacatattatttggtacatacaatccttcatatggcttctcaagagaaacaattttcttttctcttccattatccagacgaatcttacaggaaccatgaatacaaatcagaatttgctcaagtgacttatgtgcatgatagcccctggttactcccggttttgtgtcatacatataataaacacgttttatttcaaatgggatatcgttatattcttccaatgccaccaacattccgcggtcatccccatgctgctggaacgcatatttaataatctgcatcgcaatcctccctgctcatctcacagtattttttgccagaatcagtcttctgtaaccattatatactatattgactttcattacaaaaattttgtttgtcttgtcagacactccccggatacattttttcaatccgctcccggaacgtaaaatccctcttcacgcgctcaaatcccgcaagcgcaatttgttttctctcatcctcgtgttctaagtaatattttgcctgataaaacaagtcctctatattctcatatacgactaactcttctccgacgttaaaatactcaaaaagttcttcctgataattagagagcacaaatccgccgcagccaagcacgtcaatgacacgaagcggtattccggtacggatggtcttgagcgaaatattcaggttgattttgctctgggaaaacgcaagcggcatctgggaataatagtccgcatatccacggtatcgcactttttccaaccgcttatccacatccgttgagtacaaatccaccggataatgtgcagataaaagtgctaatgccatataacgttcccgcccggtcgtctcacaagcaagcataaattcaagctctcttctgcccatcgagaaaccgtccgttgccacctttgcataatcggcattcatctgtgccaacagttcatccgtaattaattccggtatcagataaccgccgtacactttgccctgtgcatttacgattccttccagatacccctttgtatagccctgcaacggtgccgtaaaatatgcatactctgtctggtaaagttttccaactaaagagatatccgtccgatattcttctttttcccgtttcgatgcattaatacgaaagacctccgtatccaccgcaagcggcagatgcatcgcattgactccatttttgtggtgttcctctgcctgtcccctgtcaaaaaagaaaatccggttgcaggaattcttaaggctctccagatttcgaatgtgaagcggtgaatcatatacccatgccgtgtatacgattccgagttcctcacacaacatcgaaatcaatggcgaaaaattgaccgacagcacgtccgtataagttcccgcctttaaataagctcgaaactgctctaaaaaagcatcatccttttcccagtcgttaaactgataaaaaaatgtatcatacgggatttccagttccttcaatccccgctcgattcccttattcataaaagaatgccactcaaaaaataatagtttcataactgaaaccttatgatctgccaccttattcccctttcatcattcggtatttcatttctgccaatttccagtctgtctcgttatcgatgtcctgcacttccaattccgatacgatatatggaatgattccggtgtcaatctgtcctctgacgcttctgtatttttctacatcatagcagtaaaactgtccacagtcatggtacatcgtctctagatcctgcgaacggctgttgcggtactgcgggtagcagaactcaagaaattcacctttttttacaacaccgcgctgcggtggaaacgaaaatgccacaacaggcatcagcatcgtcccctgcttctcctgtaacagtgacattccggcctttaacttctgtgctgttacaaacggtgctgttggatagatgcacgccgcatggtcaaacttctctccacgcttttcgtattcctcgaacacctccatcagtacatccgctgttgttgcaaaatctcccgctgtgcgctcgctccgcaaaaaaggcacttccgcaccatatttttttgcaatctgcgctatttcctcatcatcggtcgacaccatgaccgtatcaaagcatcctgcttcaagtgccgcctcaatcgaatatgccataatcggctttccacaaaagtccttgatattcttacgcggaatccgcttgcttcccccacgcgcagtgataattgccaggcttttctgattcatatttgctcctccgtcctgttccaaagctttttataagcaaaaaactgtcacattagtatatgcgctaacatgacagtttcaaatttctattttactactttcgcagcaatctctcccagcttttcaaacaccggaatcacattctggaactccgctgccattgccgcatcatcctttgccttgattgcctctgccaatgcggaaactgccttgttaaatgcttctttatcaaggcgttcctctccgtcattgatcacttccaaggttccatttaccacctgaatttcccagttgatagcatctacaatggattttaaaaatttatcggtatcatccagacgcttgccggataattccttcacaataatattcatattctttacaagacgttcattgaactccaaaagcacctccagtgcctcaatctgctcttttctgttatcttccatgattcttccctgccaacaatagcgatgccatttggcattcctttctctttacattttaaatattatatcggcataaagtgacattttccttagtttaatcccaaaagacgttgcaatttattcgcaatccccaattgttaccagaagatacccctgtccacagatatcctccatcccaagctgtctgctctctagcagccacagctgcaatgcttttcttaaataatgctcctccggcagaaatgcaagtgcgtgctctgcgccaatcgtatactctctcacattgtggatcccagcctgctcaaactcgctgccaagactgtactgcggtaattctaacccatatgaccagacgccctgctgctccatcattgccttcccagtgcgatatgcgatgcttgccgcattcggaatcatggaaatcatgtgtttcgtataatggctccagttttttaacaaatcaattctctcatctgtatggaaatgctccagaagtccgcactgataaatatagtcaaattctttttcctcaaacggaagcggctttgtcgcatccgtacagaccacattcattccaagattcaggtgactgtttatcacattaaccaattctacacattctttggagaagtcaagcgctgtcacctttcttccatgcctttgcagatatgcggcactttgacctgaaccacagccaacctcacacatcttgtctccctcggcagaaatttttaataactcctcagtccagcagaacacctgctccgtcagtattccattaataacctgctctgcctgctctttattataaagttctccccattgttcctcgtccaagcgcttttcatatttttccatcgtatttatattacctcccatttttattcagtgtctcaagcaattctaaaaattcttttgcccgaacatcccaggtatgaaactgctttgtcttctctcttccgctctctgcaatccgtaccctttccgcctcatcggaaagcagtcgttttatccgctctggtagtgtctcccgctccgcaagtccaaaacttaccaaatcttttccattttcatatcttccttccaaatatctggtatcgtccgtcacaagcactgccccagccagcataatatttgccatccgctcggtaaacccggctttatgccacgacataatgtttaatgaaagcttcgactgctgccagatcaaaagactctcctccactgtgacatccggatgacagatcagattctcatacgcagccagcgggctgttcctccagctgtcaccaaacacattcaccgtaagtccgctgtctaacagaacccggagcacccggtctctgtaatagtgcatcacgcagtaaatgactcggcgcagtccatataaaatttccacgaactcctttttatccacgcttctgccgtaaaatataagcgctcttttcagtgcttcctccgatgacaaatcgggattttttcgcatcacaagcaaaaaccggtttgcaaggaaacgctcctttcgctccatctggtgaatcagtaatatttcattccagtaatttccataagttcccacgaatgtcagatcatattttctggtgacctcgttcttacacgtcggctcaatcccggctggtggaaacaacactgcattttttctgaaatagttctgcacaaatgccacatagtccgcatcatgtgtgagtacataaaaatcaggatactgatgttccaaatgttttttcatccacaccggatgatcaaaaatgaagttaaatttcggcccgtaaattgtctcgtgcagataatgaatctcatccttcatcttcacagaaaacagataactctgtacgccgataaccgccttaaagtgccgattccggtactgcaaaagttcctctagcggctggtttgccatatcataccagataatctgtgctcccgctctccccagtgccgccccgaactgttctgcaaacacggtcagcacattgtgacacacatcatctcccttgtaaatcaacactggctctgttggcgcgtcaagttcataaaacaattccgcatgccctatcattgcctccaaaaaggaaaccgcctgttcataatgcccatggctttgtgcctcctcaagcacagatgccactgccatctcaaacacctgattttcctgtaatatctgactgtattttccgatgatgtaacagtctgttttccagccgtctgccgtctcttctgcggtgtcattcgtcaaaagttccattcccatgtccccggacggctcctctgtcagatcaaatgacgttctctgtgcaatccgaagtaaaagctcatacttttttttcgccggaagccggtcatttctgccacccgctaacaggatcagttcttttgggatcagaatatctccctcgcagatcgtctcatctaacaaaagttccaaaaacgaaattccttctgccgtctgtcttaaaacccgtttcataaatctctcccttacaacgtcccatactgtttttttatatcggctacatcatttttcttctttaatattctaaaatccatttacatttccgctcttttctccgatatatacagatatgcactttatactttgtatcactgcatcatcgatatcttatactttacaggagaatttacatgaaactgattttatttggagatattccaaactggaatagaagcatacagttacttcagacctaccggccggatatctttatcgccggactttcgagtgtttcccttgggcagtttgcttcctcttccgtaacctatacgccagaggaaaccgcagtcctctaccgttcacaccagattgacggtgtcattaacattcaaggggaaaatccctactatttccgtcttttaaaagaacttggcattgaaaatatctatgtcattccacatactctttaccagaaactcgagctttccgaatccattgacggtgatgccattctttatccttataaagaagtactcccagagctgatgcagcttgaatttcaccttgccgaccactgcaacttaaactgcaagggatgcagccatttttccaacctcgtgccacagcctgtctttccggataaagaacagtttgtgcgcgaccttcagcagcttaccggctatttctcgcagattcatgatttttatctgctcggaggcgaaccgttattaaatccggaaatcggtgtctacatcaacactgtacgcaaagcatttccctatacgaatctgattattgtcacaaacggactgcttcttctctccttaaaggaagaagtcattcagatgatcaaagaaaatcgtgtacacatcagcatttcagactatacctgccttgaccgtgataaaattatttcttttatccaggcacatgccctctccgctgatctgcgtgaaggaaaagagtgtttttccaagtatttaaatccgcagggggactccgataaggaacaggtctttgcaaactgtatccgcagaaactgtacgtttctcgcaaagggtaaaatggcggcatgctgccagcctttcgttgttcactactttaacgactatttccatgaaaaccttccagaggaagagggcatcgacctgtacgaacccggactcaccggctgggaaatccagaaacgtctgattacaccaatggaatcctgccgctactgcagtgccgacgtcccgtttgattgggcaatgtcaaaggctccttactctaaagatgactggtgtgtaaattaatccttacatttgcaatactttttctaacagttccacaatctgttccgtggcaccaagccgcccggcatcccgtaaaataatttctactctgtgattaaaagtatcggtcgcaagatagtctgccttatactttgcaagcagcagacagcttgcgatgagatactgtccactgtcaccgcctgatactcccgaaaccgagtaactggcatcaaggtatatctcatccagaaaaatcgcctgatatttttttgcaatccgcaaggcaaaatcataatcttccagacatcgtaacgattcatcaagtcccccgactgcctcaacacattccttctttaacaacattgtcggaattcctaccagattgtcccacaaaagctgtgcatagatatccccgcttttcttttcatatggaattttttcatccgggagcaccatgcctctccctgctccgagatcgtagcggaacttatggtaaaccatccccacattcgtcccggcattacgcattgcttccatctgtgcttttaattttcccggacgccacaaatcatcgctgtcctcaaatgccagataatcatagcgtgccagtttcattccgcagtttctagcccttgactgtcccccattttccggcatccggtgataacgaattctgcagtccttatacgaagtaaccactttctctgtttcatccgtagagccatcatccacaacaatcagctcaaagtcttcataggtctgcgcaagcacgctttcaattgcttttccaatctgatttgcccggttgtaagtcggcaatatgatgctgaccggctctgtctgtttcataatagttttcctctaatcctgcttccttaattccttaaaacgattgattttcatttccgccttataatcttcaaataattttctgcaatcgtattgtggttcatatccaagctcttttttcgcattttcgacatccatcaggaatccccctgatgctggcaaatcaggtctgtatacaatctgggatggatgatcctttggtgaaaacacttcaataattgtctcgatctgttcctttaacgtcactggaattccggtacccacattgtaaaaaccttcttcacggtctgcttctaccgccttgcaaagcatctgagcacaatcataaacatgcaccatatctttagaatagtccggattcccccacagttcaattggttctcccttcatagcaagctcaatcatgcggtataccggacgcaatgtctttttaccattcggaaaataatagtgatatgggctataactgtagattgtcgggaaacggaaaacaaactttttcaaaccatattcctgatgataatgttctaacagttcaatcgctgtatttttcgtaataacatagactgcatggtctcccttataactgaaattgtatggcaaatccggctttaaaactgtgccgtccgttgcaaaaagtgaaatatcaaacaccgtcgtggaaaacaatatccggtctgcatgaacacgtctgcaatactctaacacatggtatgttccaactatattcgttttaatataactctccggattgtactcctccatgtaagaaggaatgactgcagctaaataaattaccgcatacacatcctctttcggaagtttctcaaactcttcctcacgagaaatatccacagaataatacggaattccctgtttttcgaaaaaatccgttctacgtcttccggatgcaattacctcatattcttctggattaaaatattctctcgcatatttcaaaacataagaccctacatttcccgtcgccccaaaaataataatttttttcattctacctttcctccaattctttgaccaccgctattacttcatccatatcattctccgtgtatctctggtcacaaggaagcggcaccacatttctactatagttatattccgcagtatgtatttcacaatcttctaacacattctgccataaaactggcacaaaaatcttgcgttcaattaattttcttcgaagcctttccccatcagcacaaaaataaggatataaataagcacctgtcatattctttaccgtcaaaagatttttttcacccaaccctgcatctagtctctttgcattactggtacgtgttttctttactctttcataatcaatgcttcgtaagatgttatgtgtcagtgccgacattgcaaacagctcctgcttgtccatccacgcttcattctcctgataattccggtaaaacttctctgcaccacattcatatcttccaagcaaaaattccattctgtcataagagaaatctgcttgtaaggtaattttcgcttgcacatccgtatataaatatgcaccgtccggcactccaaaaaatttccggcaggtataaattgtatccacaccatctattggcttacagaaaaaatcctgcgcattatctacaatgattcttttatgcccagcaaacaattcttccacataattcttctctagctgtccatagtaattgatgagatataaaaaaacatcctcctccggatatttcccctgataaggtttttcaaacgactttacctcataccactgtatctgtacgccttctctcctacatacctcttcaatcacccggcattgcaaatacggcagcattatttttcgtatccgtctcgtacggatcagatatctcaggcaatttctgccattgtttaatgccagacattctgtgtgatattcatttcctttgtaatgttctatttcaatatatccgccaaattctctcattcttcttcctgcaccagtgcataattctgtaattgtttacgaacttcttctttactgttaaacattaacacatctactatggaaagtcccggaacaaatttatctccaaactgctgatactttatttctccggtctttaaaaatttaagcgtaatcccattctctttaaaatcagaaaaagaataaagtgcctgaccaccaattgcattataataggtatctgcctgcagcaacttacaaatttccagtaccttttcctgtccacgtttgctacagtcctttttcaaatcagatgacaaaacaagttctgatttcatttccagataatcatgaatctcacggatagaatccgccaaatacaatgcaagtgattcctctggatttcggattatcctctctaatatcggaaatatctcctgaaaatatggtgcttttccatatgcattttcaagcatccttaagtttttattttcaagtgctatttcatgatgaaccattatctcattaatttttttaaaagaactcgctccaagcatcggcacatttatatattttgcctctcctccaagcagtatacggtttctatgaatccaaccacccttaataaaattaacatcatcataaattacatatcggtctaccgcattcataagttgccagtatccaatatacggaaaaaaatacggctgcataattccaactttcatcacattctccatttcaataccaaaaggaatttcacactttatccctctttttgtatctcaagaaccgccttagagatcatatccacctgttctatccgcaagttggcatacaacggtaaaacaagaatcctgttagaataatctctcgcgtgctctaaatcattctttttgtatttgttcctaaagcaggctgcatctgcagtaatcggataaaaatattttcttgaaaaaatatttttctgacgcagtcctgtatatactttatcacgtaattctgccgtttcaaacaataccggcatataagcataattcggctctacgcctttttgatactgattcagccgaagcttcgtctctcccgaaaagttttcacaataacgttccacaactctttttctagcttcaatattctgctgcaaatattttaaattgcacagtcccattgctgcctgaaattcattcatcttagcgtttgcccctacagaaacgattaattcttcattccgtattccaaaatttttgagattatacagcttttcatactgttctcttgttttcgcacaaacacagcccccttcaattgtgtggaatacttttgttgcatgaaaactgaacgtcgataaatcgccaaaacttccgaccccttttccctgataagtttctccaaatgcatgtgccgcatcataaataactttcagatcatacttgtatgcaatctgctcaatctcttctacattacaaatatttccatacacatgcacaggcacaatagcgacagtacgttccgtaatgagttcttcaatcttgctctcatcaatggtataatcttccttcacatcacagaacaccggtacgagtccattgcgtataatcgcatgagtagtggaaataaaggtaaatggcgtcgtaattacttcaccaccttttggaagatttaatgattgaagcgccaattccaatgccatatgcccatttaccgtcaacgatatctccggcactttcagataagttctcaattcatcttccagacgtttatggtaatcccccatattagtcagccaatgactttcccaaagtggctttatcatttccacgtattcctcaaatggaggcattgagctttgtgttacaagtattttatcatccatctttcttcctctgttttctctaaccttccctgttattctcgttttctataatatattcctgcaattctttgcaaaaatttttgatatttccaaggctgtctactccatagatagctgccgcactctttctgcaatttcccttctgttgttccataaatgcagcatcatgaatgtaacggtttacgatttccggcatatcccacaatttttcacaggtaaatgcctcccccacctgtgccacatcacaatctggcagagtcaataccgggacatcaatttccaccgcataaaatgctccagttcctcctccctgtctcggcggatttaaaaagagatttccaatcctcatgatccctttaaaatcattcactgcaccaaaaaagcggtaatggtctgcctcttttgctaactcattttcaagtttcggacaatctccgataaaaacaaacagcacctcattttgttctaaaatcgtttgaaatacccgctttacttcttcggtcacttctgtatccagacgattacctgcaatcagaattacaaatttatcttccgtaattccaaaatcttttctatcgacatcactttctacatttgcattcagttcatccacacacaccatttcaaatattttctggtctgatctggtccattctaaatattttctattttcttcctccgtacatcgaaagtatcttacaatcacagacgaagccgtctgagccggctgattcacacatgccatcgcacagaccgtcgtaaaatccccacatagatctgccaggatattagaatctccaaccgtcagtataaatgccgggttatattctttaatatcatgtattgcatttttcaattcttcaaaataattctcttctgtataattcaggttgtatccttttatatgtacccctaaaagttttaattccatcctccccgtttccggataacagcatacatccaccagggagttataccaattccaatactctgaattctctatttgtctcatatttgtggcatatacataaacttcatatcccagcttttgtaaccagcaataaatatttaccattttttgagtcggcgcatgaacttcactcagaagaggttctatcataagtacaactctttttttgtttctctgtgcaaatggaacatattgcaatttcatattaagttcttttcgaatctgtgctatcaaatctatataaatgctattttgaatgatataatgacgcttttcatctgtaaccatcgggaaactgaaaactgctttccagagctgacggatggtatttattctgctcaaaagtggtgtactttcttctatcaacagattttctataaaatattcctctttttcatctctaagtgcactcagtaggtatgaaaacagcagcatttgaaattttctattttgttttatagcttctgccacgccccccagacaatcccactgactctgttgatctaatacatcatactgcctctttaattccggttccagttcacgcaatttagtgaaaccgccaattttcatatgttccatcacatcacaaatcagtgtcaaaaattcattcaatgcttattcctccctatcctgtgcatttttcaaaactgactctattttttcttttataatttcagtaaatctttcaaccgtcatattttcttctgcaatccgttgcccttccgctgcaatccgctctgcctctattttgttttctgataattttcgcagttttttaacaagctcgtccggcttacgccagtcataataaaccactcctgtttcgccccagatttcgtggacatatttgctcgcatccgtcacacagactgctccattcatgcttcccatcgcaatccgttcatgacttccgtccttaaaccacggcatcacatttaataccaccttgctgtccgccatcacctcgatcacttcctcatatggaagttcttcgccaagaatctgtaaatgtgttttttccatctcatttttcggaaattcactccagtttcttccgcataccgtaaccgtcattcccgcatttagcagcgaccggatcacctgatttctcgcatggatccttacataaaaatcaatatattcccctgctgcctcaagacactcttttgacagctcaagtacctccgtctcgccataccgcgtcagcactgcttccatcgcttcctccaaacaaaattctgtatgttccaaaaggaaccgaattgtttcttccgcaatcgtgcgaagtgccccggtcagacctggatagcgatacgcaacatcttcttcccatctcacattagaagccggaaaaaagagttcatatttccggtcttgataagaagcctttggctctgccaaaagttttttcgctttccatccaaaatgtggggcaaaaaatgtattttgaattccataatatctccttaaaaattccatatgtctacgatccacacaaccaatccagacattctccttctgttcatatggaagaatcctcggaaacagatagcgcggatgatccacaaaccaggtcatatgtactcttccatccgctttctgcaaccgggaaaattcaatcgcctgcccacagaaaacaacatcccactcaaatccgcatattatctcataatcgtccaaccgatattttccaaccatatatccatgcttctgttccaggcaatccgccagtttccagagcatctcatttaatacattatactgatttgcggtaaatacaaaaagaaccttgatttttctgttcatagggcgccccctctaaatattttctttatttctccgataaaatagatatcaaactattcgcgaggtgcacatgaaacgaaatccaatgaatatcgtaattgctgtaaacagacgctacgtccgctattcctatatcatgcttacttccctgcttctaaataatcctgatccggttgatgtctatgtcctgcactgcgaccttactgcagaggacgagcttatatttagcaggctttccgagagctatcctgtcacttttcactactgcagactgactgaagaactgctgccaccgtcagatgtccgtgcctccaactcctggggtatcgagacctacttccggctggcaatccttgatgcgctcccaggaagtaccgatcgtgccctttatatcgactcggatatgatcataaaccgttccctcgaggacttttattactgcgatttacagggaaaacgccttgccgcctgccgtgattttatctgtaaagctccattcggcgactatcgggatgatactttccgtgacgtaatccctgaagggtttacttactttaacgctggtattactctgtttgacctttctgcactgcgtggcgaatacaatttcaaccgctatatggacactgtccgggaattaaactataaaatccagtttcctgaccaggatcttttaaattattgccatcggaatgacgtattgttttttgattccatgcagtacaatctctatgcaagacgtgcctatactgataaaggcttacattacgaggatgtaaaacaaaatacaactgttatccattacgcaaccgcaaaaccctggcagggaaattttctgcactgtgatattgaacagctctggtgggactacgcatccaaaacacctttttatcatgaaatcatggaagataccatgcgtgagattatgatggattctactgtcaatacttatgtcagtgagctgcagcaggaaaacgctcagctctatcacattcttgaccagtatgagcttcttttgaaaaaatcaggcattctgtaatatttataccgattaagtgaaactgtgcattgcatatatcacaccactttcttttacttcgcacagtttctcccttattctggtgtcttcataccagacatcgtcttttaacagtaactcaacacctgttttaaaacgattccacggattctgacaaatctgtaacagcctctcacccgcatctctgtcaaaccgttttttccatataaccatgcctgccgtctcatccatttccattgcagcttccacaaattccgccaaccacttactgttacggcaaatttcgtctaataacatcttatttttcttacaaatccagtaatttactcccgcagccccgataaggcactccgcatactcttcccgtccggcataattgatcatctcacccatctcctgtgtagaaatcatttcttctacacgtgcaaaacgttccggcaaactcttttctattgcattcatataactgtcacaaagaggttctccaagcgcgatattctgatacatctctgtaagattgtctaacacccgtcttgctatatattgaattctgatatcttttgcatcaaacttatctggtataattgcttttatgctatcccactgacgtttctcatcatgattatatccacatctttttgacgattgcgatgtatttagtgtcaatacgtactccggctgactcataaccacaattttttctgccctcacgattgcttccgtcattccctggcaatccccataaaatggataatagaaatcaatcccattttcttttaaaaagtcgattttcacgtagtgcatcacagaattgtaatagacatttttcatcaattctgccatacatgtcagtttgtctctattttctttatacaccctatactccggcaatgtctgatttactatccgaaatctaccttgctcatatttcgcataatagcttcctgtgaaaataacctgtggatggtgcttaacaacttcccctgcgacctctgacaatgtctgttctgttgtcataaaatcatccgctccaaggaacatcatatagcttcccaccgacattttcaggcactcactgattcccttacaccaaccaatattgtctttacggtatatgcattttatcctttcatcaagcctctcatactgtttcaatttctccacagttgcatcggaactgccattatcaagaattaacatttcccatccatcaaacttctggtttttcacggatgatattgctgcatccactgtctgtgcagaattataagtacacataataatggtaaaaagtggtatttccttctcataaatatatccgtaatccgttgaaactgacgaatatgaaagtccttcaaatatcttctgtgatgcaatattttctcttttaacctcagccgtcatttttctgcaaaatgcctgctcccgtagtctatcttccatgcatcttaacatccatttagcatatccatatcctcttgccttttggcagagcgcataagaaatttctccatccactccgtgcaaatccacacgagcctgtccgatgttctctccatccagcttcaaaacataaatttgcgtctgcttatcaccaagtttctccttataccatgccacatggctttcataagaaaatgtctctgtctgaaacgaattttttctgacatcctcatcattacgcaaatcatataaaaagcgacaatcttcttctgtcgctcttgttagtgtcagtttctgcatatgttccatccttttgtctaaccaaattctatataacgctccctatgttgaattcttccgcagcccttacattttttcgttgcgcagatacgctaaatcattctcactgcaactccgtgttccccaagatattcctttgcttccttcggcgtctgctctgtaaaatgataaatgcttgccgccgctactgcagaagcaccaccttcctgcactgccttgcgcatatgctcatagttcccggctcccccggaagcaatgactggaacattcacaagtgacgttgcaatttttatcatttcaacatcatatccttccatcgtcccgtcgagttccacagaagtcagcagaatttctcctgcacctgcctccaccacttttacaatccagtcctgtaaaagccagccggtatccaccgagccattgtgagaaaaacaatgatactctccattaatcttacggcagtcaatacttgccacaatacattgcgagccaaacagttttgcaccctccgtaatcagagacagattatcatatgccgcactgttgattgcaaccttatccgcacctgcacgaagcagattcttaatctggtcaatatgacaaatcccgccgcccacacaaaacggcacaaaacattctcgtgaaaaatcccggatttcatcgtaatccgggtctcttttttcattggttgcctcaatgtcgagcaaaatcagctcgtccacctcacgcatattataaaccttgatggcgggcagcaccgtatccacccgacgccaggagttaaatccgactccttttaccagtcccactgatttgtataataacgttggaatcacacgtacctttaacattttgcgacctctttttctacatactaaggaaattcttaatcaacttaaaccccgccttctgactcttctccggatggaactgtgtccccacaatattatcctttatgacagaggacacaaattctccgcagtaaggtgtcactgtagcaatattttcttcatttgctacgcgaaaatgatagctgtgcacaaaataataatttgtaccgtctgcaattccatcaaaaagtggcgaatcctcccgctttaaaatctcgttccagcccacatgcggaatccgttccttttcctgcgtctgcgtaaaacggataatttctccgggaatataaccaagtccgtcacattcccgcacctcataacccttgtccgcaaggagctgcattccaaggcagattccaagaatcggtgtctctttttccaaaaccgcccggtttaattcctctatccagccatttttccggagattgtccatagcatccggaaatgcgccaactccaggaagtacaatacgctctgcatcccgcagttctaacggattgtcgataataactgcatccgaaccgcacttttcaaatgcgcgctgtacagacaacaggtttcccattccatagtcgataatcgcagtttccatttatttgttctcgtcctcttctacattgtcataattaatcttagtcagattaccatttttgtccttaatcagcttaccgtttttatcagtcaaaaacagttttttgttcgtaaattcatcacagattttgataaactcgtctactgtcacaccgattggttctaagatatcttcaagcttcttatcaaggtaagtccatcggaatgcgccatcacgctcctttacagttttcattgcctcttctcttgatatacgtccgcggcggatgtgcatggatgcctggtcagagcagcgtccaaaaccaaatttcagatacttgaaatattcatgaataccagcctgataattgtcaaggttctcataatcatcgtaatcgccttctacaaccttgccccagctttcaaatccgtgcgcttttgccacaagcacattatgtaaaccttcccatgggatgtagtatccaaggaaaatgccggtcacaccaacacgttttaattcctcatctgtcggataggtaaatggaatcaggtctttctttgtaattccttcctgtcccacaagatcgttaacacgaagtccaagcataccaccaaactcctctaaccatctgcggtcaagaacattattctcaacggctgctgcaggtccgccgtactcgttctgggaattttctccccagatgataagcggtacattgaaattcaccgccattctcaccgggacggtaaaaatacttacatgctccggccatgaaatatcaccaacctctgtcagtccgatacggtttaacttcgcacgtaccacacggttagtggttacttcgatgtaatcaacacccatttttttgatattctcgatatttcttcttccgatatcagtgaggtcacaggttgtcgctgttacacagagtgggttcattccaagttctaacatagtgataacctgataggtgctgtcctttccaccactgaccggaataatgcagtcccagttacttccgtctttagaacgataacggtcaagaatctccatcaattcttttttacgctcatcccagtctacattcttacgattctcatagttacggcaggcattacagataccttcttcatcaaatgataaatgcggctttgtgcttggtaagcagcatcttttacaatactgaatcatattctttttcctcctgatgtcatttctatcttccataataggataaaattatttttttgatttccataaactgcacttcatccagatcgcgatcaatcagcccaagcaatatcttccctatgccttcattctgtgccagttctgtttttttgtagtctggatacagctccatcacccgtctgttcatatgacaaaacacatcatacggagaattgtcatattttacaagcatcgtaagaagtgttctgcaataatattctcttaaaaaatcttgttctataatttcacggtacctttcatatatatgtaaatcatggtatgtctttaatttcatttcctctattgcaaggcggtctacatgatgcattgcatttttcttatgtactgtggaatcctcacgttgacgataatggtacaaatcctctgccagatgaaaataacgttttacatacaacattaatatcgctacccagtaattatcttcataaaggattttctctgggaacttgactccgcttttcaatagcagttcttttttataaagtccagtaacaacacctccgccatatccttcctctccgaatctgtcaatccaatgcgttccaccttccatgatactcttttcttcagcatcaagacgattcggcatcttatggtatatataagtccgaccattaggatagtccctcatcattctacagtccacgatatcacaattatattctttcatacattgatataaccgttcatacatggctgactccagccagtcatctccatccacatagccaatatagtctgcctgcgcatattccaaccccacgttgcgcgctccaccctgacgtatgttttcatcaagatgtaccacggttacctgctcgggataatgactctcaaactccagtaaacaattccatgtctctcctccatcatctgatgcgtcatccacaaaaataagctgtaatttctctattccaatagtctggttggcaagcgatgtcatacagtccggcagaaaatctgccacattgtggcagcagataatcactgaaatgagtggtttcaatgttctttcacatcctttaaccgtcttgcaatctcatctactgacagccactctgtattttttcccgagctatattcaaatcctgattcaactttctttccgcccggctgtattttagaattatcccaccagtcaaaatgtggatatacaataaaatgtttatcatattcataagtcatcatagaatcttctcttgttaccataatctcatgaagtttctcaccctcacggataccaacctctggcatttcacatcccggcaaaattgcctgtgcaaggtctgtaatcttaaaagaagggatcttggaaataaaggtttctccaccttttgcctctgaaagtgccttaatgacaagctgaacgccctcgtcaagactaatccagaaacgtgtcatacggtagtcagtaatcggaagctcttttccaccgtttgctacgatattacggaaaaatggaataacagagccacggcttccagcaacatttccataacgtacaattgaaaaacatacatccttcattcccgcatatgcatttgctgcaataaacagcttatcagaaacaagttttgtacccccgtaaaggttaatagggtttactgccttgtccgtagacaatgcaactactcgcttcacaccacagtcaagtgctgcatccacgatattcattgcaccgtcaatattggttttcacagcttccatcggattgtattcacaggctggaacctgttttaatgcagctgcatgaaccacataatccacgccgtcaaaagctctgtataatctttctttatcacgaacatcgccaataaaaaatctcagcttatcaccatattttttgaatttattcgccatgatgaactgtttatattcatctctggaataaataataattttcttcggatcataattttctaaaacatacgttacaaactggtttccgaaagaacctgttccccctgttacaaggattgtctttccatttaacatattttaagcctcctgctttctcttacagcatcctgctgtcatgatattatttatatcgaacttttcacctataatcataaccttttaggtagaaatgctttgtttattagtatataataactatattcaatttgcaaacagacaggattaaaggaatttttcatgaaaatattattttaccgctatggaagcatatgtgaaccagatattatcgatggattctgcgaacttggaaatgaagttgtcacaatcacagaggaaatttacaacaaaaagttacttccctctgaaggtgttgcacttttaaatgaagcacttcaaaaggcaagctatgattttgttttcagcatcaacttctacccttttatctcagaagtctgcaacatttttcagattcgctatctctgctggaccgtggacagtccggtcatggaactttattccgattccatccgcaatccgtggaatcggatttttctctttgaccgcgcgcagtataacgaattttcccgctacaacccttcctgcatttttcatctgccgctggcaagcaatccaacgcgctggaaaaaagtgatatcttctgccacggatgatgatatttcccgtttttccggtgatatctcgtttgtgggttcactctatactgaaaaatgtccctatgaccgtctaaaaaaagaaccaggataccttactggttatctggaaggcattatggcagcccagttaaaggtctacggttataattttcttgaggaaatcctgccggattccatcgtagaagagtttcgtaattctctagaaggtttttatactccgccgaccggcttccgccggaatgaccgcgccacaatggcgcagttataccttggtgcaaaggtgactgctatggagcggctctggttaatgcagacgcttggctccaaatattccgtaaacttatacaccgcaagcgacacgaccggactttctgtccacaactgtggacttgcaaaaacactgacagaaatgccgcttattttccacttcagcaagattaatctaaaccctactgccaagtccatccagacaggactgccattacgcctgtttgatgtgctcgcctgcgaaggttttttgctgacgaattatcagtcggaactaacggattattttactccgggacaagagttggaatgttataccggagaagatgatttactctctaagacagaatattacctgacacacgaaaacgaccgaaaagaaattgcacacaacggttatcttgctctcgaaaaataccataattatccggagcgtctgctgcaaatgatatctctggcttatggattagatgcgttttagaaaggctacttatgaaaatattatttcttgactcccctgcttttgctaaacaggatatgattgatgcgtttgaagcgaatcagattacctgtgaccttttttaccacaaagattataaagaacggcacagcaaagaatttgaagaagcatttgctgctgcacttacaaatgcatcctatgcgtttgtattttcttttaattattccccgattctttctgcatgctgtcagaaccacaacatcaagtatgtctcctatatctatgacagcccattagttgctctttattcctataccttgatcaattcatgcaactacgtttttctgtttgataagtcagtttaccttaccttcaaaaatgctggtattgataccgtatattatcttccacttgcagcaaatgtatcccgtctctctgccatggtctgcccggatgcactgacagaaaagctctccgccgacgtttcttttgtaggttcactctacaacgaagatcacaatttttttgaccggttagaaactatctctgactttacccgcggctacctggatgccatcatgcacgcacaacagaatgtctatggcagtttttttctggaagatctgctgactccggacattattgccgatttacagaaagcagcaccttatactccaatgtcagacggcactgaatctgccgcctatgtatatgcaaattattttctttgccgaaagattactgcgcgagaaagactcgccctgttaaagcaggcttctgatcgtttttcgttaaagttatacacgcataacccagttcccgaacttccccatgcacagtttatgggacctgtggactggtattccacaatgccacttatcttcagacatagccgtatcaacttaaatataagtttaaaaagcattcacaccggtatcccgcttcgctgtatggacattttaggaagcggcggctttctgcttacgaactatcaggaagatttgcttgatttattcgttcccggagaagactttgttttctatgaaagtgatgatgattttatccggaaaattgattattatctgtcccatgaaaaagaacgacagcaaattgccgcaaatgcactcggcaaaatggcagaacgccatacgttctgccatcgtgtaacatcaatccttcaaattttgtccgactaatctttcataatgtaatcttcaatgtcctcctcaaagagctggaagccattctgatatccgcgcagaagcagaaggctcttttccacgagttccttcggtccaaggtctgcctgatagacatcctccccaacctgatattcttccttctgcgcatagagaattaccatgtcccgcatcggttctttgttgatttcttcattctggcggattaattctcttagatgtctgacaagctccttttgcgaaatctcattattttcaatctgctttaaaagtttttcctgctttgaaatcacttcatcaaggtgtttttgaaatttttttacttcatcaggcatatttttcagctttccaagcaggcgttcctgctgctccctgtcaaacattggtggaatttcttccaaaataccgtaaatatccagtttcttctggcattccactgcaatagtatcctttaaagctgcaatttttgttcctttgattttggcaccaccctcggttgcattaatcacttcataattatctttattggcaagaaacagattttcaaaccaatgcttatatatatacatctggtagtcggttttgagcatagttccatcattcccctccacatccatcagcagacggctttcaatgtactcgttattgtcgccaaatgcctgctcaataccctttgtatgggaaattccattggtgaatgccatatcctgccccacaagaatcattttcttaaagccaatatatgccgcaaactggaatgcctcggaggtaactgagcctcccaccataagccaaggaaaaatatatcccagttcttcgctgatttctgcattccattttccccagaacaacccgttataaaagattttccctgcatactgtttgattacttccggccgggcaattcttgagcatgcccaaagtaatccgtccaggttcagattttcaaagaacctgtccggtgattccgggtcgattgtatacacaatatccggacggattcccgcctttaaaagtgtgcgcaatgctgcatccaccacaatgatgaacgctttcccctgtgctttccgcagctcctgcacatttttatccaatgacggtcccgccgatacgataattgccggaatccctgaaatatcatactccttcagtttccgctttatctgttcaatattgcaattatatattaaatttttaatatggaacaaagtatgtctcggaatcatacggttaaatccgagataggtggctttaatggccatcagtgattccacttttcctaagaccatgtccatataccgctgacatttttcagggaaacggacatcatagcccggcaaaatacaaaattccaataattttgtctgagaataactgaccacctcatctacaatatgctggatatcaacctctcttatttccggaaaataccagtaagtacggtcatccttaaagagccctgtcaaatccaggaaatggcataccgctgaaaatgcttccatgtccggttcacaaataatcacgcggtttgtatcatcgcatttctccagacattgttttaagtgccgtccatctgcacatccatatagaaaatagattccgtaaagcggaatctcataacgttcccagtaaagttctgctgcaagttccgggtcaaaccgactgtttaagttccaaagatgccctttttcctgcactgaaacaatctgcatcccatttgatgcctcactcaccacaatccggtcggagattttatctatcgtaattttccttatttcatctgcatattccttatttttcttttccaatgcggacatgttcttttcaaataaatccatcttctctatttcccttctgccctaatcattttcctgaaaatagaacgggataaataacgctgctttttccatgaggcagtctgccactcccatcacatcactgttttgatatgcttccatcaattcccgcatcattgcaacagaaaatgcgcctgctgcctgcatctgctccccagactgtttttctaccaactgttgaagaacctttataataatctctgcctgttctaatccatcatgttcccggttctgatacagcatctttgccgtatcagagacactttgcatcaattccgtctgattcatatcaaaattgtctccctatagagtaaataatagaatgcgcgctccgcgaacattctattatcatgaaaaaagccggcagtataaaactgccggcttttaaattgcttgtaatacagattactgtaacagagataatacaccctgagtagactggttagcctgagcaagcatagactgtcctgcctgagcaaggatattattcttgctatatgtaaccatctcttcagccatatctgtatcacggatacgagattcagcagactgagtattctcagaaatgttatccaagttggagatggtgtgctccagacgattctgaagagctcctaagtaagaacgctgtgcagatactgtagaaatagctccctgaatatcagacatagccttaccagctgttgcgaaagatgtaacatcaagtccgcttacaccaataccagatgctgacatagcgtcgatggaaattgtgattctctgtccacagatagaaccaacctgaaggttcttagctgtgaatttaccatcgataaggttctgagtattgaactgagttgtagaagaaattctgttgatctcagatgttaactggttaatctcatcctggatagctcctctatcagcagttgtatttgtatcgttagcagcctgagtagctaactcgttcatacgctgtaagatagaatgtgtctcagataatgcaccctcagcaacctggattaaggaaataccatcctgtgcgttgtcagaagctttgtttaagccacggatctggcttctcatcttctcagaaattgtcaaaccagcagcgtcatcacctgcacggttgattttgtaaccagaagataatttctctgaagattttgcctgtgcgcttgttgtaacgcctaacattctgttcgcattcattgcggtcatattgtgctgtactaccataattcatttcctccttgaatttactgcggcttccatgccgcatcgtcttaattttgcagctttccttcccggccgtacgctccattccgttccactgccaagtaactttgttaagtaatgttcatcatcactttgtttacttgtattatatatcggatgttcatctcgatactttatagtaaaaaagaaatttttttcttttttctatctttattttttcttgtccgtaaacaccggctcgccatagtttgtcttcatcatatttttataatactgatttacaacacgctggctcttgcggacctccctgacctgtttatgtacagatgcaaatttttttgtcattaaatctttattgcgtgcttcctgtacctgtatggttgcacttttgctggttaatttgcggatataatcctgcatctgtgcaatttcatcacgataaatatcctgatgattcttcaagtcatcttttacccggtcaaatagttcctggaaaccatcatccaacagatccagctgttcgatctgctttgacttttcctctactgtcttatcaaaatcatccggatctaatgccggattttccaattcttcgctctgcctgatatttaattccataatagcatctaatatctcactcttttttttcaggctctgtatcataaccggaatatattggtttttctccatcttttccatatccttactgctgtgtatgtgccagcttcataacctgtttccaggtatcacgcatggtacgaagatgttttaatacttcttccatgatttccttatctttttttatgtttgcttcctgtagacgtaccaacaaatagttatatacttcatcaaaatcctttgccaccggatatttatgattcagcgtactttgaaattcctcaataatacgttctaccttcataatattatcgtgaactttttgaatatcttttgcttcgattgcttcaatcgcgatatttgcaaactttatcgctccctcataaagcatcagcgtcagttccgccggtgatgcagtcataaccttattgtttgcatacgctgcgtatcctctgttagccagcataaatcatttcctccatgcgttatatgattttagatataatttacttcatgtcacaaatatctgtcccacatctatgcggggcagatatttaaattttatcactctctcttttattttaccatcattttcagcaattttatcagcttccaaacaggttggataatgaagatgtctggctctgtaatttagacaacgcagtctccattgcagagaacttcttgtagtatgcgtcctcctgatcctgcagtttctgttcccacttcttgatcgtagtggtgtaatcactgtattcagaagccatttctttatcattgtaaactttataaatactgcttacagaagaagacttcatcttcgttccaatcgcatcgtataaattggtcgtaagctgctgcataaaggaaacgaccgtatccggatcagagtttatcatcgccatcagcttatcttcgtttccggaagttgctgtatcgtcctcatcaccgtcaatatgatatgcattctgctgattctccggtgcattcaagaaacccagtgtcttgattccaaaacttgacagataatatttcttgccatcaatcgtaaccggctgactcatggcattcgtcatcagattcatgacactttccaggctgtcatcacgacggagcaatgaagatttaatcttctcttcccacttctcaacctcagaatcagacattgcactcttttcatcatctgtcaaaggctcatatccctttgctgtatctgcgttgtaaagtgatgtcatttcgttgatcagagaattgtactgtgtcaggaaactcttgatcttatcgtaaattgcctgtgtatcggtcgcagttgtgacggtaatcgcattggtatctccatctccggttgcctgcattgcagtaatggaaagaccgttgatggagtaggtattcagtgaactggtgtatgtaataccgtttaatttaatttcagaatcacagccatcaatcttcattgcacctgaattggtatattgagagctctgatccataatttcttttgaatcctgtactttctttacaaatgcagctaatgctgttgtatagtctgatgaagttgaatccattgcagccagatctgcaagtaacgaattatcatccatcgttttctgtgctgtggtcatggtcgtctgattctttgtaatgacctccgcatatttgtttgtcacctttgtaacatcacttgctttacctgttttatatgcctgctgaatggaatcaatgatattctttctggaatattcatcatcaacagccagtgaatcctctgcactttcatacacattgactttctcaatattagaggtcaatttagaaacaacctcatcggtaagtgtatccttcttatcctctctaatcttactgagtacatctgcggaacgttcgatacctgttgctgcagttccctgtgtatatttcatctctgtaatatcttctgttgtacaatctgacacagcaactgtttttccaccactgactacatttttatcactatctacttccttaaaagtggttccgtctaatatataattttttccatctgttcctgcatatgttccgttatcattcggtgtatacacaactccgtttttatctgtatacttatccccaatcttatgcgatgtacctgtagcattataatatgccacattttcttttatactgattgtcgtggtcgtaccatcatctgaggtataagaatattttgcatttccatcatcatccttatcaccggttgctgtccagacatgaccatctttatctgtataggttccgtcatcattcgctttatatgtaagattatcgcttccctgataagttacaactttctgtatatactgtttggttccattattatcatacgcataaatcgtattgccatctgcatctttgcctgcttctgtgtatacatttccagccgcatccatcacagaattcactctctgggttgcactcataccaagtaaagtcttaagtttcttctgatcatcatctgataacccactgttctctaacgcatccatcatctctgtatatgctgttgcatatccatatgcagatgtaaggtttgtattctgtgcagatgctgtcttatatgatttctgcgcatcctgatatttctgaatggcatccactacattctgctctaacttagtgccatttgcatcatagtactgtgtataagacttgtatgttgcatttgttgcatccgaaccaacagccagtcccatctgatacagtgctctcgcaccttctgtatttgcaccggtcagggtaaaatcgttatcttttccgg

SEQ ID NO: 221 - DNA, 44860 bp, unidentified
  source 1..44860: mol_type = unassigned DNA
cgcaggctccggacgcttcgtctttgccctccgcttgacgcccatccgcttaggcctttcgtagaaagctgcgctttctcttgggatggccgatgccgaccgttcttctgcgatcccgcgtcaagcgtgggaacaggatagtttcgaagcaccctcacaagtgcgaggacaagcccagaggcaacacggaggcaaacacagggacaagcccgttcccacgcttgacgcgggatcacaaaaaacaggcagtatcggccatccccaaagagccgtcaggctctatttccggcctaagctggtgagcgttaagcgcagagaccgcagtgagcgcccggagcgtctgctgtttgagcgaagcgagtttcagacgcgacagcgaacggagggaacggagtagcgaagcagcttaagccttgatcttttggttacttttggatcaagccaaaagtaactataacaatagcattgtcttctctttgacaagatcactctcatccatctgaagcgaaggaaccgtacacatcttgatgtagtcaccggtctgacaggtgtagtcataataggcctgttgctcgggggtgaaatcctccttttggatcaggccgcttttcatggataaaaattcttccgtatccgtgcagtccgactccttgataagcaggatacggcgtgcgaccgggttccggttgtagtcaagcccgatatatagaccgcgcagttgccggggattccggaaaaatgggatttgcagatagattgttaccagcgtgaattgaggcgaggggttttcgctgaacatacaataaaagttctgcggatcacctgtgactcccatgccccattgcgcctccccgtaagcatttaaccgcccgatgcggatgtactccttgttttcggacaggctgatgatgaaaggttccatcttcaggcagtccgaggaagaagaaaggctgtaactcgtataaagtccgcatatgttgtccacccgtgtggtggaaagctgtatttcttcttgcaaatgttcgaggaaagggttggctttccggtcggattgcatgttcggttccatcccgtccaaacgttccaacagttccggtaggatggacagcaggcgccgtttggatatgttgttgaccaacacgatcgcatggtccaaagcttcctcgtgcgggcagttttttagttcctcgaaataagccggaagcactgtcgtgtacaaagaagacaggatgctgggagccattccggcacagtcggcaatctccttcatttttatcccgttgttgcgcagatattctatccgctggtagagttcacggaagtcgtccatgttgttcttgtttactgttttgtattgcaaaataagtacaaacgtgttgcatttccgttacatgaatgttacataaatattgctttataaccgattgatttataatacatataaataataaacattcatgccttcagtaatattcctgtaatatatcacgcctacttttgctgccgtaaacaaaatgacagtgtgttatgaactacgaacaacaaactaaaaatccatctcggaaacggttatccgattttctttttatcctctgggccggtggtgcggctcttttgtcttactcattggtatatgcactgcgcaagccttatacggcggctgcttttgaggatgtcgagtttttcgatatggattataaagtggttgttacaatctcccagatagtaggatatgtgatttcgaagtttatggggatcaagctgatctccgaactgagacgggaagagcgtttgaagtttatcctgatgtctgtcgtgatggcggagctttcgttggttttcttcggtctgctttccgctccttacaatattgcagctatgttcctgaacggcttgtcgctgggttgtatgtggggtgtgatctttagttttatcgaagggcgtcggatgacggatatccttgccagcctgttaggagtcagcatggtgatcagttccgggacggctaagtcggcagggttgtatgttatgaataacctgcatgtgaatgagttctggatgcctgcgctgatcggagctgtcgcactgccccttttggcgttgctcggatatgccctggatcgtctgccgcaaccgaccgaagaagatattgcgatgaagtcggagcgtgcaacactgaacgggaaacagcgttgggagttgttcaagaattttatgcctttcctcatgatgttattcgttgccaatatagccatcgtggtgctgcgcgatataaaagaagactttttagtgaatatcatcgatgtttccaagtattcgccttggctttttgcgaagatcgacagtgtggtgacgcttatcatcctggtggttttcgggttgatggtctttgtgaaggacaacctgaaagctctttccatccttttcggattgattattacggggatggtcgtgatgtctgttatctctttcgggcaggaacggttccagctttctcccgttgtctggctgttcatccagagtctttgcctgtatatcgcgtatcttactttccagacagttttcttcgaccggttcattgcctgtttcaagattcatgggaatgtagggttctttattgtgacgacggactttttaggatataccgggacagtgctggtgctcgtgttgaaggaattttgcaacccgcatatcgactgggcggtattttataaccagtttgccggatatgtcggcatcttctgctgtatcaccttcatttgttcctttgtatatttgcatcagcgtttccgtaaggaaaacggcttggctgccaaaaacaacgcagtgctcgaattggatacggctccgcggaacgcgatcacgatggcttgataaacgaatcagtataataaaagaaataaatcagttatgaaaaagatttcgtgtgtgattatggattgggccggaacggctgtcgatttcggctgctttgcccctttgaatgctttcctgaaagttttctccgaagaaaaagggattgatatcacctaccggcaggcacgtgagccgatgggattgttgaagatagaccatatcaaggcaatcctgaatatgccggaagtaaaagccaaattccaagctcgctataactgtgactggaacatggatgatgtaaatgaaatgtaccggagtttcgagaagcatttgttctcgtctcttcgcaactttacggacccgatccccggtgtgttggatacgatgaaactattgcgcgaagaaggaattaagatcggttcgacaacaggctatacgcaggcgatgatggatgtggtccgtcccgatgcggctgctaaaggctatgtggtggataatttggttactccggacgatgttcccgctggacgtcctgctccgtatatgatctataagaatatgatcgatctggctattccttctgtcgataatgtggtgaaggtgggtgacacgatcgccgatatcaaggaaggagtgaacgccaaagtatggagcatcggcatcgtgaccggcagcaacgagatggggctgacagaagaggaatacaaccaccgttcgccggacgaactgatcgaactcaagcgcgaagtgcgtgaacggatgttgaatgccggcgcccatttcgtcttggacaatattacggaacttcccgcctgcattgagaaaattaacggtaaatattgatttataataagaacgtcatgaatacaaaaagaaactacctgctgcttacccccggtcccttgagcacatccgaaacagttcgcgaagcgatgcttcaggactggtgtacctgggataaagattataacgaaggaattgtaacccctatccgtaaaggcctgttggctattgccggactggatgaggacgaatatacggatgtcttgttgcaaggcagcgggacatattgtgtggaggctaccatcggtgcggctgtgaaaccgaccgacaaactcctgatcctggcaaacggcgcctacggcaaacgtatggcacagatcgcagaatactaccatattgaccatgtgctgatctccctgcacgagacggaactggtgaccggcgaagtggcccgcaaggccctcgaagccaatccgggcatcacacatctgtcgatggtacacagcgaaacgactaccggcctgctgaacccgatcgaagaagtggccgaagtcctaaagggtcgtaacatcacctttatcgtagatgccatgagcagcttcggcggtgtgccaattgatatgaagaagctggatattgactttttagtcagcagcgccaataaatgtatccagggggttcccggtttcggctttatcattgcgaagaaagataagctggtggccacgaaaggaaatgcccgctctctctcactcgacatctatgcgcagtgggaaacgatggaaaaaggcggcggcaaatggcgttttacgtcgccaacacatgtggtgcacgctttttatcaggccatgaaagagctgaatgaagaaggtggtatcgctgcccgttcggaacgctataagcaaaatcaccgtacattggtcgatggtatgcgtgcgttaggtttcaagaccttgctgccggatgcttcgcaaggcccgatcatcacttcttttctgtatccttctgccgacttcgatttccatgctttctacaatcagttgaaggcgaaaggcttcgtcatctatcccggtaaaatctccgacgccgatacattccgtatcggaaacatcggtgatatcttccctaacgatatggaggcgcttttgcaggcgatacgatcaataaactactaaaaagttttaacatccttataaatgagggtgtgtcaaattgatattaccgggcgcagacgactcagaacacgcagacggaggcggatttattttgttgataattaatagtatctgtgttaatcagtgcttgtatgtgtcatctgtgtcccatgaatgccgatatttgacacaccccgttttaccgttaagaaatagcaaatcgatagttgcgatgtaagaagatttttgttcctttgggggcgaaaatcaataaggcatttagtgaaatcttttatttgcatcctgctggtattattccagtttacaatatttacaacggtaggagcggtttgcgaaccgcccttacgtctttccgtatccgatacgggagtacaggacagtgtatcccggatgtctgtcgtcgaatataaattcaaaccgaaaagcttgatccttcctgcctccttgataacagtcggggcgattggcactgccatagacgggatgaacgatttccacctcttttcccgcaaagattctgtcaagaagatacggatcgacgattatatggaatggggcatgctggggtgggtttttgtctgcgacctgatggggaaggagaaacataattgggtggaccagctttgtctggttgtcattgccgaaggcttcaatgccgccatgacacggacagtcaaatatacagttggtgaaatacgtcctgacggtggtccccattcgttcccttccggacataccgccaatgctttcttaggggcacatatcgcctggaaggaatttaaggacagcagcccggttttagcctattccggttatgcactggcgactttcgttgcttgttcacgcttgtataacaaccggcattgggtggccgatgtggtggcgggagctggtttcggtatcctctctgtcgaacttgcctatctgacttattttcccatccgtaacgcgatcgcccgtaaaatcaatatgaagggaagtgatcgcctggttgtcgctccgacgcttggtcctactgggggaggcctttatttgtcatggaaattttgatgacttatgatttagatgtcgatgataaatcataagttataaatcttttccagctcttcgataaacgtccggtcattactgagacggggtattttgtgctggccgcctaatttccctttcctgcgaagccattcgtagaaggtcccttcgcgggcaacctggatttccagcggttggagggaaatttctttatagcgtttggcttcgtagtcggaattaagctgctgtaaagctttatctagtaaggaggcaaaatcatccagcgaaggcggcattttctcgaattcgatcatccattgatggcggcctttcgccttgtcaagcataaagaggggagcggcggtgtattctttcactttggctcctgtctggcggcagacgctgctgatcgctttgtcggcattgtctaccatcaactcttctccgaaggcattgataaagttcttggtacgtcccgatatcacgaatttgtgcggataaagggaagtgaaacggactgtatcaccgatctggtaacgccataatccgccggaggtcgtgatcaccatcgcgtagtttttccccacctctacagcttccaatggaaggacggtcgggtgttctctacctacctcgttaatcgggataaattcataaaagacaccgtagtcgatcatcaacagtaggctgtgttctgccggatcgtcctggagaccgaaaaatccttccgatgcgttgtaggtttccatgtaatgcatccggttggaagggatcaacgccttgtactggtcccggtacggttcgaaactgatcccgccgtggaagaatacctccatattgggccagacatctgtcaggtattcgcttcctgccttttgcaataccgccttgatcaataccagcatccaggagggaacaccggacaagctgttcacgtcggctttccaagtgctctcgacgatcgccttgatcttgctttcccattcatccatcaggataatctttttgtcggggacgcggatcaggttgacaagagggttcagattctgtaacaggacggcggaaaggtccccgcaatgtgcattccggttcaaaggggaagggctgtggcttccgcccaatatcaaccctttgccggcaaaaaaatgactgtcgggataattccgtaaatagatggaaacggtgtcgaaaccgcctttgtaatgacaccctttcagaatttcgggtgtgacgggaaggaacttgcttttgtcgtttgtggtgccgctgctttttgcataccaccgcacgactgaaggccagaggatattcttttctccgttgatcatacgggtgacgtatggttttatgtcgtcataggtctgcaagggaatccgctcacaaaagtctgcatatccctgaatacttttgtagtcgtattttagcccccactcagtatttcgggcggtagacaaaagggatttcaactgtttgtgttggatggcgtctgcatcctgggcaaactttgcgatctctttttgcctggggcggaagagtagtgatattgtatttgtcagaatatccatgctcctgttgtttgaattgcatgcaaagatacgataaattccctatctttgtgcaacgagtacttaatcccgaaaaacgatgaaaataggtatcctttcctccggtggcgactgtcccggaataaacgccacgatacgcggtgtcggtaaaacggccattatgcactatggcatggaagtcatcggtatacacagcggctttgtcggcctgctgaataaagatgtccagactttcgacgaacgtagcctttcaggtatcctgaacctgggtggtacgatcttagggacttcccgtgagaaacctttccgtaaacttctggcttcaggcgaaagtgagaaaccgcagctcatcagacagaattatgaggagctcggtctggactgcctcgtctgtatcggtggcaatgggacacagaaaaccgccggtatgctctcggcgatgggcttgaatgtgatcggtgtgccgaagactatcgataacgacatctggggaacggacataacattcggtttcgatacggctgtcaatatcgcgaccgaagcgatcgaccgcctgcattcgactgccagttcgcacaagcgggtgatggtggtggaggtgatgggacaccatgccggatggattgcgttgtatgccggcatggctggaggcgccgatgtaatcctgctgcctgaattgggttttgatatggacaaaataaacgaagtgattctggatcgtgcccgtcgtggtaagccttattctatcgtggttgtggccgaagggatcgaaacgcccgacaaggagcgcccttccgtttatgtgacgcgtgtcatagaggaagcgaccgggatagagagtcgcgataccgtcttgggatatatccagcgcggaggtaatccttcccccttcgaccgtaacttggctacccgtttgggcggacatgctacggagctgatcgcaaacggacaattcggacgtatggtctgtatgaaaggaaatgaggtcgagtcgattcctctttcggaagtagccggtaaactgaaactggtgactcccgaacacgatctgatcgttcagggaaagcgaatgggaatctccttcggaaattgaaaaagaagaattgacaattagaggagagaaaaactaattctcaattttcaattctcctttctcaattgccattgcttcttctggtaggtcttcgaactcgttatcggctgtgttctcgccggttttcttctttttgagctctgagatgaattgctggaatgtcttgtcggtccgcaactttttgatcgccatcttggctgcgctttgctgggattcttttttcgaatagccgatgccgacgcctatctgcgtgtcggagagcgtcacgccagtctggaacaccggatttccgtcgttatcggtaaatgattcgatcaagtcgaatgatatttcaagcttgttcttttggctccattcgatcaggctcgatttgaaattgacctctttacgggcgattgtttccaggttgacatatttcttgatgagcacattttggatgaagttatagcagacttcgtagccctggtccagatagattgcaccgatcagtgcttcaagggcatttccatacatgtagttgttgtgggagtttactttggcggaatacacgaccatcttttcgagtcccagttcgacggcaacgcggttcagtgtatcacgctgtacgattttggagcgggtattggtcaggaaaccttcccgcttgttctgaaagtggttgaaaacgatgtcggctacgaccgcatccaatatggcatcgcccaaaaactccaaccgttcattgttcagccatctgccgtcactgctttctatggaagaggatttatggtggaaggcttgttcataaaggtggatgttatcgggataaaaaccgagtatcttgtataaagaagaataaggctccttattcatgttcttgaggagccttattcttttgtatagctttgtaaacacgttacttcacaaattttttaacaatagcacaagcattgtgaccgccaaacccgaaagtattggacagtgctgcccgcacttctcttttttgagccttattgaatgtgaaattcagtttataatctatttcaggatcatcatcaccatccgcatggttgatcgtcggagggatgataccgtcgtttatagccttgatgcagagtattgcctcgatcgctccggccgcccctaaaaggtgtccggtcattgatttcgtcgaactgatattcaggttgtaagcgtgatctccgaaaacttctttgatcgcttttacttccgagatatctcctaccggggtagaggttccgtgaacgttgatgtaatcgatgtcttccggagtcatttccgcgtcttccagtgcgttacgcataaccaacttggctcctaatccctccggatgggaagctgtcaggtgataagcatcggcagacatgccggttccggcaatctcgcaatatattttagctccacgagccaaggcatgttccatttcttccaggaccagacaggctgctccttctcccataacgaatccgtcacggcttgcgctgaatgggcgggaagcagtttcgggtgaatcgttgcgggtcgacagtgcgttcatcgagttgaacccgccgacacctgattccgaaacagcggcttcggcaccaccggtgataatcacgttagcttttcctaaacggatatagttgaacgcgtcactgatcgcgttggttgaagatgcacaagctgatactgtcgcaaaattgggaccatggaatccgtaaagcatggagatatgtccggctgcgatatcggagatcatcttcgggatgaaaaaaggattgaacttaggaccgatcgtatctttgatctttgcatatcctaacacttcttcgtcgaatgtcttgataccaccgataccagaggcaaagataacgccgatacggttcttgtcttccttatccaagtccatagctgcatcgtcaattgcttgttttgcggcatttattgcgaataaactataacggtcacacttgcgggcttccttacgatccattactgtcaacgggtcgaagccttttacttcgcatgcaaattgtgtcttgaatttggatgcatcaaactgagtaataggcccggctccactcttcccattgataataccttcccatgtttccgggagagtattaccaagaggagtaatagctccaagacctgttaccacaactctttttaattccatacctttaattaaaaggattgattacttcgcgttagcttcgatataagcgactgcatcgcctactgttgtaatcttttctgcttgatcatcaggaattgagataccgaattctttttcgaattccataatcaattctacagtgtcaagagagtctgctcctaaatcgttagtaaagcttgcttcgtttgtaacttctgtttcttcaacacttaacttgtcaacgatgatagcttttactctttcagcaacttcagacataactttttcaatttagattaataaatacgaatatactttttaaatttgcagtgcaaagaaaagaattttttatgttacaaaacaaatttaatgcactaaaaatgtggaaaactgcacattttttcttttcttgtgcacaaaaataggagaaaacatgaaaaacgtagcagtttttgcctctggctcgggtacgaacgcggagaatatcgcccgatatttctctaaaagtgaaactattaaagtggcgcttgttttgtctaacaaccggaatgtaggcgtacatgccagggtgaataagttgggggttccttcttttgtcttttcgagggaggaatttgtagatggggaacctgtcctggcaaaacttgcggaatatgatacggatctgattgttcttgccggcttcatgaataagatctccgatcccctactgaatgcctatccgggtaaaatcatcaatattcatcccgcccttttgcctaaatacggcggtaaaggcatgtacggaatgcatgtgcacgaggcggtcgttgctgccggtgaacgggagactggcattaccatccattacatagacgaacattacgacgaagggacggttatcttccaggcaacctgtccggttctgccgtccgatacgccggaagaggttgctgcgaaagtgcatgcactcgaatacgcccattatcctaagatcatagaagatttgcttgcaacccgttgaccggattgtatcagaagttcgcgctcagctgaatgacgtaggtgcggggtgcggaaacgagcatcgggcgtgtactgtattctttattgaacaagttgttcaccatgaactggaaagagagttccttcgtgatcttcacgcccgcacgcaggtcgatcacgcaatagggcgtgttgttcttcgcccaataggaatgaagtgtttgcccgttcacattgccgaagaggatgtcgcgcacgtagtccataatctccggctgctctttcgcccgctcgtccaccatcaggtagtcgacggccaatgttttgcttttccacacgatattggttcccaacgtcaatcgtttccactggaagtcgaggacggcttttacggtatgtttctggcggtacttcaggtatttggatgtgttggacttctctttcatgtgcatcggatcgttgtaggccgcttcttcttcgttcttttttttgtagccggcgtcttccggttcgatgaatacataccctaagttatagctcaatgtggtattggggttgaacgtatagatgccgtttgtactgatttccgctccgtagatacgtgctttcgacacgttatagaattgggctccgatccccggcatctgaccttgggtgatcatgctcaggaggtcgtgcgtgccgttaatgtactggaaagtcgtattgttgaagattccgaagcgaaactcgatcatgtcggtatattgggtatagaaccccgccaggtcgaagaagcccgtcaggtttccgaacttatatccctgtttgaaccccagttcaacgttcatgcccttttcggcgtttacctctttgttcgggtacacgccgacgccaccgatgtctttgcgggcatatttctcggttagcgaaggatagcggtaaccttgcccgaagctggcgcggataaagctgtagtcggcaagctggtagttcagtccggcacggaagatcggtttgactggaatcttggttccgaacagcttggtttccgcttcccgcaggtagttgtccacccggtagtattcggcacgcataccggccgatacgctcaggcggtcgaagaagcgctgatcgtattggacgaacagggcggcattgtcgctgtcgtgtgtcccggtcgttttcgaaacgcttttcatatgttcgtaggtcgccccggcggtgatctggcttccgttatcccatttcttattgaactggtagtctacatagtaagtatagttcttgtctgtccctttaggcacattctccttgttgttgttcatcacccaggagatcaggtcgcagtagtcggctgtcgtggcagtcgggaatactccgttcagaatgttgacggctccatccacgattccgttcaggtctccttgcaatatcggctggataagcgggaagaaagggctgtagtctccgttcttgatgttgtcgatataggcgttgacggtggtggcatcgcttcccatattacctaagatattgtcgagcgacttgcgggcggagcttccgtcgatgatgttgtctccccggtaatagaaacgggtcttgatcttatgcgaggtgttgttagccggattggtaaaattgaagaacgggtcgatatagaaggtgttccccttgcgccccatgttggcgatagacgacggctggtagatttccaccggagagcgccagataaagaagtcggcatatttgtcggccagatagttgaaattgaacccatagttcaggagtttcccttctttcatcggatggtggtatgttatattgcctccgagccgcaggcgccggttgtatccctgctcgcggtatccatcgtcggaaaacaggttgagtcctcccgacacatcgaagttcccgatccgtcgtgcgtgcgagagatccaccccttcgtattcgtcatgagccggatggtcgtagaccccgacataggctcgggcgcttgtagtcggcgtgagtcccggccgtttcgtgcggatattgatcaccccgttcagagccgatgagccgtagagtacggaggaggcacccttcatcacttctacctgttcgatgttttcgagcgggacgatgttccagttgatcactccgttgcccgaactcagggcgctcatgccgtccaccagcacaaggctgcgcgaaccgaccccgtatgtccatccgtttccgccacgtatggagggctgcttgtcgttgatatccacgcccggcattgtgttcagtgtcgaactaaggtcggtaggggcttgcttggcgatatcgcccgccttcagcagatccatcgaaacggtgacgtcacttagtttctgttcgaagcgtccggcactgatcaccacgtcccccagcaagttggctttgatgtgcatatagacatcttttgtcttgatatcccctttgcggagcatcaacgggagtcgttcgttttcgtatccgatgtaactgaacaggaggtcgactccaccgtccggcagtgcgatttcgtaggctccgtcggtatccgatatggttccgttcgtatccccgtttatttttttgtaggtgatgttgacgcccggtagcggttcatgggtttccgcgtcatagacatgccctttcactgtttgtccgagtgtagccccggtgaaaagcagcagggtaaaaatcaggatatatagctttctcatgtgaattgcttttaattgacggttttgtccttgtataaatagataccgatctcgatgggaattgcattcaactcctggcttaactggtccaggattgcgccgaacgttttccctttcaggagtatggctacgatacttgtgaactggggcgggatcaggttgccgatcaggtccatgacgggtgcgttaagcgtctcttccgggataaagaccttcacgatgtccagtagggcgaacaattcctggatttccgatttatcgaggagcaggatgagatcgccttttgccgggtcttcgctttcgaggatcgtcattttgatgccggttgtagaccaggtattgatcttctggtaggccgccagtagcgcattttccatagagctatccccggagtcggttttcgtctgtctgtttatcatcatctggcggatgatcatgtcgatctgcgggattacatatatggatgtattgtcttccacataataagttgctaagttgggtggcgaagcggtccagtcgtttgccggatgtttgatgtagctgcctatcaaacttcctatctggatcgagtcaggcaggggagcatagcgggcgatgatgttcccgtccgcctggaaagccagaccgtccagcacagagctgatcaggttactgatcagtttgccgcctaccaggttatacagcattccgatcatcgtctgtatgctgccgttatctacattataataagaggcattttcatgggcgatatgccaagtcccgttcgtccgcagccggttctccggaatcatgatgtccgacaattccagcaccagccttccggcctgtatgttgccctgataatgaaacgccgtaccggttgaagcagttgcgtcgccattgaaggaatagctgtcggaacctgctgtcagagagataccggcaatagtcgtttctttatcgtgtggtagtacatatttaagaatgatgtgtgcggttttcccgtcatccgtcttaaactccacgtctttcccgataaatgtattcccgttatagcttaaaataagggaatctccgtttgccggggcgcttagtttgttagagtaggtcccgctcagttccgccggggcaaggccgtcataatcatcatcgtcattgcaggctatcaagagaatagccagcatcatggcgtaaaggaaactgcatattgattttctgtccatgtatttcgcttttagttatattataggatgatacaaagaacaggtttaagtttgaatcaaacaatctccatgtttgggaataaatattctatttttaagattgttaggcgagctaaacatattttgctacttttgaaacaacaaaacgatgttttatgaagatagacgttgacttgcctaaattcgatattccgaaggattttattgtaggcgatggtattacgggcgacatcctgaacatgtacgggctttttccctgtaagataaaagcgggcgtgtttgccttttgtacgcgggggacgatccgtgtgacgataaacctggatgaacatacggcgcgggcgaacgatttcatcaccttgctacccaatacctttatccagatccatgaagtgtcggaagatgcggaggtttgtttcgtcgctttttcttcccgttttctggaaagcatcaattttatccggacgatctccaacctgatcgttacgatcatcgagaatccggtagtccctttacccggtaatgccgccactatctataaggattttttctccctgctagtacgggccgacaacgctcctgattctatcctctttaccgacagcttgaaaccggtcctcgacctactgattcaaggggtagtcaatatgtacaggaagttcaatacctggaaagaaccggttctgagccgtgacaaggagatcgcccgcgagttcgtgcagcttgtctggcaatattatacgaaagagcggagcgcctctttctatgccggaaaactgcggatcaccttgccgcatttctgttatgtgatcaaaaagacgaccgggatgacagccctcgatattattgccaatgtcgtgataatggatgccaaagctcaactgaaatcaacgaatctcccgatcaaggaaatttctatcggactgggctacagcaacgtcgctttcttcgacaagtatttccgccgctacgtggggatgtcaccgctggagtatcgcaacagctaagctgactttaccttagtttgttccggttgaaatgaggacctgctttcaataaaaagaacagtgtcgagagaatggtcaggcacgctccgaacaggtaagcgtagttgaatcccccgaaagcctgtgcaatgcttccgcctatcatcagtccgatcccgatccccacatcccaactggtgagataggtggaagtcgctgttcccctctggctgttgggggcaaggttgacgaacagggtattgaaagccgggaacatcgtaccgaatgcgactccttgtgaaagggcaatcccgatatacagataagaagtgaaagacggattccaccgcatcagcctttccagagctgccaacccgaaaaagctggcggcggcaagatacattcctaacgagatgaccagcgtgatcctccctttgtcgacctgccgcccggagaacatgcgcgagacagccagaccgatcgccataaaggtgaaatataatcccgaattgacggaaatcccgatctcatcggcatacatggccacgtatgtggttgtcatgccgtagggtatggagagcagcagcaaggagatacctgcccaagcgcctttcaccaaaaagaaacggtccagcgagatcggttctttctttatcggttgtttctgtggcgtcttgaccaaataggccatgatgaagccgaggaggcaggagagaagcgagcaggcgaaaatcgtttcgtaggagaagctggtgtgcatgaacaaccctgtcatcggtccgaaactcatggccgtattatttgccaacccgtagtaaccgatcccctcgccacggcgggaggagggtaggatatcgatcacgatcgtattgcccgatactgtcaccatgccgaaggcgaagccgtgcaggatacggagcacaataaagatgctcagcaggctggcgatcatatatccggcgaagatgaccatgaagacggagtaggctaagagatacaacggccgtctggcgaatgtgtccagcagatatccggagaacggacggatgcagagagcagcaatggtatagcatgacaggataaaaccgatcatcgatttatccgcatcgaattggtcctgcaagtaaaatggcaggatcggcaatatcagataaaatgcgaagaacagcaaaaagttggctgctaagatatagcagaagctgggtgatataagtttgtcttttgccattgttccgttttgtttgtgttattgttggattccgaaccccaatcttcggagcagtccggcttcttccggggttgcatggacgattgtgtatgcaccgtattctcttgggtgatgatagttagcccggaaccattcgaatctgttgggatgttcccgtagcgcccggtccacggtaagcgggttgaaaccggtcaggatcgcctgttcgatccggtttccgtcaaaccggtccaaatcgataaccggagtttcggggactggcggaactacttcgccgatcttctcgatcttcacctggaagaacttttcaatgttctccaaacacatacgcgtgccgttggctttcccgtctgccgaaaagccggcaatatgtggggtggctatcgtggccagttccagcagtttccggtttatatccggttcgttttcccagcagtccaagatcaattcgccgatcttgccttctttccgggcatgcaatagggcattcgtattatggacggcccccctggatgcgttgacgaaccaaggtttccgttggagcttacggaagaagtcttctcctgccaggtggcgggtggcaaaacggccttcttttgtcagcggcgtgtggaaggtgacgatgtcagcttgctctgcgatcgtatccagcgggacgaagccgtcttctccttctccttctgcctctgcgcgtggcgggtcgttacggagcacgttcatcccgtaggccgagcataacttttccacctcttttccgacatggccgactccgacgatcccgatcgtcttcccctgtaggggttcaccctttcggagtgcaatcgtgagcaatccggcgaatacatattgggcgaccgaaacggcattgcatcccggtgagttcttccaggcgatacctgcctcgtcgcaataccgggtgtcgatatggtcgaaacctatcgtggcgctggtaatcaacttcacccggcttccttcgagcagttcgcgggtacatttgtctatgctccgcacgatcagtgcgtctgcattctttacgttttccggtgtaaactctttagaagtgagatagtttacctctgcgatcggttctgcgattcctttcagataaggaacggtattgtcggcgactattttcatcttgctgtcctttttcgagaaggcaaaggtagggattattttccaatcttgacataattcagccgcgtgtactgtatgtcgtaactttcaaatgtcgcggcgatacgtgccgaagagatatgtagcacttcacccggccggtaggcatgttccagggaaggcagctgtccggaggcgtggctgggattgccggaggcaaaggttaggttgaccaggttgccgctcgcatcgatggccgtcaggcgctggcggacgaagaagactggagtcgtcccgatgacatgggtcctgtacgggtcgtcttccacccgtactttggttatttttagggtgagattggacagcttgtcccctttctttcctaagaaacggctggtagggcgtggctgatatttctttttgagcatcttgtccaggtagacgcagttgtaggcttgtgccattttgacgaaacgttcctgcttggggatggtaggggtatatttaaaggcgatccagttcacgtagcccggatctatccgcaggatttcatacaggaaatgtccacggtatttgccgaaagcgatcaggtcatccccatgtgtcgacatccttttctcattgtagtccgtgattaggatctgacggttggcataccacaattcggaagtgacgatgcgcagcgactggataatgtccgttttcaagtcttcgataaacaggatgcatcgcttgtcgagcaaaggcgtatagaaccacaggctgtagttcggatgcccttctctcggtaagaccacaaggtagcaccctgcctccttatacgaggctttcccttggttataaatattcaacttctcatacaggagctcctgttccgcctctgttatattgggtaatctgggatttgccatatcgatacctcctttttatgttttgacacactgcccgttttgcgtttattgtgcattatggacagattcaactgttttagcactgtctttgtttccaaatcatgtgctgaaggcaatctttattcatgccattcatactgacaatatgagctgtgaacgaagatcgagaaaaatattgacaatatccatgtttttccaactttaattgttcatattcttatattcaaaccacctatttggcttcgccatattttaaaacattttgattatcaaagtgtacaagggtgaaggtggtttattgcttagtcattccttctatcgtctgataagcatcccggataacgatcggcgggaagccgtttatttccagcaggcggatagcgttgcgctggtagaggggaccgtttttgagtttgtagtcgaaaaaaaaggtttcgtcctcaatcacttcgctgaaatggtaaagatcatattccttatcgagcaaggttgccagttccgtgtcgtgggtggaagcgacgatgatattgtcgtgggtattcaggtaggacaggacagctttggcagcggcaatccgttcggtggtgttcgtgcctttgaatatctcgtcgaacaggaagaggttggctgtccctttctgattccggctgatcatctctttgatagtgtctacttccttcatatagaaactttttccttcagacagatcgtcggcaagcatcagggcggaatatatatttaaaggggtggccagaaggaaagaacgggcgaatgccgtatgcagggtttgtgccgacaggacattgatgccgatgatgcggataaaagttgttttgccggacatgttcgatccgttcagcaagaccgatctgtcttgtatgtcgatggagttggcgacacagtcttctatcaaaggatggtacatctcttggctggccagtctgtgcctctcttccggtcttccgggaaggcaatagtagggcagatgttcccgcaggaaacagacggacaacaggcagtccgtcagcccgacgaaccggtagaccgtttcgatctcccggcacttgttccggaggatagagacggattgcaggaaagagaacggttctgtcaggaagaagatatgcagcagctcggtgcagagccaggcaagggcggccatgtcgctttgtagcttgttctccatgcggaggaacagggcggttttccggataggcttgagcgtggccaaggcatccggaatgtctgtcgccaacttgcttagttccgggattttgcatagcttctctgccgtccctaacagtttgataagttgggggacggaatagatatagtcgatgcttttaggcttgtaggtgtagtggattccggcattcaagataatggcaaccaggaagaacaacccgcaggcaggtatataaaggagcaaatagagaagtaggaacagagccggaaggcatttcaagatagcaaaagtgacctttcgatttgtggaggcggctggttgctcgtctgccaataatcgtacgatactgtaggcttcggtgtcgcgcaaatgggatagtgttttggccagtcgttcccgtagatggctgtccgcctgcaaatgacggatgatctcttcgtgccggctgatctcgcctgccgcttggggaacggaccgtaaggtctggtacaggtattgttgtccgactctcgaaacagtcctgtcagcaaaagtaaacaactcttccactcctaagtccgaataggtttggtcggatagcaggttgtctccttctacctctttcctgtaccggaaataagcggagatatcggtgaggttgaacgtctcgcttttgatctcgcctgcgtagctccttgctcttcgtcccatttgtaatgtttgtattggtgatagagacaaatttagacataaatcgtgatttatatctcggttttttccgtaagtttgtgcaaacttctttttagaagaggttagggcgttcaaaaagcacaaaatcaagcaaactttcatatatgaacacttttaatgtacagaaaaagagcactcgtgttctcaccctttgcggggcggcgatggcatcgctggttctttggggatgtagtgggacaggtgcgacggccgacaagtcgtttgaacggtcggactattacacacgcggcatcgggcagtacccgggcaacccggaggaagatttctctccttccctggctccggatcattcgacttaccggaacatagcccttctgcgttctgcttttgcctcttccagccatgactacaatctggtagcgcagttggctacagacggccttgtttccgacaagcagccgcagtatctgaacttgtcgactcccgaaggcgatgtcccgagacgggaacgcgaatggatgatcgatgaaggtccttattcacggaatacttttaccggaggagatacttattttcagtttacgctggcaaactatagcaaagcggccggtaaactctctttggtgggaacagtcgtttatgacgataagatttcgaaaggcggatatgaaattatctgccagggttctaatgacgggcagaactggacagagatagggaagctgagcggtagcgggctgccgggtaaagcgctctcttatcgtgtcccggtgaccgacccgaacaagcagaccgaccagacgacgactatgccggtccgtaaattgaatgaaacgataactttcgataaagaggtcgcctactccgcctaccgtgtactgctgaaaatggcgggtgctcatgactgggtgtttacggaggcgaacttcctggatagggacggactggtggagatgaagccgtcccagttcttcaatagtgcctggatgagtgcaacggcaggtgaagaatggctgtatgtggatttgggcagccggtctgaatttgacaaagtgaacctgcactggatcaataaagccgtgaagggtaagatacaggtatcggacgatgccaaacagtggaaagatgcagccgagttgccgggaggtgacgggttgaacgatgagatcaccttgaacgacaagctgcaggcccgttatgtgcgtgtcttgatgcaagagtcggcgaacggcagtcgctatatcctgagcgaaatggaagtaatggggaaaggcggtctggttgcccggcctgtggcttctcctgcggtgtcaaagggggaaatgaacctttccggtggcaactggagactgcaacgtgcttcggaagtgaacgcttcgggcgaagaaatctcgaccccggagtttaaaccggagaactggatcgtggcgacagtaccgggaacggtattgagcagctacaagaatatcggggcaattgccgatccgaactatgcggataaccagttgcaggtatccgagtctttcttctggtccaacttctggtatcgcgacgagtttgaagtatccgaaggattcaagcaggatcgcctgttcctgaacttcgacggcatcaactggaaagcgaatgtctatctgaacggaaagaaattgggccgtatcgaaggagcctttatgcggggtaagttcgacgtgacggatgttgtcgctccgggcaagaatgtggtggctgtagagatcattcggaataatcatatcggggcgatcaaggaaaagaataaacagagcacggattttaatggtggaatcttaggggctgataacccgacgttccatgcaacgatcggttgggactggattccgactgtccgtggacgcaatatcggtatctggaacgatgtcttccttacttctaccgggaaggtgacggtggccgatccgcttgttacctctgtcttgccgttgcccgatacgacttccgctacgttgacggctgaggtgatcgtgaagaaccacgatgccaatacggtaaacggtacgttggaaggcaaggtcggaaatatcacattccagaaacctgtttccttagcggctggagaagagaagacggtcgtcttcgatgtcaaggatttcccgcagttgaagatggagaatccgcgtctgtggtggcctaaagggtatggtgcgccgaacctgtatgatgcgaactttacgttcaaagtaggagatgccgtttcggatgcgaaagactttaaggtcggtatccgtcagatgacgtttaatgaagataaccatatcctgagtctctttatcaacgggcgccgctttatcggtcgtggaggtaactggggtttcggtgaatccaacctgaactaccgtgcccgtgaatatgatatcgccgtggcttatcatgccgatatgaactttacgatgatgcgtaactgggtcggcatgatcggtgacaaggaactctatgaagcctgtgaccgccacggtatcatgatctggcaggacttctggctggcaaatccggctgatggtcctgatccgtattacccggagatgtttatcgccaatgcggaagattatgtaaaacgtatccgtagccatgcttctatcggcctctactgcggacgtaacgagggtttcccgcccgaacagatcgataaggcgttacgccgtatcatcaaggaagaccatccggatatccattatatctccagctcggctgacgatgtggtgagcggtcacggcccgtaccgtatgcttccggcaaaagagtatttcacgctgaagaccggcaatgacaagtttcatagtgaacgaggaatgccgaacgtcatgacctacgaaagcatgctccgcaccttctcgccggaaggaatctggccgcaggacaaccagtggggtatgcacgactatacacgcgaaggggcacagggctgtacctctttcaacgagatcatcgcgaaagggtatggcgaaccgcagagtgcgaaagagtttgccgaattggcacagtgggtgaactacgacggccaccgcagtttgttcgagtccagaagccagaaccgtaaaggtctgttgatgtggatgagccattcttgctggccttctatggtatggcagacgtatgattattatttcgagccgactgccgcctatttcgcaatcaagaaggcttccgaaccgctgcatatccagtggaatccggcaacggatgaggtggaagtggtcaactacagcgccgggacacatagagggctgactgcaaaagttcagatcctgaatatggatgcatccgtagcctgggaaaaggaagcgactgtcgatagcaatgaagatacgaccaacaaatgtatcaagttggcattcccggccaacctatcgaaggtacacttcatcaaaatggtcctgaccgaaaacggcaaagtcgtttctgacaacttctatcacagaagcctggaagaaaacaactaccaggatctgcgccagttggcaaaggtcgctttgcaatccacgacaaccgtggataagaatgcagacggaacctggagcgccgtgtccgttatcgagaacaagacgtctacaccggctttgatgattcgcctcaatgttgtcggtagcaaagacgaccagcagcttctgccggtattctattccgacaactacttctctttgcttccgggtgaaaagaaggaagtccgcatgagctggaaagatgaagataccagaggcaatgaaggtaaggtcctgattaccgggtataacgtggaataatttataagtaggcaatgatgccatccttccgaatatgaaaggtcatatcttcctggatatcacttctcatatccggggggatggcatctgtcgtatccgaggaggatgaaacctgtcatctttcctctgatatgagcatcaggccgatcccttttactgtcttgatgcagactgtctcgtcttttgaaatcagtttgcgtagtttggttacgaatacatctaagctacgtgaggcaaaataatcatcttccgtattccagaacttatccaggatcacttctcggcggactacttcgcccggcttgcggaatagaagttccagaatgccggtttcgcgtggtgtcagtagttgggtacttccggaggtatggcgcagcgttgcctggacaggatctaatgtatagctgcctgccgttagcatttgtgcggtttctttttcagttatccctttctttatacggagtaacgcatggatatgggcatccagttcttcgggcatgaaaggtttctttacataattatcgactcctaattcatatcctttcactacatctttgggagaaacacgggcggaggagaacaggatcggaatctcacgatctgtttcccgaatgcggctcaccatttcatagccatccataatcggcatttcgatgtcggccacgataatatccggtttgctcttccgataggcttccaacccctcttttccgttgtgggcgacagttacttcataatcacctatcatgtcttccaagcctccctgaatgatataactcaggttggcatcgtcttctactactaataatctgatcatactgttatttcgtattctgtgggtaaaggtaatgagattgtaaattcgctgtatttcccctcctggctttcgacgctgacataccctccatgcgagcgggtgacgttcatcacgtagttcaatcccaatccgaagccggtaacgccgtttaccgcattgcggctggcagaagcacgttcgaacttgtcaaagatatgattctgagcggaaagtgaaatgccgatcccattgtcttttactttgatctgtataaatttgttgtacatgcaggaggtgatttgtatatcgactgtctctttcgagtatttgatagcattgtctatcagattgcttacagcctctttcaggtattcttcgtctgcaaagatattttctttttctatattcagctcaaaggtgacccgtttgtctgtcttggcagtaaacatctgagtcagttcttctatcatcgggcggacaggaatccagttcttttctaacaggagttgcccgtgttccagtttggaaatagtcaggatcttgttagtgagtgccatcagatgctctgcctcttcttccagtatgtcaaaaaatttttctttcttttctggcattttatccaacttgccactgcggagaatacgggctcccatcaggatagaactgagcggtgttttcatatcgtggatcatggcataggagaaatcttcccgtatccgggcgatctcgtcttgtcgcttgatgatattaatttgcttccgaatgcagatcgcaaggatgattagtgcgatgactgttccgaaaaaatagtatagcagcctgccgatgtagcctgcgcgtggattgatgatatgggcatatatgccttgcgtgtcgttgatcggatatacaaatgtatgtcgttcgttgaatagccgttcgtaatcggcgaaataccgaatgtcattcctctggaccgttttaggatcgttaagggaaaccgtatctatacggaacatcagcttatggagttcttgcttgttgagttcttctctgaacagagctggaaataggtttgtcttgttggtatcgtactgttctgtcgcatggcagaaagactcatgtatctgtcgtgccaacaggccttttgtcagcgcaagacttctgccggcccattgtcctatcaggaaagaaacggcagtagcggcaaccgccgtcaatatgatatagaatgattttgtcataacttttgtcttataacggcaaatataggtattccattatttcttgcctcctttgtttttcttcttaacgtaaagataacgttgagataaccttccgtctcttttgcaacctgtatctttgtggtatggaaatctaaaaacgaatacgatatggaaacaaaagaaagcaatttagaaaaatatgtacttccgaaaggagtagtggtgaaaatgagtgctaaccggatcatggtaattgctttattttcagcactaattcttggaattatgggtggtttgtttttttattatgtttggggagaagcttcaagtgatcgctctggatttgaagttttcagtttaaaaggaaaccttattatgattctttgcattgctggatatattctacttcaatatatggcattatattgcttttccggaagagattatcgggtgttgcgttggaatatggattggaaatcgtggggatttcttctgacgaagcctttggccttgaaatactatcgtatagttttgctattgccattttttgtattgggattattaccggtgatacatggtttttgtacaggaaatcgcatgatctactttattggaatattttgtatattgtgtagcagtggcgattgttattatttttggcaactccgttccttcgatgacaatgataaaattgtagacggggaacgatcttatgatgctaccattattaaagggacttattaatacaaatatattatggaatcaaaattacatcgactgattgcatgttgttgcgcagacaagagataccggaattgcgtaaatatgttattgtgtatagtatctttggcaatgatctatcgcttaggctatgttgcaggcaagttcatctattatgtacagcagaatttctttccctgattattactaaaatattacgctgcccgaaaaagctccgtttccgtacgggacttatcgggtagctttttatctttgccggaaagaatatcggaagtggatgggaaagcggatcaaagagcggtttgaagcaaatccagatgtggaggtcgaagaagaaatctatcatttcggcaataccgtgtttgactattctacaaatgaaatccgtacaggcaacagcaaaatactggtgaccttccgtcaggctgaaattcttcgcatccttgtccgtaatccgaatgtcgtgatcgaccgtgagatcatactatcataattgaatttatacacctgtaggacagcatattattctatgatagttactgttttcaactatcattcatctatcataaccatcatgggtaaaaatcaataagatattatatatcagtattctatcaaattgcagatatactctgaagctgatacaaaatatataaatagactcgttttttcatgaatacaagctactcttttaccaaaaacaacttgaaaagtttcttcaggcccgggtagcgggacgcgggagatccgggtatagaggatgcggagacccggatcttgatgaaaccggaacagggatgtagagctgtttatctgccttgttcgaggaagttttatgcactgtttgcgaaaaatctttaccgacaaaatgatatttgatcgtgattttggtgcggttgcctggacaaaaaaaagctatatgctgaaaggataaaaaaacttgctatctttgtacgtctgtatttactaagtaaattgaactgtatgagtttcagcgagaagtgttgccgggtttttgagcaggctacgaatgcatatcatatcactaaccatatagatgctacggtataacctttatgaggtgaagagtattcaaaagccgggtgtgaacatatgaaggtctataagcaaatgaaaatgtacgataagaaataaatggcaaagatattagtgatacgactcgctgcgattgccgacgtggcgatgactcttccggtcatctattccgcagccaaagctaatccacaagattcgtttacggtgttgacgcaggcgtttatgatgccggtattcataaaccggccacctaatctggaagtgataggcatcagcaccaaaggggcggagaaaaggctggtcggccttttgcggtttacctctgctttggtgaaattcgattacgacattgtcctggatttgcaggatgtgatccggacttggatcatctgtgccgcttttcggatgaaaggaaagccggtctacatcctggataaaatccgaaaaaaatatcctcctcttatgcgcagggaaaacaagaagctggaaccgctgccgactgttatcgagcggtatgccgacgtgttccgtgcggcaggattggcctataccgaatcttttacttctttatatgagtcgcggccggcagatttgtcgaaaatggaagctatcgccggagtcaagaccgggaaatggttaggtgtcgctccttttgcccgttatcagggcaaggtatatccgattgatgaaatggagcaggtcgtggctactctttctaaaagggaagacctgactttattcctgttcggagcaaaaggatatgaagaggcggtattggaggagtgggcctatcgctatccgcgtgtaaagaatgtggtgggtaaatatacgcttgataatgaattggcgttaattagtcagttggacctgttgcttagcatggattcggcgaatatgcattttgcctcgttggtcggcactcgtgtgttgtccgtctggggggcaacacatatttatactggtttctatggctatcggcaacgtccggaggatgtgatcgggttgccgttgccttgtcgtccctgttcgcaattcggacagaaagaatgttccagaggagactgggcttgtttgacgcagttgccggcagaaaagatcgtgtcccgtgtgcaagccgccctggcagaacaatagcagactgtaaatatagattcagagagtgaaattaaaaaagaaggaaaatgaaacaattacatatcattaccccggtgaaagattcgatagagctgactttacagacaatcgagtcgatcctgtcatccgactttacggttccttatcattattatgtatataatgatttcagcacggatgaaaatacggcacgtcttcgtgaagcctctgagaagatggacttcgaactgattaacttgtcagatctgaccgatcatccttctcccaactatcttttgatccttcagactgcacagcaaaaagcaattgccgccgatgccgggcttttgatcgtcgaatcggatgtgatcgtaaagaagcatacgttgcagtcgctgtttgatggcgctttggcacgtccggattgtggtatcgccgccgccgtaacggtcgacgaacgggaaaacatcaattatccgtatttatacgctaaaggtaaggagggcaaagtctttccggagaaaaagcatttgagtttctgttgctccctgctgaccttgtctttcctgaagtctttcgatttccatcaactggacccggaaaagaactggcacgatgtgacgatctcgcatcgttctctggaaaaaggcttcacaaactacctgtttacaacgttgaccgtgtggcatcgtccgcacggcagccgtccttggaaacaacttaaatatacgaatcccttgaagtattactggttgaagtttacaaaagggctcgataaaatctgaaaaatatatatgaaatataaagcttcattgattatctcgatttatgataatgtatcttttttgaaagtcgtattagattcactgatgtatcagacagagaaaaattacgaaattattatttcagaggatgcggagttttcagaggttgcaaaatttgtacgttcttatccatttcgaaacgattatcagcatttgacgcagccggatcaaggatggagaaaagaacgtgcattgaataatgcagtaaaggcggcaaaatctgattggttgatttttattgatggtgactgtgttttacatccgaggtttatagaatggcatgtcaaaatggctgatgaaaactgtatattgggaggtaacagagttaaattgaatcagaagttatctttgaaattattagaggactctaaagagattttttctatgccgtcttatttatgtaaatctttactattaagcgaaggaactcgccatatagaggaaggtttctatgtttcgccagataatatcttagggcgattgttaaataaaaggaaaccacgtgggcttattggctcaaatatgtctttttcaaggaaagcgattgaagatttgaatgggtttgatgaagattttattcttcctgccataggagaggatgcggatttgaactggcgttttcgggcagctggctatcaattccgttcagtgaggaatttggctattcaatatcatctttttcataaggagaattggaaagaccaaagtgaaaatgctgctctaatggagttgaagatagccaaaaatgagtttcggtgtaaaaatggattaaaaaagatgtaacatggaatatcctttggtctctgttgtcattccggtgtataatatggaaccgtttttgggtgaaactttagattcagttcttgcttcagattatccttctttggaagttgtggttttagatgatggttctgttgatgcttcatatgcacttgcaaggcaatatgcagagaaagatggaagagtgcacgtctatacacagttgaatatgggggtctctgctgcccgtaatagagcgatatcattagctaagggcgaatttatccttcctgtagatgccgacaataagataagtcgagagtttatccataatgcggttaatgtgattttgcaagatgaagaggttaaagttgtaagtccgcgtgctgagttctttggaaaccgttcgggagaatggaaactacctcctttctctttgaaattgttagctcgtaaaaatatcatggatacgtgtgcgttataccgtaaatctgactgggagcgggttggaggttataatgaagatattattgcacgggaagattgggaattttggattgccttgttaaaagatggtggtaaggtgataaaactaccagatgtatctctttattatagggtaagaagcaactcaaagcgaatgactgaccgttctcaaaaaaaacatgtaataaatgtattgaatcaacgccatcctgatttttttgaacgggaattgggaggaccgttacgatatagaaggacgtggtctcaattgattaataaggcatatcgtctattccatcccagtgtttcattggttggtgaaaactatgtcgatttttcttattgggtaaaggcacttccgttttgttttggtgatagtttcggctctttaatatataaaggacgtaatgaattgcgggaatataattataagggaaaagatttggttattaaatcttttgctaaaccgaatttgattaatcggattgtctacggtttgttccgttcttcgaaagcgcaacgttcatatgaatatgcagacatgttgttgaaagcaggtataggcactcctgaaccggttggttattgtacggaaaggatcggccttttgtttacccgaagttattatattagcttgaagtccgaatgtccgtatgtctattatgatttgataaaaaaacattttgataatcaagagcagattcttcgtgcaattgcacgtactacggctaccatgcatgatcatggctacttgcataaagattattctcgtggcaatatattgtttagagaaacagggaatgaagtaaaagttgagattatcgatttgaaccggattcgttttatggaaattgggatggaaatgggctgtaaaaactttgaacgtttgcctggtacaccggaaatgtttgctattctcgcagatgagtatgcgaaagcgagaggctttgaggctgatgagtgtctaaaattaatgcttaaatataattcggcaatgttatgagattgataaaaatgataggagggttggggaaccagatgtttatttatgccttttatttaaagatgaagcatcattatcctgatacgaatattgatctttcggatatggttcattacaaagtgcataatggttatgaaatgaatcggatatttgatttgtcccagacagaattttgtataaaccgtactttgaagaagattttggaatttttgttttttaagaaaatatatgagcgtcggcaagatccgtctactctttatccttatgaaaaaagatatttttggcctttgctctatttcaaaggtttttatcaatctgaacgtttcttttttgatataaaagatgatgttcggaaagcgttttcttttaatctgaatattgccaatccggaaagccttgaattgttgaaacagatagaagtggatgatcaggcggtttcgatccatatacgacgtggagattatttacttccacgtcattgggcaaacactggtagtgtttgccaattgccttattataaaaatgcgatagcagaaatggaaaataggattacggggccttcttattatgtgttttcggatgatatttcctgggtgaaagaaaatataccgttaaagaaagcggtatatgtcacttggaataagggggaagatagttggcaagatatgatgttgatgagtcactgtcgccaccatattatatgtaacagtacatttagttggtggggagcttggttgaatccaagaaaggagaaaatagtgattgcaccttgtcgttggtttcaacacaaagaaacaccggatatgtatccgaaagaatggatcaaagtaccaatcaattaaaatgatgaataatgaattggaggatattaaaaaaaataagtattgcggtgattgatgtttttaaagctttcaaccataagtctgaaccccgtctgattatgaccttactagttaaggatgaagaagaaatgttggagaaaaatctgattttccataaatcattaggtgtggacggatttattgtgacagataataactcttcggatgctacgcctcggattctccagaaatataaggataaaggttggatattggaagtgatcaatgaaaaagctactaattatgagcaaaagaaatgggtcgaccgaatgatctggaaagcgaagatggaccataaagcggattggattataaatgctgatgctgatgaattatggttttcttcgtctggaagtttaaaaacagagttggaacaaactcgtgccaatgtgttggtttgtgagatgaaatgtgtttatcccgaagaacataagcctttttgggaatgggaccagacggtagaggttgttaataatccgttattttatgatctttctcgctattccttatttactcgtcagaataagaaagttatacatcgtgctgccgggtatttacaaatttcaatgggaaatcataaagtagcaatgttcccgaaacggaaagctgttagtaatatctgtatttatcattataatattcgaggaaaaaagccgtttttaaataaaatgataaatgggggcaaacagttggaacaaaatcccagtaagcatggcggtcgtcattggcgttatttttatcaattgtataaagaagggttgttagaggtcgaatatgatagagtggtcggtaagaattcgtatgaacgactgaaacaggatgggtttatccgtaaggatagaacgataccagaattgtttgcacgattaaaggaagattaaatacgtcaaatggaaaatataaaacttgccgttatcggcctcggatatgtcggtttgccgttggcacggttgtttgcgacgcgttatccggtggtcgggtatgatgtgaagcgggagcgggtggcagccttgatggaagggcgggacgcgacgcaggaggtatcgggagaattgttgaagtccgtactgttgccccggttgccggaggaaggtgagacgggattgttctgtacgtccgatgcggaacagctccgtgggtgcaattattatattgtggcggtccctacgccggtcgacttgcatcatagccccgatctgacacctctttattcagccagtgaaacggtagggaaggtcttgggcagaggcgatatcgtgatctatgaatcgactgtctgccccggcataacagaagatgaatgtgtccccattctggagagaacctccggattggtttttaaccgcgatttctttgccggatattcgccggagcgtattaatccgggagataaggaacatacggtggagaagatcatgaaagtgacatccggctccacacccgaagccgctgagaaggtcgacaccctgtaccgatcggttatccaggccggaacctacccggtttccagtatcaaagtggcggaggctgccaaagtgatcgaaaactcccagcgtgacatcaacatcgcttttatgaacgaattgtcgaagattttccatctgatcggtattgatacgaacgaagtgctggcggcagccgggacgaaatggaatttcctgcctttcaagcccggtctggtcggaggacattgcattggagtcgatccttactacttgatccgtaaggcagaggattacggtttccatccgggactgatcctgtacggacgtcgtatcaacgatacgatgggtgaatatattgccggtcgcgtcgtgaagtgcatgatcaaaaaagatgttccggtacggaatgcggaagcattggttttaggctttaccttcaaggaaaactgtcccgatgtgcgtaattcaaaagtcggagatgtcattcgttacctcggtgactacggtatcaacgtgacgatctatgatccttgggcacgtccggatggcgtccggcgcgaatatggcctggaagttctgtccaccctgccggacaagaagtttgacgttgtcgttttggcggttgcccatactgatttcctggcactggacattccggcactgacgaaagagcacagcgtcgtatatgatgtgaaaggctgtctcgatccggcttgggtcgatgatcggttataagggatagaataatatccctacccgatctatgtgttcccggagagccggttctttgatcgtatgatatagtaccaaatctattttatacaataattccaactcttctaaatcaacttggatctgtaaaagttcggaggctgtaatttgttccgattttatagccaaatcgatatccgagccggaatgaaagttcccttttgcgcgagagccgaacagccatacttttccaatgtgtttatattgggaaaagacagcccgtatgctttgtattgtttcattactcagtccgaattccatacgactaaaataaatttaactgtttttggtctgactcctttgtcaatcggatagataattgggtaagtagatgcgtgtaaatttcgattatatcggatgcaatcaaatctgcttgtccttcatcgtaagtatatgacatcagttcgcgcgattttttcatcttacgccacccgtcggcatccgtgatgtaaccgtcttgcaatgccaatgatagcgtagcattggggccggcaaagtctgtataacctttgtaacgaaggaaatcttgcaatgttttccaagataattcgtatgtatattcgaaccgctgtataagtccctctttttccagatcggataaagatgcgagatccgaagcctgtaccatttgtaaacgggccaatgcttttttaaaattcatgaacctttgttcccaacgaatgtcttctaccatagtgttacttttttgtcaaagataatgtttattagccggaatccattgggtttacccaatttatttccgtccgaaatccgccggaatctctccccattccgaagtttcccatttcaggataggggtagtgtaggtattggtcttgagccacttttcagcccgttcgatcaggtcgaagatgggctcgttctccggtacacgttctaaaagtgtcttgcattttttcttttttacccagccgatggcgttccggctgtccgagtagatcgggaggctgcttcctttttgtttcaacaaggcaagcccgtgcaccaaagccaggaactcgccgatgttgttcgtccccttttttaacggcccgatccggaagatctcttgcatggtcggcggatagacgccccggtattccatgtctcccggattcccgctacaggcggcatccacacaaagactttcccaaatcggtttcccgaccggagctttcggggccaggcttgcagccgctttggaggaagacgctgttttcagataatgttcgtatcccttctcgaaggcttttgccgcctcctcttcggtttcgaacgacttatattttgccccgtcctgtccgtccacctgcgccttgcattcgttccagttgtcatacacgcccggagtgatgcctttccacactacataatatttctttgtttttgccattgtttctcctgttttcctatgtatcaaaatgtcactactaccccatccaaatcggattactaccccatgtttttggaattactattgcgggtaatatttattaacatttcttcttgctaatgaaattgccgtttttgctgacaaaagtatacatttgcaggaaacaatcatatagatatgaagcgtatatttctgattggatatatgggagccggaaaaaccactgtgggaaaggtgctgtcccaacagttgggactctcgtttatcgatctggatcactatatagaaggccgttaccataagaccgtcggccagctttttgccgagagaggggaagaagcattccgggatatcgagcggaggatgctccgtgaggtcgcagcttttgaagatgtcctggtatcgaccggaggcggtgctccttgttttttcgataacatagagtttatgaacgaagccggacagaccgtttacctgaaggtttcggtagaggaactggcgaagcgtctggaactctgcaaatcgacccgcccgatactgaaaggtcgttcgggcgacgaactgaaagccttcatcgccgaaagcctggagaaaagggaacctttctattcgaaagcggcgattgtgttcgaggcggaagagatgatgaccgatcaggatgtacataagatatcacaagaactggcaacacgattatagagttgagggttgaaagttgagagttgaaagtgaaaactggcacaaccttaactttcaactttcaactctcaactttcaactattaaattatggatagacaagggcagggggcttatatcccgcaggaactattgaaagaactcagtaaggtgagcaatcgcctgctgataggtattccctgtgaacgggtggaaggagaacgccgtctggctttgactcccgaagcggtcgacatgctgaccgaccgtggtcatcgtatcttggtggaagccggggcaggcctggggatcaattactctgataatcattattcggaagcgggagccgagatcgtggcgacgccggccgaagtgtaccaggcggatatcatcctgaagatcctgccgccgcttgccgccgaggtgatgatgatgaagccgcgtactacgttgttttcgaccgtccagtttaataccttttctcatgaagctttcgaactgatgatggctaaacggattacagccgtcgcctatgagctgctggcggatgacaagcaacgctgcccggtcctgaatgtgatctccgagattgaagggaccgcctctatcacgatcgcttccgagttgttgagcaatacgcagggtggaaaaggaatcttgttaggaggtataccgggcgtttcgccgaccgaggtcgtggtcatcggagcaggtaatgccgggactgtcgccacccgtgccgctatggcgctgggcgcttccgtaaaagtgttcgacgacgatataaacaagctccggaccatccagcaggtattggggcaaggcctgttcacttccaccttccatccgaatgtgctgcaaaacgcttttcgcagtgccgacgtggtgatcggggcaatgcgttacatcaatacgcggcatcggtatatcattgccgaagacatgatccgtatcatgaagcgtggcgcactggtcatcgacctcagaatcaaccagggaggttgtttcgagacgacctgttgcctttgtccttccgatccggctgttttcgaacagtacggcgtgttgcattattgccggcagaacatcagcaaccgtgtggcgcgtaccacttcgatggctctgagcaatatcttcgtcccgatgcttttccagttgggcgacaccggtgcggtgcaggggatgatcaagagcgacccggggttcaagaacggagtctacatgtactgcgggaagcccgttaacaactacgtttccaataggttcggtttatcgtcgaataacattgatctatacctctctgcgttttaacccataaaagttttgaactcgcaaagtttattctttactttgcgatgatcttaaatatcaataagcgattaagctaatataagtatattatggcagaacagacaaaagtaacaactctggaaaaggttgtcatccgtttttcgggagattccggtgacggtatgcagctgaccggaacaatcttttccaatctgtcggctatttttgggaatgaaatctctacattccccgattatccggcagaagtgcgtgctcctcaaggaacacttagtggtgtatcaggtttccaggttcatctggggtcccgtaaaatctttactcccggtgataaggcggatgtgctggtcgcaatgaaccccgctgcgctgaaagtgaatgtgaagaacctgaaacccaatgcaatcgtcattatcgatacggattcgttccagaagagcgacttggataaggctcagtttacgacggacgatccgtttcaggaattaggactcggcggcgtgcaggtcgtagcggctcctatctctacgatggtgaaagacggcctggctgaattcggtctggacaacaagtctgcactccgttgtaagaatatgttcgcactggggttggtttgctggctgttcgaacgtccgctggaagaagcgatgcacatgttgcagaataagttcgccaaaaaaccggccatcgcgcaggctaatatcaaggcgctgacggacggttacaactacggacacaatatccatgcttcagtctccacttaccgtatcgaaagtaagaaggctgcacctggtttttatactgacgtgaacgggaacaaggctacttcctacgggttgatcgccgccgccgagaaggctggcttgcggttgttcctcggaagctacccgattactccggctaccgatattttgcatgaactgtcgaaacataaggaactcggcgttatcaccgttcaggcggaagatgaaattgccgggatctgtacttctatcggtgccagctttgccggttgcctggctgcgacttccacatccggtcccggtctggcgttgaagagcgaagcgatcggtttggctgtgattgccgaactgccgttggtcgttatcgatgtgcagcgtggcggtccttctacgggtatgccgaccaagagcgaacaaaccgacctgatgcaggcgctctatggacgtaacggtgaaagcccggctgtcgtgattgccgcttcgactccgacagactgtttcgatgccgcttattgggcaggaaaattggcgctcgaacatatgactccggttatcctgctgacggatgccttcatcgccaacggttcttccgcatggaagctgccgaacctggctgaatatccggaaatcaaaccgaattatgtctccaactacgatgcgagcgaaaaagtatggaaagcatatcgtcgcgacaaagaaagcctggtccgctattgggctattccgggaaccgaaggttttgcccatcgcttgggaggtctcgaaaaagattacgagacaagcgctatctcgactgacccggtcaaccaccagaagatggttaccacccgtcaggctaagatcgacaagattgccgattatatccccgaattggaagtgatcggagattcagatgccgacctgttgatcgtcggatggggcggaacatacggacatctctacgaagcaatggaaaccatgcaggaacagggaaaaaaggtcgccctggctcacttcaagttcatcagcccgttgcctaagaacacggctgaagtgctgggcaaatacaagaaggtggtcgttgccgaacaaaacaacggacagtttgccaactacctgcgtggaaaagtggccggattcaatccgtaccgtttcaaccgcgtaaagggacaaccttttgttgtagcgagattagttgaggaattcacgaaaatattggaggcttaaaagatggcaactgaagaagtaaaatttcaaccgaaagattataagagcgatcagtatgtacgctggtgtccgggttgtggagaccatgccgtgttgaactgcttgcacaaagcaatggccgaagtaggagtggctcctcataatatggctgttatctcgggtatcgggtgttcttcccgtttaccttattatatgaacacatacggttttcatacgattcacggacgtggtgccgctatcgctaccggtgtgaagacggctcgtccggacctaagcgtctggttgattaccggcgacggcgactgcctggctatcggtggtaaccattttatccatgctgtccgccgcaatgtggacttgaatatcgtattgttcaacaacaaaatatatggtctgacgaagggacagtattctccgacttccgatcgtggtttcgtttccaagagttcaccttatggaacggtcgaagatccgtttatcccggctgaactggctttgggcgcccgtggcaatttctttgcccgcgtgatcgatgtggatctgaagaatacgaccgaagtgctggctgcttctgcccgccataaaggggcttctgtgaccgaagtactggtgaactgtgtgatctttaatgacggtatccataaaaagattgtcgataaggagttccgcgccgaccgtacgatcttcctgcggcatggtgaaaagatgctgttcggcaaggacaacgaaaagggtatcgtgctggaaggcttgaagctgaaagccgtaacaatcgggcaggatggttatacgttggatgatgtcctggtacatgatgcccatgaaaaggataacaccctgcacatgatgcttgccatgatgggcgaagatatgccgattgcgctcggtgtcatccgcgatgtggatgcccctgtatacgatgaagctgtccaccagcaaatcgaagaagtccaggccaagaatccgatccgtaacctgcaggattatctgatgagcggagaaatctgggaagtaaagtaaggcagtaagccgatctgtgataagaaaagctgtaaaccttgaaaaaagatgcaagggtttacagcttttcttatttatatttctatctttgtgaaacaaaagggtatagcaatgaagacaacagccgaaatcatagaaatcctgagagattacaaagcccgttccgccgaaaaatacggaatcgaaacattgggccttttcggtagcgtggctcgtggtgaacagaatgagaagagtgacatcgatgtgtttattcgtttgaaaaagccggatttttttgttcgtatggcaattaaagaagagttggagcatctgttccatacagagatagatttggtgccaatatttgaaactatgcgtatgttattgcgcaataatataaaacaagatgcaatctacgtctaaagaatttatattggaacatttgtctttcttgacagagaaagcagaattagcacttgagaggacctctaatgtgcattgtgcaaatgatttcatttatcccctctgcttgtcgtgctccatcgcatccaggatgacttaaatgccgggaaacatgatgctatctttggataaaagtagctgatttgtaaactctatgttacaaaatggtagggtttgatgttaacggcatggaaaagtataattattactgaaaaatttccttaattcggtatgtactatgaaaatttgtattacttttgtaccgcgattaacaaggcgagggaacagcaagtaaaaacaaagatgaattgccttgtgttttaacatcgagtagagagaaaagttatataaagtcaatcaattaaattaatttcaagatggctacattagatttaagcaagtacggaattaaagatgtgaaggaagttcttcacaatccgtcttacgatgttctgttcgcagaagaaacaaaaccgggtttggaaggctttgaaaaaggtcaggtaactgaactgggtgctgtaaacgtgatgactggtgtttacacaggtcgttctcctaaagacaaatttttcgtaaagaacgaagccagcgaagattcagtatggtggacttctgaagaatataaaaacgataacaagccttgttctgaagaagcttgggctgatctgaaagctaaagctgtaaaagaattgtcaggcaaacgtctgttcgttgtcgatactttctgcggtgctaacgaagcaactcgtatgaaagttcgtttcattatggaagtagcatggcaggcacacttcgtaactaacatgttcatccgcccgacagctgaagaactggctaactacggagaacctgatttcgtatgtttcaacgcttctaaagcaaaagttgacaactacaaagaattaggcttgaactctgaaactgctacagtattcaacctgaagacgaaagaacaggtgatcctgaatacttggtacggtggtgaaatgaagaagggtatgttctctatcatgaactacatgaacccgttgcgtggtatcgcttctatgcactgctccgctaacacggataaagaaggcaagagctctgctatcttcttcggtctgtctggtacaggtaaaacaactttgtctaccgacccgaaacgtctgttgatcggtgacgacgaacacggatgggataacgaaggtgtgttcaactacgaaggtggttgctacgctaaggttatcaacctggacaaagaaagcgaaccggatatctacaacgctatcaaacgtgacgctcttcttgaaaacgttacagttgctgctgacggtacaatcgacttcgctgataagagcgtaacagaaaacactcgtgtttcttacccgatctatcatatcgaaaacatcgttaagccggtttctaaaggcccgcacgcaaaacaggttatcttcctgtctgccgatgcattcggcgtattgcctccggtatctattctgaacccggaacagactcagtattacttcctgtctggttttacagctaaattggctggtacagaacgtggtatcactgaaccgac

SEQ ID NO: 222 - DNA, 12131 bp, unidentified
  source 1..12131: mol_type = unassigned DNA
tcagccattgtaaacctccaaaattctctgtttaaatttttctctgcctactctgtcgattgtaaacttaaagcgttcgctcggctttgcgttttctgcaaagaagttaagagcggcatcacagatttccataagtttttctttattttcgataaacggaataattgtttcgcccttgttgattgagttgccaaaaagtccgccgaatgaaacaatgtagccgtgaattgtgtcccacgcatctgtcgggcaagccttgaagcatctgccgcagtagttacactttgaattgtcaacggaaattttcccgtcctcaagagtgattgcaccctgacggcaggcctttacgcagactccgcagccgatacaagcgtcctctttccatgaaaccttgattccgcccttgataccgacatcgttttcctcagctttaaggcagttgttctgacagcctgttatgccgaacttgaacttgtgcggaagttcctttgcaaaatatctgtcgtcaagctcctttgcaagagcgtatgtatcaatacaaccgccgggacagattgcctcaccctgacaggctgtgattgttcttactctcggaccgcaaacacccggctcaacatcgccctcggcaagtgcgtccttaactgcctcaacatcatcaagctttacaaaaggaatttcaacactttgtcttgatgtgaggtgaacataaccgtcaccgtagttttccgaaacctcggcaattttcgcaagctgtttagctgtgaggttgccgcctacaactctgagcctgagcgaaaaattatttttctgtttttgacgcataaagccgccctttttaagcgtagcataatcaactgccatttctcttactcctccgattcattcacatttatactgtctacagcctgtttgaagtcagactttaaatcctcaatatcctcaatgccgacgctgattcttattgtgtcatcaaacacgcctgcgtttcttttttgttcttctgttccgtgagcgtaaattgtgcttgacggatgaattacaagtgttcttgtgtcgcctatatttgttgcatttgttgcatacttcaaattgttgataagcttaaacgctctttctttacttcctgccctgattgtgaggattgcaccgccttttcccttcaacagcttttgacaaaggctgtaataaggagaagctttaagagccggatagttgacttcgattccgtcctgtgtttcaaagaactttgcaagctcaagagcgttgtaacaaagacgctccatacgaagtccgagtgtttcaagtccgacagagttcataaaagcattaaacggtgcaaggcaacagcctatgtttcgccagataccgtttctcagctttgcaacatatgcaagccgaccgaattttttgtactctgcaagacctttgtatctttccgtattccattcaaaattgccgctgtcaacgattattccgctgattgaatttccgccgccgttaatgtactttgacgaggaatgaacaacgatgtccgcaccgtgttcaaacggccgaataagatacggagttgccgttgtgctgtcgataatgagcggaacaccgtgtgaatgaacaagctctgatacagcgtcaagatcgacaatttcaagtccgggattgccgataagctcggcaaagactgcttttgttttttcgtttatgagcggttcaatctcatcggctgtcaccttgttgacatatcgtgtaacaattccgaaaggctcaagatctccaaacaaatcaattgttccgccaaaaagacctgcgcttgcgattacttcgtcacctgattcaagaatgttcaggagtgccatcgtaacggctgccatacctgacgaacacgcaaccgcaccgacaccgttttcaatggaagcaattctgttctcaaaagatgttaccgtgggattgcctattcgagagtaggcgtagccgggagctctgttgttgaacaccttttcaagctgttcggcagagctgtgcgaaaatgcactgacctgataaatgggagttaaggttgagccaaaagccttttcaccgttaaaccccttgtgaagtaatgcggtgttaaactccataatatcaccaaccccttaatttcatacaaccaacccttttgtgtaagaccgtcgtaggaatttgtctgacggcttcgattgatataggtagattatactccattaatcatagtatttcaataggtttaataagattttacctcttgcacaatttttctttaaaatttgccgtaattccattatttcctacaatgcatatttgtttagtaggtattgatttttaaattaaaaactgttaccattattatatactctttcagcaaacaaaacgcacggaaaggagatgctaaaattgaagatttcaacaaaggtggaattcggaatcatcgctgttattgacattgcgtcacactcactaaacggcaatgcggtaacaactcccgaaattgccaaacggcaaaatatatctaaaaagtatcttgaacagattctctcatcactcagctcggcaggacttgtgcgaggtcagaagggttcaaacggcggttatgttattacaaaaagccttaaagagattacattcaaggacatcataaacgcacttgacgcaaatgttctgagcaatgtttattttaacactcggggcgatgatgatgttatgataagacttatcgacaacagtctttggtcaaagatgtcgtcatatcttcaggaatatgccgaaagcattacacttgcacagctttgcgatgagtatatcaaaaacaatgaaattgaacacaacattccgatgtactacatctgatagattacaaacaaaaagccaccgatttttatgtcggtggcttttcttgtttttatcggattttatttaaagctttcaataacctgacaggttttttcaatgtcatcttccgtgtgcgcaaatgaaacaaacatcgcctcaaactgtgacggtgcggcatagattccgttttcaagcagatgattgtaatactcggcatatctctttgtgtcggctgtggttgccgtgtcatagtcaacaacctttttgtcggtaaaaaatgccgtcataatcgaacccacacggttcacattaagtcctgcgttcttcattgcattttcaatctttgcagacttgcgttcaagttcgggatatatcgaatctttatttttttcaagaattttaagcgttgcaatgcctgcacttaccgctaccggatttcccgaaagtgtgcctgcctgataaacagaaccgagaggagcaacacaccccataatctcttttcgacctccgtaaaccgcaagcggcattccgccgccgacaatttttccgagggttgtaaggtcgggttttactccgtaaagcttttgagcaccgccgagtgaaagtctgaagcctgtgattacttcatcgaaaataagaagtgaatcatgcttttcagtgatttcacgcaagaattttaaaaatccttttttgggcggaacaacacccatatttgcggcacaaggctcaacgattacacaggcaatttcatcaccacagttatcaaaaagctgttgcacggattcttcatcgttatattttgcaagcaaagttgtgtctgtgtagcctttcggcacacctgcgctgttcggaattgaatttgtcagaagtcccgaaccgccctttacaagcaagccgtcggaatggccgtggtaacagccctcgaattttacaattttatccctttttgtaaagcctcttgcggcacggattgcgctcataaccgcctctgtgcctgaatttacaagtcggagcatttcaattgacggcatattttcgcggataagctcggcaagttcaatttctccgctgtggcacgcaccgaatgtaagtccgttctgacaggcagaagtcacggccttgataacatcgggctgtttgtgaccgaggatattcggtccccatgagcagatatagtcaatgaactcgtttccgtcaacatcataaatttttgaaccctctgcacggtcgataaaaagcggagttcttccgaccgaacggcacgcacggacaggactgttcacaccgccgggcataaagtcaagcgcctgtgcgtatagcttttcgctttgagttgtattcataaaagcacttccctatttgtaaaattcgtcaatccattttgcaacatcaagtgcgtggtatgtgattatgatatccgcacccgccctcttgattgcaatcatattttcgcacacaattttcttttcgtcaatccagcctttttcggcagccgccttgaccattgcatattcaccgcttacattataggcaacaagcggaaggtcaaagcgttcgcttgcggcttttacgatatcgagatatgcaagtgcaggcttgaccataaccatatccgcgccctcgtcaatatcatctgcaatttcacgcagagcctctttgccgtttgcgtaatccatctgatagctttttctgtcgccaaattcgggggcagattctgcggcatcacggaacggtgaatagtagcctgatgcaaattttgcactgtatgacataatcggagtgttgataagtccgttttcgtcaagtgcgtttctgattgcagacactctgccgtccatcatatccgaaggagcgatgatatccgcacctgcttttgcaaggctgacagccattttagagaggagcggaagtgtttcgtcattgagaatttcgtgaccgcaaacaacaccgcaatgaccgtgacttgtgtattcacaaagacagacatcggcaataataaggagtgacggataatttttctttatgtatctgattgcgttctgagttacaccgttatcgtcataggctgatgttgcaagctcgtctttatgctttggaattccgaaaataagaagtcctgcaatgccgctgttttcaatttctttaagaatctcgtctgatctgtcaagcgaatattggtagacattcggcattgaatcaacaggctttttaatattttcaccctctgcaataaaaatcgggtaaatcaaatcgcccttgtcaattcttgtttcacgaacaagactgcgaatctgctcgcctgctcttaatcttctgaatcttctcatatatttatccttctttcaaagttacttccttgattatagtttccaaaattccgtctgtgtccttcgtttttgcaatcctgaacgaatttacgccgtgactttcaagtgcctcggcggtaatttcgcctatgcagacaacggaagttctgtcggaaataattgctccgccgtcaaaaaatgtgttcacacccgacgcactcgcaaaagtgataaaatcggtatcaacaacggaattatcctgttttttctcaagctgaatgtcataggttttgacatcgtcaaagtcaatgttgctatcagccaaaatccgagtgagttcgggcgaaccgttttcggcacgcagaatcaatactttttcgccgcttttcaccgtttttgcaagcaaaattccaagttcacgggttgtgtagacattcggaatacagtcggcaaaaattccgtacttttcaagtacagccgcagttcccgaaccgatcaccgcaaacttaatatttgcaaaactgcggatatcctttttcagcttacgcagtcggctcataaaaatttctgcaccgttcatacttgtaagcaccacataatcgtagccgtcaataccgtttattgcattgtcaaaaacttcgttgtcatgatattcaatcacctttaaaaggtcgtgccttttgacctctgcacccgaaagcgtgagcattttgccgagcttgtcggagagctttctcgtacccgtaactgtaaccgaaacatttttcaaaggtcttgtaattgtgggggtaaagtcaaattttgcggtttcgccaaccactataacggcaggcggtacaacctctgctgatttaacattttcgcagattgtcgagagagttcccctcacggtctgattttttgcacaagcgccgtttgacacaactgcaacgggagtatcctccgatttaccgttacgaatgagattttccacaatgtcggggaggtttctcaatcccataagaaagacaagcgttccgtcggtttcggcacacttctttatattttcgggcagggtgtcctgtgccgtatgtcccgtgattatatgaacacttcggctcagatttctgtgtgtaacagggattcccgcaagttcgggaacggcaatcgaggaagaaattcctggtacaatatcaaacggaatatcggcacttttgagggtttcaatctcctctccgcctctgccaaacacgaacggatcgccgcctttaagacggacaaccgttttgccctctctcgccttttcaacaaggatttcgttaatattttcctgcttttcgctgtgtctgcccgaacgctttccaacacagattttttcagccgtttcgggtgcaaaaccgagcaatgactcatctataaggctgtcgtaaacaagcacatcgcaatgtctgatatactccgcaccacgcattgttatcaagtcaaaatcgccgcatcccgcaccgacaatatacactcttccgttactcaatttcgctcaccagcctttttgcaagtttgattctgtttgaaatttcatctgttccgctgactgtttttttgcagtcggcagacagagaaagcattatcctgtcgttttcaacctttgaaattgcaccgacgggagttgaacaatcggcattgaggctgagcagaacctgtctttcggtttcaaacgaaagcattgtatttttgtcactgatttcagcgagcattttggaaacctcgctgttttttctgctttcaatcgcaactattccctgacacggtgcagggagaaattcatcggtatcaaacggagttaccgtgtaatcctcaccgttgcaaaggtcaagtctttcaagtcctgcctttgcaagcacaagagcatcgtactcaccgttcaacagctttttaagtcgggtgtcaacattgccccttatatcattgaattttgcattaggatagattttctctgcaaaaagctttcgccttaaactgcctgttccgatgacaaagccgtccttaatttcaaaattgttgcgtgtaacaaaaacatcgccatagctgccccttggcaacacggcggaaatttcaagtccgtctgcaatttttgtcggcaagtcctttgcactgtgaacggcaacatctgtttctccgctcaaaagtgacatttcaagctccttgatgaacacaccttttccgcctaaagctgtaagcggtttgtcaagggttttgtcgcctgttgtcgagatgtaaaccgtttcaattttaacattcggaaaacggtttttcagcgtttttattaacatttcggtttgtgcaagggcaagcctgctttttcttgttccgatttttatcgtcattgttcgtattcctcaatcaaattttcaacagttttttcatcgggttcaagtcccgaaaggcaaagcgaaagaagctgttcaaaaatcttccttctgtcatcttccctttcaaccttctccttaattatcgggcgatatttccacaaaacctcggttgtattttcgttcatactttcaaggattcccacaaaaagctctttaagatattttgcgtaaatcggacttttgcccgatgttgtaattcctgccgttatgccgtttttgcttgcaattgcaggaaaaataaatccgcatttttccttatcgtcaactgtgttgacaagaatatttttctcattgcaaagctgaaaaattctgccgttgagcgtttcatcatcggttgcgctgacgacgcaaaacgcaccgtcaagatcgctgtcacaaaatctgcggtcaatgattttcacatgcaaagccttgatttcatcgcagattttcggggcaacaacggttatgtccggcgaaaacggcatcagcttttcaatctttctgagtgcaaccgtaccgccgccgactacgagtatttttttgttttcaatgtcaatataaaacgggaagtatgccattagttattctctccgcactttctgtagatttcaagaattcttgcaaattcttctgccgaaacatcggatttcagcttataaatgaatttttccgaaaaatctgacggcattgcgtttttcacagactgcatacacggcagaaattcatgaaaggcaaggtcttttttgagaacttcaatttcctcaaaaattatttcttttgcactttcaacgctgtcaagtttgagagcattgttctcgtttgcaagctgttttatgcagtcaatgttaatgagccttacaccgcttattttgggaatattttcgtcaatgtcgggcggtacggcaaggtcaataaacagccttgatttttcggtttttatattgttttttaaatcataatatgtaaccgtgtaatgcggtccgcttgtggcactgattacgcagtctgcaaaatcaaacgctttgtatctttcgtcataatcaatcacattcgcacccgtattttcaaaaacagtttctgctttatgttttcgtgaagtcacggtaacgcttatacctttgtgtgacaaaagatttttcacaacggttgagccgaccttgcctgttgcaccgattacaaggacattcagctcaccgtctttgaattttgccgcctcgtttgacgcaagagttgcaacggaaaccgatgtttttgaaatggcggtttcggtcttgattttttttgcacaggcaacagccgcctgaacgcacatattaagctcataggcaaccgtgccgttgtcctttgcaaaggcataggctcgctttagctgaccgagtatttcatcttcaccgataaccattgattcaattccgcctgccaccctgaaaagatggagcaaagccctgtcaccgtagaaaagacagatgtatttttttagttcgtcaaaatcaattcccgaaaaatccgaaagaacggtttcaaccgttttcacagatgattcgtcaccgcaaaaataaacctcggttctgttgcaggtgcagagaatcaaacactcgctaatattttcagaataaaaaagttcgtcaagaaatgtctttttttgttcatcgggaaaggcaagcttctttctcacaaccacatttgaagttttgtgacttacgctcaggcagtacataaaaatttcgctccgttacaaataaaatccgacagtaaaatacacttttaaagttattttattactgccgacagctattgtcaattaaagttagtcagttattttaccactaaacctatctgtttggtatgttttgattatactacattcaccgttccatgtcaataaatttcgggttttgcttgacaaaaacagtgattacaatataaactatacaaagatacctcccgtcagcaaacagcgggagttttattccgatgtaaatacttatggtaccgataggaatactaaatgatttgaatatgtattaaggagcgtttttatgcttaatcagttttcaagaacacagcttttgattggcaaagaagctatggacaggctttcaaaaacaagagttgcaattttcggaatcggcggtgtaggcggatacacggcggaggctcttgcgaggagcggagtcggcgagcttgaccttattgacgatgacaaggtgtgccttacaaacatcaatcgccagatttttgcaacaagaaaaacagtgggcaaatacaaggttgatgttgcagaggaaaggctcaaggacatcaatcccgaaatagtcatcaacaaacaccagaccttctacactcccgaaacctcggaaaaattcgacttttcaaaatacgactatgtagttgacgcaattgacacggtaacaggcaaaattgagcttgttatgcaagccgacaaagccaagacgcctatcatctgttcaatgggagcaggcaacaagcttgatcctacagcgtttgaggttgccgacatttacaaaacctcggtctgtcctcttgcaagggttatgagacacgaactcaaaaagagaggtatcaaaaagctgaaggttgtttattcaaaggaaaagcctatcacacccgttgacgatatggcaataagctgtaaaacaaattgcatatgccctccagaaactgagagaaaatgcacccaacgcagacaggttcccggcagtaccgcatttgttccgtcagttgcaggtcttatcatggccggcgaagttatcaaggacttgattaagtaaactaatatagttgtcttttcattttaatttgctattgttaaaaattgcaatttatagtataattatcctaataactatttagaggttgcaaaatgaacagatatataattattgcaggagttaacggaacaggaaaatcaagtttgcgtggtgttcttgaaggacaggaagttttgcttggtcatataattgatgctgatgctattgcaaaaatgaacaattacgataacataaaggcgggtaaaaaagcagttgaagaaataaaatactgccttgataacaatatttctttcacacaggaaaccactctttcaggacacagaaccgagaaaacaattcagcaggcgcgaaaacagggctactatgttattatgtactatgtaggtcttaactcaaaagaagaaagtcttgcaagaattgaaaacagggtacggaaaggcggtcatgatattccgaaaaatgatgtgtgcagaagatttgataaccgcttcgattctttaaaaaaaattgttccgctgtgtgatgaagtaattttttatgataatgaaaacggatttattaaagttgccgaaataaaaaacaacaaatttaattattcaaacggttacagacctaaatggattacagaatttgaaaataaactgaaattaggctaaggaaaagcaaagcaccgagaaaaattgccctcggtgctttgcttgtttttataggattttttacagttgatatcgtgattaaacagattagatgataaccgattcttcctgaagtgatttgttacggagaatctgaacctcatcgcctttggtaataaaaagccgataaagaaatacattgaccttttccccgacggtaatcggagtttcgtcaagtcctctgtacgtataaaccgtgcctccgtcacattttacggcaatttcgatattgtcgcctctgaacgaagtctttataacctcaccgacggatacagacgctttttgtgcggttgtttcgctgagctttgtcacctttacaaattcgggacggataactgcacggtcaacattatcaacaacatcaaaggtcttgaactttgtataatcgtcaagcgtagtagtctgaccgaaaaatgatgcggaaaatgcggtttggggatgctgataaatgtcaatcggcgagcctatctgctcaattctgcccttgtttgtaattataatttcatcggcaacctcaatagcctcgctctgatcgtgggttacaaatatacttgtaacgccgagcctttcaatcatatccttaagccatgagcgaagctcctgcctaacctttgcgtcaattgcggcaaagggttcgtcaagcagaagaagattcgggtttggcgcaagcgctcttgcaaaggcaacacgctgtttctgaccgcccgaaagctggcttggataacgcttttcaagtccttcaagaccgataagctttacaagctcgtttactctttccttgataaatttcttgctctttttctgaattttcagaccgaaagcaatgttatcaaaaactgtcatatatctgaaaagagcgtagttttggaatacaaagcctatgcctcttttgcttgcgggaatatcgttgacaacctttccgtcaattacaatttcgccgctgtcgggattttcaagtcctgcaatcatacgaagaattgttgttttgccgctgcccgaaggaccgagaagtccgataagcttacccttttcaataccaaagtttacattgtcggatgccttgtaatcaccgaaagttttatttatatttttaagctcaacatacat

SEQ ID NO: 223 - DNA, 40382 bp, unidentified
  source 1..40382: mol_type = unassigned DNA
cgagaataccctatcgtgagactataacgaaagctgcccgtgccgactatcgtcataagaaacagtccggtggtgcgggccagttcggtgaagttcacctgattgtggaaccttattatgaaggaatgccgatgccggatacttataagttcaatggacaggagttcaagatgaatgtgaaaggcgtggaggaagttccattggaatggggcggtaaactggtgtttgtgaacagtattgtgggcggttctattgatgcccgctttatgccggccattttgaagggtattatgtcacgcatggagcaaggaccgctgaccggttcgtatgctcgtgatgtacgtgtcatcgtatacgacggaaagatgcatccggtagattccaatgaaatctcctttatgctggcaggccgcaatgcgttcagcgaggcatttaaaaatgccggcccgaagattctggaacctatttatgatgtggaggtatttgttccttccgataagatgggtgatgtaatgggcgatctgcaaggacgtcgcgccatgattatgggtatgagtagtgaagccggctatgaaaagctgagtgctaaggttcctttgaaggagatgtcttcctattctacggctctgagttctttaaccggtgggcgtgcttcgttcattatgaagtttgccagctatgagcttgttccgagtgatgtacaggataaacttatcaaggaatttgaaacaaaacaagctgaagaatagactttttaataaatagtaaaagccgttgttcgctcatcgtgaggaatgacggcttttttattaacactgattaagaatatggggaaatgtgaatgttaatatttaattttttattaaatttgcaaaccaaaggtgtttcattttgttgtaatgtgcgtaatgcaacttaaaaaacattctacggttaattaacgagaacacccggttaaatcaggttaatttgttaggagtgttaattagtgagtgttaattttgtgactatgaaaaagtcgacaatatggatattaggcgtcgttatgggcctttctttcatcagtttactgtatctgcagatcagttatattgaggaaatggtgaagatgcgtaacgagcaatttgatgaatcggtgaagcgtgctttaatggctgcttcaaaggatgtggagtccgcagaggttgaccgttggttgcgggaagatatatccgaagcggaaaagagagcgtgggagcagagctcgcaaggcaaaggagtggtgcagacacagcgttttacggtgacagcgccggatggaacaaaatattcggctatcgaactgaaaacgtttagcaatgaagcatcggaattgccgagggcaatgatttcacgtaagcatggaacgaagacgatacctcagacatcacgttcgctggcagatgccataaagaaccgttatctgtatcagagggctttgctggatgaggtggcttggcagatgatttatcgtgccagtgacaaggcgatagaagaacgggtcaattttaagaatttggaccagtatctgaaatcgggattgattgataacggtattgagctgaactatcactttaaggtgatagaccgggacggcagggaagtctatcgttgttcggactacagcgatgaaggcagtgagagctcttattcccagcccttgttcctaaatgatccgccggcacgtatgagtatcgtcaagatacattttccgggtaagcaggattatattttcgactcggtcagctttatgattccgtcgatgatctttacctttgttctgttgataacattcattttcacgatttatatcgtgttccgccagaagaagttgacggagatgaagaatgattttataaataatatgacgcacgagttcaaaacgccgatttcaacgatttcgttggcggcgcagatgctgaaggacccggcagtaggtaagtcgccggcaatgttccagcacatatcgggcgttattaatgatgagacgaaacgactcaggttccaggtggagaaagttctccagatgtcaatgttcgaccggcagaaggcaacgttgaaaatgaaagagctggatgccaatgaactgattaccggggtagtgaatacgtttgctttgaaagtggagcgctacaacggaaagatagagtcggaattgaaagcgactgacccgattatttttgcagatgaaatgcatataacgaatgtgattttcaatctcatggataatgcggtgaagtataaaagaccggatgtggacttgcagttaatggtgaagacctggaatgaaccgggcaagctgatgatctctgtacaggacaacggtataggtattaagaaagaaaacttgaaaaagatatttgataagttctatcgcgtgcatacaggtaatctgcacgatgtaaaaggcttcgggcttggtttggcttatgtaaggaagattattcaggatcataagggaactatccgggcggagagtgagctgaatgttggaactaaatttattattgcattacctttattaaaaaattgattgatatggatgagaaactgcgtattttattgtgcgaagatgatgagaatcttggcatgcttttaagagaatatttacaggctaagggttatgctgccgagttatatcccgatggagaagcaggatacaaggctttcctgaagaataaatatgacttgtgcgtgtttgacgtaatgatgccgaagaaagacggttttacactggcgcaagaagttcgtgccgccaatgcggaaatccccgttatcttcttgacggctaaaacactgaaggaagatattctggagggctttaaaattggtgcggacgattatatcacgaaaccgttcagtatggaagagctgactttcagaattgaagctatcttgagacgtgtacgtggcaagaagaacaaagaaagcagcatttacaagattggcaagtttacgtttgatacccagaaacagattttgtcaacacccgataagcaaacgaagttgactacaaaagagtcggaattgctgggtctgctttgtgcacatgccaatgaaatccttcaacgcgattttgcattgaagacgatttggattgatgataactactttaacgcacgtagcatggatgtgtatatcaccaagttgcgtaagcacctgaaagaagatgaatctatcgagatcatcaatattcatggaaaaggatataaactgatcactccggaagctgatgcctaaacggcttgcttcccgggtggaacggacaataaaaaaagacggttgcattgcaaccgtctttttttatttctttttctcggtattaatccgcaattcttttgttgataaggatgtaagaaatcaatcctattacaactaatacagcgctggttcccaaaatcgcgttgttatttacattgccggtaaaagaacatgcaaccaagattacagctcctaccaagattaatatcaatcccagattttttaataagcctttcatgtgtgtgtattttaatagattattattttcatattcttgttacaaagaaaagcataattctttaacaagcgaaattatttttgcaaaaaaactattattcaacctaatttaatgaagaatgaggaatatcctaatctttcgtgttgaaaaatatttttctcaagacttcctgactaacgcttaactcttcaagggtaatgccttgcaatgcttcttttagcgtttgattggcaatgatgcgggcgcgttcttccagttccttgccatctttggtgaggtgtatcaagttggtgcggcggtcttttttgtcggagatgcgtaccacaagatgttgccgttccatattgtctatgaggcgggtcatgctgggcttgtccttaaaagttgcattgcacaattcttgctgtgtcaccccgtctttttcccataagaagatgaggaccgtccattgttcgggggtgatttccaaaccgttctgcctgaagttgcgcgataatttgcggttgatggcagcagatactttgccattgagtatggcaaatatcagccggatatcaaaattgaattgctctatcatgaaattattgtttaaacaactttgcaaatatagcataagttggatacaatacaaaataagtccgcttatttttgcagttcaaaataaaatgtctacctttgcacccgcatttaataaacaaataatttatttatttaattaaacgagtatgaatcaatacgaaaccgttttcattttgactcccgttttgtctgatgttcagatgaaggaagcggtagaaaaattcaaaggcatccttactgctgaaggtgctgagattgtaaatgaagaaaactggggactgaaaaagctggcttatccaatccagaagaagtcaaccggtttctatcagctgattgagttcaatgcagaacctactgtcattgagaaattggaaataaacttccgtcgtgatgagcgcgttatccgtttcttgactttcaagcaagacaagtacgctgctgaatatgctgcgaagagaagaagtgttaaatcaactaaaaaggaggattaatcatggcacaacaagttcaatcagaaatcagatatttaactccgccctcagtagacgttaagaagaaaaaatactgccgtttcaaaaagagcggtattaagtacatcgactacaaagatcctgaattcttgaagaaattcttgaatgagcaaggtaagatccttccgcgtcgtattaccggtacttctttgaagttccaacgtcgtgtagctcaagctgtgaagagagcgcgtcacttggcgttgctgccttatgtaactgacatgatgaaataataggaggaggaaagtatggaaattatattgaaagaagacatagtaaacttgggttataagaacgatatcgtaaccgttaagtccggttatggtcgtaactacctcatcccgacaggaaaagctgtcattgcttctccttctgcaaagaaaatgttggctgaagagctgaaacagcgtgcccacaagctggagaagatcagaaaagatgctgaagaactggctgctaagctggaaggcgtatctttgaagatcgctactaaggttagtgcaacaggtactatcttcggttcggttggtaacattcagattgctgaggagctggctaaattgggtcataacatcgatcgtaagattatcgttgttaaagacgcagtgaaagaagttggtagctacaaagctattgttaaactgcacaaggaagtttctgtagaaattcctttcgaagtagttgctgaagaagcataattaatccttcgtatatattgggaagcccgattctatttggatagagtcgggctttttttatatcaacctgccattgcaatgaagttaataaaatgcaggcttgatgttaacttcctgtccggagtgtgttaacttcctgtttggagtatattaacttcctatccgtagtatgttgacttcttagagttacgatgtaaactctttatgcgatggagaagtaaggacataaaaaaagtctgtccgtactttccgtacgtcagactttcaattctctctaatgttgttctgaaattattcagctacaactgctgcgctatctactgcagtagtgtcagctactgatgctgctgcttcagctgctgctgcttctacagctgcgattgaatcagcgatacggattgagtcagctgttgcttgttctgcgttagctgctttgttaccacaagatgcgaaagatactgctacgatagctacggccatcaaaactaattttttcattttctttacttttaaaacgtaatacaatcaattgctttattaaaacgatgcaaaggtatgcactttttagatacgttgttctccaaaacccaactttttttatattttttttggaggaaagcccgtttttctcgcttttgatatgttctacaacatgttaatcttctgcaatgctgttatataaataccttttgatgcttcttttgggtgttttctcaaattctgtcgggtaaagctgtatttgactgatcttttcgtaagcagcaacgctattgttcaggttcttgagattttcgtccataatggtctttatattctccggattgttcagccctaaggaatccaatgcctcataatcagcgtagactaaggctaccagtttcttattgcgttcaatcacaagactttccagaacaaacggcatgttgttgagacgtgcctctatttcttccggaaaaatgttttgtccgctggagctaatgatcatggtcttgcttcgtccgcgtatgtagaggttgttattttcatccagcgtgcctaagtcgccggtgcgcagccagccgtcttcggtgaatacttccttggtggcttccgggtttttataataacccaccattacgttttcgccgcgtacctgtatttcgccgagccggtcgtccggattttccttgtagatacgtgcttccatgatgtcgagcacccgtccggaagaggtgggcacgaattcgttccagggagcgtagctgatcagcggtccgcattccgtcatgccgtaacctatgttgaacgggaatttgatgcggtggaagaactcttccacttccgggttcattgcggctcctccgataatcacttctttgaaccggccgcccagtgcgtccaccagtttcttgcggatttgtccgtatatctgtccgtccagcaacgggatgctgagggcccatttcatggactttttgttgatgatgggctgaatgacattcttgtatatcttttcgataacgagggggacggtgattatcaggtttggttttacttcttcgaacgctttcatcagaatttttggcgagggcactttgcccaacaatgtgacgtgcgtacccacagccgtagcggtcaggaagtcgaaggcgcaaccataggcatgcgccaggggcaggaaagacagcaccttgtctccttttttcagtaatccggtgcgaatgccgaaagtgacgttacctgcaaggttgttgcctgtcagcataactcctttgctgaatcccgttgtgccggaggtatagttcagcaacattactttgtcgttggaaagatccgtataaaccacatcttcctgccggaaccctttcggataggtcttgtgcatctcgttgtccaagtgtttgagaaaacgttggatggtttctccgtcgcgctggtacaagcagcggaagtcgttgagtgagaaaacgccgcgcagcccggtgagccgttcttcttccagatgttcccaaatgctgtcgctggtgaaaaggaagacggattccgaatggttgacgatgtggtgcacatcattgggattgaaatcctgcaagatgggcactacgatgccgccgtaggtgatggtggccatatatgcaatgcaccagcgggcgttgtttttgccgataaccgctattttgtcgccgcggcgcaggctgcaatgcttgaatagcagatgcaacttggctatttcttgcgctacttctccataagtatagctttcgttttctccgtaatcggtgtagcaggggaggtcccaattctcgcggaaactatgttcgtatagcttgataaagttttcttgtatcattgcacgttttttgatgaattgtgcaaaagtaggaaaaatataataataatgtgtacctttgccccgaaaatctgatttaggctcatgatagataccaatatatttcaagataagacggcggtttactatacgttggggtgcaagctgaatttctcggagacctcgactatcggtaagatcctgcgggaggcaggagtgcgtacggcacgcaaaggagagaaagcggatatatgtgtggtaaacacctgttcggtcaccgaggtggccgataagaaatgccgccaggccattcatcggctggtgaagcagcatccgggcgcttttgtggtggtgacgggatgttatgcccagttgaagccggatgtggtggcaaagatagaaggtgtggatgttgtgcttggggcggaacagaagaaagacctgctccggtatctgggtgatttgcagaagcatgaaacgggtgaagcctatacttccgctttgaaggatatccgttcgtttgctccgtcgtgttcgcgtggcgaccgcacccgttttttcctgaaagtacaggacggttgcgactattattgttcctattgcaccattccctttgccagaggacgcagccgcaacggaagcgttgcttctttggtggaacaggcccgtcaggcggcagccgaaggtggaaaggagattgtgctgacgggggtcaatatcggtgatttcggcaagacgacgggagagactttctttgatttggtcaaggcattggatgaggtggagggcattgagcgttaccgcatatcttccattgagcctaatctgctgacggacgaaatcatagagttcgtgtcccgttccaagcggttcatgcctcacttccacatcccgttgcagtcgggcagcgatgaagtgctgaagctgatgcgcaggcggtatgacacagcactgtttgcttctaaggtgaagaagataaaggaagtgatgcccgacgcgtttatcggagtggacgtgattgtaggcacgcgtggggagacggaagagtattttgaacaggcataccgcttcattcaggggctggatgtgacgcaacttcatgtgttcagctattccgaacgtccgggtacgcaggccttgaaaatagagcatgtggtatcctccgaggaaaaacacagacgcagccaacttctgctggaattgtcggaggaaaaaacgcgttcgttctatgcccgccatatcggacagacgatgcccgttctcttggaacgctccaagccggggacgccgatgcatggcttcactccgaactacatccgggtggaggttccgcacgatgatgcgctggacaaccgcgtggttccggcgcgtatgggagagttcaatgaagacggtacggctcttttgggtctgttgggcgatgccggcggccggtaactgatagccgtaattaatgatcggaattagtaatttgaaattgacagagtgaaatcaagattaatctattggctgacttatgccggtatgtggctgttggcgttattgcctttcagggcgctttatgtgctgtccgacggattttgctttctgatgcatcacattgtgcactaccggcgcagggtggtgcgcaataacctgcgcaacgcattccccgagaagtccgaagcggagctgagggagatagagcgcaagttctaccgttacatctgcgactatatgctggaggaggtgaagatgctgcgtatgtctttcaaggagctttgctgtcgcatggaatatgacaataaggaagaatttcttgccatgattgaaaggcatggcgggatagtgctcctcattccccattatgcaaacttcgaatggatcataggcatgggggctatcatgcaggagggcgacataccggtgcaaatctacaaaccgttgcacaaccgatatatggatgcgatgttcaagcgtatacgcgcccgttttggcggctacaatgtgccgaaacattctacggcgcgcgaaatcatcaggctgtgtcgcgacaataagcgtgtggcagtgggaatgataaccgaccaatcccccaatatcaacgaggctcatcattggactactttcctgaatcaggacaccggctttatggacggcgccgaacgcatagccaagctgatggatttccccgtattctattgtgaattgaagaagcagcgcaggggatattgcagggtggagttcgacttgataaccgaaactcccaaagaaacggccgacggagagataaccgaactgtttgcccgaaggctggaacagaccattcgcagggaaccggcttattggttttggtcgcataagcgctggaaactgaaacgcgaagatgtggtgcggcatggataaggtggctgttgtcatattgaactggaacggctgtgagatgctacgttcgtttctgccgtccgtagtgcgctgttcggatacggagggcacggagatttatgtggcggacaacggttcgacggatgcttccgttgagatgctccgccaagagtttccttccgtacaccttattatattagacaaaaaccggggctttgccgaaggctataaccttgctttgcagcaggtgtctgccgaatatgtggtgctgctgaactccgatgtggaggttaccgggcattggcttgcgccgctggtggactatatggatgcccatccggaggttgcggcgtgccagcccaaaatccggagttggcggtacaaggaacggtttgaatatgcaggcgccgccggcgggttcatagaccgttacggctatcctttctgccgcgggcggataatgggagtggtggaggaggacaacgggcagtatgacaccgttgttccggtgttctgggctacgggagctgccttgttcatacgcctgaaggactatcaggatgccggcggactggacggacgtttttttgcccacatggaagagatcgacctgtgttggcggcttcgtgcccgcgggcggatgctggtttgtgtaccccaaagcaccgtctaccatgtggggggggccaccctgaagaaggagaacccccataagacttttctcaatttccgcaacaatcttgtaatgttgtataagaatctgccggaagaagaactgggctatgtgatgcgtgtgcgggcggtgctcgattgtgtggctgccctgagttttctgttgaaagggcagtttgccaatatgtgggcggtgcttcgtgcacgccgcgcttttcattcactccgccccctgtttgcggctgatcgtgaagagaatctgaaaaaaacatcccttccggttattcccgaacggacaaaaagcagtatcttggtgcagttttatttacatgggaagaagttcttttcccgcttgtaagaactgttctctttttctaaaattattgtatcattaaaagttattgttttatggacaaattggtaaggaagatcgggttggtggcgcatgatgccatgaagaaagacctcatagagtgggcgctttggaattcggagttgcttatgggacataaattctactgtacgggcactacgggaacacttattctggaagcgctgaaggagaagcatcccgatgtcgaatgggatttcacaattcttaaatccggccctttgggcggcgaccagcagatgggttcgcgcattgtggatggggaaatagattatctcttcttctttacagatcccatgaccttgcagccgcacgatacggatgtcaaagccttgacacgtctggctggtgtggagaatattgttttctgctgcaatcgcagtacggccgaccacattatttcgagccctctctttcttgatcctacttacgagcgtaccgttcccgattacagcaactatgccaagcgcttcgagaataaaccggtcgttgccgaagccgttgagtcggcaaagaagaggaagaaaagaaaataatgttgatatttattaatgagaatgcggtgctttgcaatctcatgattatcaagatgtaatataacagcctatctcagtcccatacagaggctaccttagtcctatactgagacagtctttgtatgggactgagataggctatgtatgtgatcgtcttttgaaaaaactcgttttgtaaaggaaacggaatgcccgtataatattgctaccgtttcattcactgctgctgcctggaagtatgaatctctattcctgccgcttctatgtccgctcccattggcggattgcgttttgacagtttcagttcgatgtcctctattgggggaaagtctccgaacaaccgtttcacaatacgtcctccgacgtgctccaacagcttggagggaatttccatctccttcttcacagcttcatatacttccgcatagcttacggtgtctgttacatcatcagtctgcatggcatgcccgatgtctactttcagtcgcaaactgacgacgaactcattgccgactaaggtctcttgtcggcccacgccatgatgggcgaagaaacgtatccgatccaaaaatatataactgctcataatgaaaagataatagtctttcatgcaaacttatggataatatctttgttctacaagtcttggaacgcgatttttgtacttttcaagaaaaaaggacgtgaaaatttttattctaattatatttctataactttgcattgaagttcggtggcgactgtggcttgttttttttaataaaatataattagaagcgttgtgctttgtcctctaaatggaaacctaggaaattttcattatttagcgaaggacagcacagtggattctcacgtttatagcgtgggactgctgtctgttttcgttaaagggctattcctagggcctccatttagaaacagcacgcagctccacgtttctgtttctaaccggtccttttcggagtttggaggacgcatgcttccggtctgcctgtgcagatagaagtttataagacgtttatgcaaataagaatattgttggttctattgtgcgtacttttcatgactccgaatggtgtgtatgcgaaagcgggtaatggggaaaataccccgcaccatgccaagcgaatattcaatccggactcgcgcaccgggcgcaataaccattcattgctgctgaaaacgaatgtggcggcgtggggaatggcaattatgaacgcagcggtggaatatgacatctcgcctgctgtttctgtccttttacctttttattactcttctgtcgattatcttacttcttcccgcaagttctgcactttctgcgtgcagcctgaagtgcgttactggttcagacaagtggacggactcttcaccggtgtacatgtcggggtggcctcttataattatgcccttaagaacaatacctaccgctatcagaacagtgatacgggtgccccgttgctgaatgtgggacttgctgccggctaccgtctcccgcttggaaagggcgggcgctggtgtgtggagttttcgttgggagtggggtatgcttatctggattatgaccgtttcttcaacattcccaacggcgcttatgtggatacgcgccataggaatttttttggcatagaccatgtaggcatctcgttgggctaccgcattgattggaaaggaggccggcgatgacgtatatatataaggtgtacagccttgccctgtacctgtctttatttctgctgagtgcctgtggtgtgcgcgagttgcccgaagatggcggtgtggaccctacggtggttcatacttctatcgtactgctgcccggtgcagacatgacgccgtttgacgttcctgagttttccacccgctctgccgacggacgagcgtacaatgtccgctatcaggtggaagtctatgcggatgacaaatacgaccagagcctgcagtttcgtcgcctgctcacctatcccgaagggtatacgggtgaggtggctttggagtgtgatctgcatgcccgtaactatcgtgtggtggtatggcgcgacttcgtaccggtttctgatgtcggtctggccgacgaccacttctatatcactgctgatttctccgccataaaattgaagggtgattatacgggaggtaccgactataaggatgtgttctccggtcagatgtcgctcgacctctctgcctatcgttgcgaactggaagcggagcatcgcgaggagatgcagttggaacgtccgttggcaaagatagagttgattaccactgatgttattaaatatttggacagtcagcggtcagtttctacccgtattacggatgtggaaagcctgtcgttagaggtgttctatacaggctatttccccatagggttcgatgtcttgctcaatcgtcccaatgaggcggtgacgggcatcagtttttcttctgctcccctcactgtttcggacaacgaggcttgtctggcattcgactatgtgctggtgaatggtgcggagtcttccgttggtcttgaaatggtgatttacaatgcggaggggatggaagtgaacagggtgagtggagtgactgtgcccgtcagccgcaacaaaataaccactgtacgagatgagttccttacccgccgatttgctccgggtatcggaataagtccgggttttgacggtgagataaacgtggtgataccttgataatgattttgatgaatatatgttttacttaaaaaattgcgtatgaaaaagtattttatgctgttgttggcaggggttattctgctggcttttacagcttgccaaaatgatgagttggtgaatggaggaggtagccaggtggctgtgtcctttaaagtgcagatgccggaaggcgatgctcccgctactcgtgcagggactgctgcaagaggtgatggttcacaagtgaaccgttgtattatggaagtttatctgggtggaaagttgtatggtgaacgtcaggtggtggatgtgacaaataaatccgctgctttcaatgtgaaacttgtgacttcacagacttatgattttgtgttctgggcagataagagtggagaggctggaacttctatcgataaccattataagactacggacggtctgcagaaggttgcatacataggttcatatagcggtaatgatgaaagctatgatgcctttacggggaaggtgctgaacaaagtggtgaccggtgcttttgctgaaaatgttacactgactcgtccgttcggtcaactgaatattaaggcaactgacattgcagctattgggagtactaatttggttcctgcaaaagcatcgttatcgttcgggaaagtttatcaaagtttcaatgcactcactggagatgctattggtgaattggcatcacttgagtatgccgcctctgctgatgttgtggatgctgatggccatttgacagtggattacctttttgctccgcaaacaggccaattgctggctgacatgatattgacgatgtatgatggtagtaatcaggaaattacccggaaagaattgaatagtattcctgttcagcgtaactacaagacgaatgtgacaggaagcatggtaacagtttcaggcgtatatacagcaacattaactcctgaatttactaatccggacatttccaaagagattaaggaagtggcttcggtcagtgaagtggccgatgcgttgaaaacctgtgataatgtagttgttacaactgctccgacggaagatacaaccattgagttacctaaatatacggcaacggataaggctgtttccattacattgccggaaacaacgaataagacggtgacgattaattataccaatgatgcaggaaattcaaatcctccgaaagagcttactatcatagctccgcaaaccaaaaaactggtcattgacgcaaagcagacaaccgtctatctgaacggaacgaagtatgacgagatagaagccggtactgccgaaaatacgttggtaatcaatgacggggtgactgttagcaaactgacagtgaaagccggtaatgtaaaggtgtttggtaagggtgtgattactacaattctaaagagcaccgaaaacaccggcattacatatatttatgcttcaaatcaggcacagcttcccgccaccttgccgcaaggctttgaaaaggtgtctttggaagcggagaacctcaaagaggctatggctgaaggcggcgtatatcagttgaaagaagatgttgacatagcaggtagaagcattgagattcctgccggtacagcggctaccttagacctgaacggcaacaccattacagcagccaatcggggagtagacggaattgcggtatatggaaatctgacactgaaagacagcaagggaaacggccggattgttgcaaataaggattatacaggcggcgcttatggtgcaggcttgatccgtattataggtgaaaatgcggctatgattatgcagggcggcactatttatgccgccagagaaaatgctacaactaatgggcagtatggtgtggctgtttatgaaggcggcgatttcaccataaccggcggtaagatcgaagcaggctggtctgcggtgctaggtaatggtaacaacaaaacgcaaaatagtgtaatcaggattgaaggcggtgagctgatttctacttccgattatgcagtgtacttgccgcaatccggcacaaccaccatcagtggcggtaaggtatatggtgcaggcggtggtgtatgcatcaaccgcggtacactgaatgttgaaggcacagctttgatcaccagtaagggtacaggcgataccggagattggggcgacggtaccggcaatatggaaagtgcggcaatcaatgtagctgccaaatatggcgattgtgtcgtgaacatcaaaggcggtacactgacagcagaggctaatgcgcttgtttctacgggcaatgtcggctacacaccggctatcaacgtcagtggcggtacattctccgatccgagtctgctcggccatctgtctgccggggccaatgtgaaagtcaaacttctgaaggactatgagggtccgggactgggcattttctatggtaaaaacggtagccgggctacggttgagatagacttgaaccaacatgcatggaatcttaccaatgatccgttatttggttctaccggataccagaaccaatacttccatcttgaaaaagatgcttttgttactttcaggaatggtactgttcagcccaaagaggtggcgtcaggcaggatgcttatacagaattactgtcatctgacactggacaaagtcaaactgattggcggaagttcttgtaagtatgttatctccaataataacggaagctgtacgatttcaaactctaccattactgctgcagcaggacaatgtgcgttcgatgtttactcctacaagccttatccgggaggggtaacggtcactgtcaatggccaaagcgtcattaatggccgcgtagagtttgacggtgatagcggtaagaagaacggtaatcttgtcattaatggtggtactatcaatggtaacttgagtgcgaataatgattattatgacagcataaacaagaacattatcatcaaggaaggcgttacatttggcgcagacgttaccggatgggacgactataaataactatggtaatgcggcggatgccgcttgccggaaatatatggaaacatccagtttgcatggaaaacagttggaaagtgttccgtttccatgctatactgtttgtatttgtttgtttgttttccctgcgttgtgaaacgcggggaaattttttatatgatttggctttgtaagctctcaatttagtacgtcaatccgaataaccatagcggaatttcattacggaagcccacttcgatattatccaatgccaggtagcctttttccacaccggccaattgttgctgtgccttgttttttataaaatacaaaagcggtggagttttgtattctctaaaatacaaaaataacagaaaattgtatcttggagaatacaattaacaggaaagcggtggagacttctcaaaggttttccaccgctttcttattaattatcagcttaaatgcacttgtcttatcgtccgttttgtgcgataagttcttttatcttttcattcaggctttcggctttcatcagttgctccagcgtcaggtgcatgcgccggcgccaatagtgacgtgggttggctggcacattaatgcgctcttcctgtgcattggggttgcgccatttgccgtccatggacatccagtcttgcagggagaggatggcgagtatggagttgctttgcagatgcttgcgcaccacctcttcgcaaagctcgggagtggcagttgcgggggcagcgccatagtgtccgagcatcgtgttgtagtaacgttgcgtttgctgaaagtcttcttcccaccagccgcgcagtgtggacatgtcgtgggtggatatggtgcagactgagcggtatggataccactccggatgcccgaactcctgtgcggggtctttgggcatgcgctgtatctccagtgagagaatacgcagatcgttcatcacccatgccacgcaatcgggaatcatacccaagtcctcaccgcataccaacattcgggtggactgtgtcagttgaggcagcttgttcatggcttgctcgcgccagaactcgttgtggcggtggtagtagtagtggtcgtacaggcggttgaaggccgatttctcccaatcattcagggagcggtacacatagtcgtgctgcacgccgatacggggatgatatttgtacgggtcgtggcggtcgggtacaaacagtacgtcgctgatgagcgcatacaaaccgtcgcgcacccaaatgctgtcttcgtccgtcttgccggcaaagtaggcttctaccttgcgttgggtgtcaaattccggacgcatccggtagatttcccacgtgtccgtcggttcgatgaaggtttgcttcacgtagtcggtgtgcggaccgaacatctgtccgaggaaatattcgtgtatatacggtttcaggaactcatcgcggaaggggagtccgtagctttctatttcttcacgtgtcatgggtagggcgggtacaaactgccccagcagaccatgtacggcgtgcatcgggatttcccagatgcggaagaagccgaggatgtggtcgatgcgataggcgtcgaagtattccgccattttgcggaagcgcttcatccaccatgcataaccgtctttttccatgacatcccagttataggtggggaagccccagttttgtccgttcaccgagaaatcgtcgggtggtgcgccggcttgtccgttcaggttgaaataatggggttctgtccatgcttctacgctgttgcggctgatgccgatggggatgtcgcctttcagtacgacgccgttggcgcgtgcgtgttcagtggcggcgagtagctgccggtgcaggttgaactggatgtaataatagatggcgatatgcggataatccgccgattccggctggcagagtttctctatctcttggatgtcgtagttgctgtacttcggccactcgcggaagttgggcgttttataggcatcacgcagatagctgaaaacggcatacggttgtaaccattccttgttcgactcgaaaaactcatggaaggctgccgaggccagcaccttctctccctcttgcttgaagatgaggtggaagtattcccatttggttttgttgactgcctcataatcgacggagggcagggcattcagttccttctgacgtttgttgaacgcagccataagttttttgtctttcaatgcacccagttgtttcaagtctgtgtacatcgggtggaaagcatagatggagatgctgttataaggataggagtctgtccacgtatgtgtcatggtggtgtcgttgatcggcagaatctgtacggctttctgccgggtgctgacggcccagtcgatcatgcgttttaaatcgccgaaatcgcctacaccgaaacttttctcggaacggagtgagaatacgggtacggcaacacccgaacctttccagacgggaaggttgaaatatacataacggtcaccgataaccagtgtctcgtttgcaccgctttgcgggtccgccatataccggttcggattgttttcccagcatacggcgcggcgttctttcttgttgtatagaatgaatttgtattccaacggaaaatggattttggaggcatctgcctctatttgccattcagggaagttggcatcactcataagtacggccttgtccggattccagtttccgaggatcggctggtttccgcagatgcccagacagtggtcactgtcgatgcagggggcatacgcttttatcagcaggccttttttatgtcccttaggagcagcactgcgttcgcggtgtgccagaagggattccgtaaaggcggaggtgtagaaatattgctgctccggcaggttcttccaacaatcttgtatccggtaggttttcttggagtttccggagaggtaaagagtgcggggcaggctgttccactcggcacgtatagggtgcccgtcgcggaaaatatagtagctgtataggacgtatccgctttccggcactgcaatgtctgcttccgcagcccaatggatgccgtctatggtttgtagcggaaatgctttggagggatgtccgtttccaagttccgggatggagcctgaaactctgacttcttcaccccaattggttctgtactcgatattaaatgataaggtcatatatattagatttagaaatagcaatagctgcaatgattatgcaagtataaaaaatattcttcataatcatgcagctattgtctgctatctcgtttaaaatcctatgcaaacgtttgctcttccgattatccgcagcgggatgcaccgcaagtggtgcagatgagacaaccttcctgatagacaagggtttcgttgccgcagttcgggcatttcttgcctttggcctctgtgccgtctgtgacgtacttcttcagagcgcgttccacaccgttcttccaagtattgatgttttcgctgtccagctggagtgagcttaccagtttcattacctgttcgataggcatgcggtaacgcaatacgccggagatgagcttggcgtagttccaatattccttgttgaacttctcggacagtccctcgatagtgaccttgtaaccgcgtttgttctcaaactggaagtcgtaacgcttgttcccgttctcatcgacgttcttgatgatatgtcctgttgaaacattcttcgggaggatgatgccttcgtcgtcatcttgaagaccggtgaatatctcgtagggatgtccgtccagcaatccgacgaatgccacccatttttccttattgttctggaaacgcacaacgtctgcttcaagcactttcggacgtgtctcgacaaccgtaggcggcttgcatggcgggagttcgtttttcttgtcgctcttggtggagatgagtacgccggaacgcgaaccgtcacgatacaccgtacagcctttacagcccgatttccatgcttcgacgtacaggcggtttaccagttcctcgtccacatcgttcggcaggttaatggttacgctgatggagtgatccacccatttttgaatacgtccctgcattttgactttcatcagccagtctacatcgttggaagttgctttataataaggtgacttctcaaccagtgcatctatttcttcttgcgtatagcgtttggctgggtcgtaaccttctgcttccatccatgtcacgaatttggggtggaatacgatgtattcttcaaaagcgtctccggtttcgtcgacaaagtcgatatgtacgttggaatcgttcgggttgactttgcggcggcgtttgtagacgggcaggaatacgggttcgatgccggaagtggtctgtgtcatcaaacttgttgtacctgtcggcgcaatggtgagacaggcaatgttacgacggccgtatttcttcatttcctcatacagttcggggtcggcctcgcgcaaacggttgatgaacgggttgttcttctcacgttcactgtcgtaaacttcaaaagcaccacgctcttttgccattaccacagacgagcggtaggcactcagcgctactgtcttatgtacttgttcggcgaattcggtcgcttcttcagtgccgtaacgcaatcccagtgctgcaagcatatcgccttcggcggtgattcccacaccggtacggcgaccctgaccgcttttcttatatatcttctgccacaatacgctttcagtatgtttcacgtcttcgctttccggatcggcatcaatcttggccatgatgcgttctatcttttccaactccagatcgatgatatcgtccatgatgcgctgggccaatgcaacgtgcttcttgaagaggtcgaaatcgaagtaagcgtccggcttgaacggattgactacataggaatataggttgatagccagcaagcggcaagagtcgtaggggcataaaggtatctcaccgcaagggttggtggatacggtgcggtaacccaagtctgcatagcaatcgggtacagactcttttagaatggtatcccagaaaagcacaccgggttcggcggacttccatgcgttgtgcacaatttttttccacagatcggtggcattgatttctttcttgaatacaggatcggtggcgtcaatcgggtattgctgtacgtatggtttgccatcaatggctgcttgcataaatgcatcggtcagtttgacggaaacattggcgcccgtcaccttgccttctgtcatttttgcatcgatgaacgcttccgaatccggatgcttgatggacacgcttaacatgagcgcaccccgacgaccgtcctgggccacttcacgagtagagttggagtagcgttccatgaaaggaaccagtccggtggaagtcaaagcggaattttttaccggagaaccttttgggcggatgtgtgataagtcgtgtcctactccgccgcggcgtttcatcagttgtacctgctcttcgtccactttgaagatggcgccataagaatcggcttcaccgtccacacctataacaaaacagttggaaagggaagccacctgatagttgttaccgatcccggtcatcggacttccttgcggaacgatgtatttgaagtggttgaacaacccgaagagttcttcggaactcagtgcgttaggatacttggcctcaatgcgtgccacttcgttggctattctccagtgcatgtcttccggagacttttcgtaaatattcccgaaagaatccttaactgcatatttgtttacccaaacccttgcagccagctcgtcaccttgaaagtatcgtaaagattcttcgtaggcttcgtcataagaataaattttcttttccacgatgcaatatctcttagatttaattgtaaataagtaaatgtgtagaagttgtacttatcgctaacaaatgtgattgcaaatctatgaatgttttttattatagcaaaataaaaagatggaattttattaaccgtatgtaagttttccaatttaatttattaattgattgatttatatgagaatatctttttgtgatgaatgaaaagttttccaaaaagaaaattgtgccttaacttattgcttgatggaattattcttttggaaaacatgggagaatatatttaagcctattaaatatgcactctgtgtttctttcactatatttgcaaaaaaaagaaagaatggaaagcttaaaacaaaggagaacaattcgtaagtatcagcagaaagatatttcttctgatttgttaaatgatttgcttgaaaccgcttgtcgtgcttctacggttggaaacatgcaggtttatagcgtaattgtaactcgtgatgctgaccgcaaagctaaattggcgccggcgcatttcaatcagcctatggtgcagactgcgccggtggttcttactttttgcattgatctgcgtcgtttcagcaaatggtgtgtgcagcgcaaggcggaaccgggatataataattttgaatggtttgtcaccggggctgttgatgctttattggcagcgcaaacattctgtgttgcagctgaggaaaaaggtttaggcatttgctatttgggtaccactacctataatcctcaaatgattattgaggcactggaactgcccgaattggtttttcctattactaccgttactgtgggatggcctgctgaggttccggcgcaagtagaccgcttgcctttggaagccgttgtccatgaagaaatctatcatgattatacctctgaggatattgatcgcttgtatgcttacaaagagtcgttgccggaaaatatacgatttataatagaaaacaataaggaaacactggctcaagtatttacggacgtgcgttatacgaagaaagatagcgaggcaatgtctgagaacctttggaaagtgatgaaagaacagggcttttagattgaaaggttaggtataatttatatataaggtatagagtatgaagttgctatatggaaaggcaaatgtaactatactctataccttataattgttattcgggagttagttcccttttttcaaggctgtttggatctcgtcgatctcggcgcgaaatgatttatccacttcttttaactgcttgattgttttgcaggcatgcaatacggtagcatgatctttgttgccgattagcgtgccgatctttgcagtagagaaatcggtatggtttttcgctaaatacatggctatctgccgcgcctgcaccacttctcgtttgcgcgatttggtatgtatagcggcattctccaatccgaagtgcttacatacagtggtgatgatatcgtcaatggttatggacttactttcgcagttcacaaccttgcgtacaatgcgttgtgctagttccaggtcaatctctttgttgtatatagtggaatgggccataatggagatgacaataccttccaggtcgcgaacgctgttgcccacattctcggctatgtagtcaatgacctccggtggaaattgcaaaccgtcgcggtgtattttgttgcgcagaatgtttttgcgtaattctacggtcggcttttccaactcggctaccattccccatttgaagcgtgtaatcaagcgctcttccataccttgaagcaatacaggggcgcggtcggaggtcaggatcagctgtttgccgttctgatgcagatgattgaagatatggaagaatgtgttttgtgtttttgtaacacctgcgaattcctgaatatcatcaataatcaatatatcaattgtctggtagaagttaataaagtcgttggtcgtgttgttacgtacggaatcggtgtattgaacctgaaatagatgtgcggatacatacaatacccgtttttcggggtatagttccttgatttttgtaccgatggcattggcaaggtgggtttttcccacacctgacgctccgtataggaacaacgggttgaatatcgttttggcgggattgagtgccactgcctctgcaacactgcgagaaagcttattgctatatccttcaataaatgtgtcgaagttgtattccggattcagatgtgggtctaaatcaggaacaggaatctgcgggatagctttgtctatcgtcggtttttgcgggatgatagtacgatgggtggattcgtagtttacggtcttttccggccgcgaacttttgtccaccatgacattatacatcaactttgttccctcgccgattaccttgtaaagagtcttacgcaataggtctacaaatttatcctccagaaactcataaaagaactggctgggaacttgtacaacaagcgttttgtcctcatattttaaaggaataatggggagaaaccaagttttatatgtctgttcaggaacattgtctctgataatttcaagacagcggttccacaatccgacatgatcctgttcactcataacggttactgatacatttattaattaagcaaaacttctacgtttgcaaaattggcaatcttatttgagaaaaacaaatctcttttttcttgtgtttctcaataaaacaataatctctttactttcagctacttatcggaatatgtgaaaattccccctttatatatactattgtttttgtataacagcttgtaatatagcaagataatgctgcttttgtgggctgctcctctccaaaagcggagtagatataaaccccttttttactttgtacatagacttatcaagggtttttcctttttggataaataagctttgctatttagacaaaatctatataagcgtaattcctacttatctttcttaccgaataaagagaaatgaacgtagcgtttggggtgtgattttaaatcttctaataggctcgctgcatttgctgttgtggcattcaggttattgtagagtgacggatcgttcagcaataatccgacagtattatcctttcggtttaatttatctgtaatcatttttacattagccaatgtggagtctatgctttgcatggctgttgcataatctatttctttcaagttatttgaaataagtacgaagttatccccaatagtattcagcttgcctgtaagttggggaatgtccttgttcattaatgtttgcagctgtccactggtcactgctaagttggctgtcagagtctgtacattatgcagagtggtggggatggccggatctgccaataccatatttaaagatccgagtatagagtccagcttaggcagcatcttttccagttgcggcatcatggcggcaactttttccatcattccgttgttgagcgtaccgggaattgtatctcctatctggtatttctcgcggggattgttggcaaggagcaggttcattttgacgccgcccagcatttctgctgccagttccgccgtactgcctttgggaatacgcaagtcggtgttgacatctatttcggcaattacctttccgggctggctgtaatcatagtacaggtcgcgtacgatgcctacacgaaaaccgtcggcaaagacaggactagacttggtaagtccgttgacattctgaaatttgacatagaaataactggaaggcttaaacatattgatacctttcaggtaattgataccatatactaatatacagagagcagctattcctgcaattcctattctgacttctttggtaatatacttcatgatgttattctatttatttctttttatttttaaattcgttgatggcagcgttcacattcacctttttgccgtttttgaaagctatgatgaaagcgtccttgaattgtgccgtaattgagcgtttggtgcgtaataccttattgtaatcggaggatgcgccatacgtatatttgtacaggccgccttctttataataatccacgttcttcaatcctttcaatcgcttgtcattttttgccaatgggcgggaagatgtgagtatttgtatcttgaacaccggggcgttgtcttctgtttgcgcaacagcgtttttttctgtgcgccggggtgtggagttgctgtcttgtctaactgtcttttctgttgcattcggcgttgtgccggcaggagtcgtatctttctcctccggcaggtcttccggtagaatggtctggctacttccgttcagacggatttcctgctctcgcttataggtaaggaaagcgcgaaaaatgccgttggcaagagttgtggttcctgcatctgtattcaggtaacgttcttcttcaggggtggagatgaaacccagttcaaccagaatgctgggcatggcgctggctttcagtactaaaaaaccggcttggtgcacgccccgatccacccggcggcaagtattacggaaatgcttttgtacgagtgaggccagatgtacgctttgcgacatatacttatcctgcatgaattcgaaaataatatacgattcggcagaattaggattgaaccccgcatagcgtgtcttataatcgctttcgtagagaatcaccgagttttcccgtttggcgacttcgaggttggcatccgatttggcaagacctaatgtccatgtagaagcgcctttggcagtgcggttcttagccaatgcatttgtgtgaatcgaaatgaacaagtctgctttggcgttgttggctatctctgcacgacggtccaaggggataaagacatctcgcgtacgggtatatacgacttttacgtccggacagttcttttgaatttgtttgccgagtttgagtgcaacgtttaagttgatattcttttctttggagattttgccgacagcgccagggtcgtgcccgccatgtccggcatcaataacgacaacaaaatcttttgcttcggcactgctgctgcaaaagggtgaaatgagcagtcccaagcaaatatttatatataatatgtatcgtctgtatagtttcatattaaaaatatcgtcgcaaagatagcgcaaaggtctattatcgctctgcaaaagtaatgtaattttatagaaaactcacactttgctttcaagttttatctgtaacagcttctttttagggagatttagtcttagtgtttgcaaaatttatagattttctatgtttgcttttagtttgcggttagtggcgaatagttcgttagacaaatgcctaacgaactaaaattgctgtatctcccgcttattcaaatctttctctttatttattttccgcgacggacatacttgttaataatatccgtaactttgcacgcaaaattaataggtagacataggtatgcttcttcgtttcataaagaattggacattgcctttagcaatgcttgcaggcactgcaggatacttcttctttgcaagagttcctttgctggcaccggttaaaccctgtttgaacgggctgatagccctgctcactccaacgttgatttttgcacaattattacttaccttttgcaaggtggaggtgcatgagctgaaaccgaaggcatggcatgggtggttgttgctgtttcagacagtttcgtgcctggctgttgccgtcttgttggtatgctgccctatggaggggatgtatcgggaagtttttgagggggctatggtatgccttatctgccctacggccactgccgctgcggttattaccggtaagttgggtgggagtgcatcaagccttactacctatacattgttgtctaatcttttggcagcggtggctgttccgttggtgtttccttgggttgaaccgcatgccaatataactttttttgcagctttcctgaaaatattgagtaaggtgttccctttgttgcttctgcctttttttattgcatggtttctgcgggtgtttgtcaaaaaggtacatcggtatttgcttgaattccacgatgccgctttctatttgtgggcagtggcgcttgccattgtgtctgggcagactgtgcgttctttggcgaatagcgacgctccggtttttgtggaagtcttgattgctttggccggtttgataacctgctgtgttcaattctatctgggaaaaaaaattggcggacactacaatgatcgtatcagtggcgggcaggcgttggggcaaaaaaacacagttcttgccatttggatgtcttatacgtatttgaatccgctgtcttctgtggggccgggatcgtatgtactgtggcaaaatataatcaatagttatcagttgtggaagaaaagaaaaagggaatcttgatttctttcgtaaagagttagttgttattcgtcatatcccagttttttttcattgtagtctgatgcgatataagcaggacgtcctttggtttctttgaagatgcgtcctatatactccccgatgactcccaatgaaaagagctggataccgcccagaaacaagataaccactatcaaagtggggaaaccggctgcttggtcgccgtatatgacggtctttatcaggaaatagatggcgtaaatgaagctggaaatggaacaaatgataccacatacggtggcaatacgcaagggggcggtggaggaagaggtaattccttcaatcgctagattgagcaattggaagaaattccaggaggagtgcccggcaaggcggtcaccgcggtcgaactctatgcttttcttttggtagcctatccagcagaacagcccttttgtatatcgctcttgctcgcgtaactgtcttaatgtcagtatgcaacgacggtcaagcaggcgaaagtcgcctacattcggcaagatgtctatccggctcatgttttgaaggagcttataaaaagcaagcgataaccgacggcgcatccaactttcttcgccgcgattgcgacgcttggcgtaaatgtcgtcgtaaccttcttcccagtattgcaacatctgatctaccaattcgggaggatcctgcaagtcggcatccattaccacgcaacagtctccggtggcatagtcgaagcctgccagcatagcgatttccttgccgaagttacgtgagaggtttacaaagttcaccctgctgtccgtttgcctgagccggcggatcacttcgagcgttctgtcgctgctaccgtcgtttataaataaaatttcccattcataggcactgttgcgattgataagttctatcaggcgttgatatagagtgggaagcatggcctcctcgttgtagacgggaatcagtaaggttacttttttcatttcacaaatgtgtatgtataataaatgcttcgcaaatatattatttttaaagaagtattgaacaaaattgctttaaaaacatgatcaattgaaaaatatcagcctttgtgcttaaaaacaaagcgtactaataaaaagtttaccggaatggctatggcgaacaccggagcaggggcagtggtcttggaaaggccaagccaaagaaatgtattcagtaatccaatgtgcaaaaggtagttgaataaatgagccccgccgaaaccgaacgcttttccccatgacggttttttaccgaacgtaaagtaggcggtaagatagaaattggcgatgaagctgaaggcatagccaagggtgtaggctatattgacattgatgaacttctgcagcaaaaaatagattccatagtgcaaggcggttgcaaaaacgcctaccaggacaaaacgtagaaattcagggagtcttcttaattgcttcattttggttttacactatcattgagtcggcaaagttaggtattgttatagaataattcgtatttttgcagcgtgaaaatataaaaacggaaatatatgtcagataaaaagatagcgttctggttcattgcactgttgagtgtactcgtgttggtcccttttttaggagaaaccatattctattcaaaaggggagccgcgtgaagcgatagtggcgtacaccatgttggagagtggcaactggatacttccaatgaattacggagtggaaatagcctataaaccgcctttcctttattggacaatagctgttatatcgtcaattttaggaggagtatcggagttttcggcacgtatgccgtcggcgcttgcttttcttgccatgcaattggtattcttcagcttcgttgccaaacggaaaaatgtgaagacggcattcctgacttctattttgcttctatcttcttttgaggtacatcgtgcagcagtggcttgccggctggatatgttgcaagtttcccttatcgtaatctcgttgtgtctgcttttccgctgggatgaaaagaattgcaagggggttccttggctggctgttttgctgatggcgtgcgctacattgacaaaagggccggttggatctattttcccttgtctgtgtatcggtatctatcagctattgcgcggacgttcgttcggaaaggctttcttttcattattgggtatcggattattatctcttatacctttgggtatttggttctgggctgcttaccagcagggaggggagccgtttgtcaatttgatgttggaagagaataccggtcgctttttccggaaaatgtcatatgagtcacacgaaaatcctttatggtacaactttctcactctgatttgggggtggattccttggactttggtgctgcttgtttccttgtttggactgaaatggaaagaaatgcatgtgctgccggagggagattcggttggtgaacgcttaaaaaaagtgtgggataaattccgctctcaatcaccgttgcagctttttatatgggtggtgattctgactatcttcatcttttattgtatccctaagagcaagcgtagcgtgtatttgttgcctatctacccgttcatgggggggctgcttgccgaatacttattggcgttggtgcagcgtggtgcaaaagtatttaaaatttctgcatggatttttgctgcattggctgtgttgctcaccgttactttcttcactgtacgtttaggcttggttcctgaaagcatttggggaacaggccgacatgctgccgaaaacattgcatttatgaatgctttgcagacggtgccgctttcgttttcgaaatggctgattgttttcttgccgttgatgtctgccgcctgcctgctctatacactcttgaagtgtgcggatgcacgaccgttgttatatggtgtggcgggatgtatgttatgtatttttgtggcattggatggagtttatcagcccaccgttttggctgtgaagtcggataagcatctggcggtccgcctgaatgatcttgagccggaagaaccggtatattcatatggagactgggtgaagttttatagcataaactattatttgggtgatcgtgtgcgtatctttgacatgttgcaccctgcagaagggtatgtattggtgatagacgaactgcaggagaagttcttgcagaataaccagaatgcataccggcttgatgaggtttatcgtactccactgcgtagctgcgatatgcgtaaaaaggtgatagtttataaattcagcagaaaataagatgctttctataaaattgattgataaatattatccggaagagaacgagctgaagcatattttgctgactcatagccgttctgtggccgataaagctttgtggattgccgataatcatcctgaattatctttggacagggactttctgtatgaagcagctatgttgcatgatataggcatattcctgacgaaagctgagggaatttattgctttggagataaaccttatatctgccatggctatttaggagcggatttggtgcgctcggaaggctattctcgtcatgcactggtttgtgagaggcataccggagctggtctttcgttggaagatatcgttaagcaggacctgcccgttccccaccgggatatgcttccggtgagcatggaggaacaagtaatttgctttgccgataagttttactctaagacgcatttggagcaggaaaaaagcgtagagaaagcacgaaaaagtttacaacgctatggcgaagccggtttacaacgctttgatcattggtgtgaactgtttttgtagcaatctaaatttctttaaaaagggagattatccgtataaattacgtacttttgccctttcaagcgtaaactattagttaatgacgccattgaaagcaaatacattcatatcattcatactactatttgtcttactccttctttccggtgaggctgcttcgcaacgtcgtcggagaggtgttgtgccgcctgaaagactgcaaacggactctttgcggagagattctttgcaagtagatacattggctgttaccgggaagaagaaacagcctttggacgcaccggtcacctatgaggcaaatgactctatcgtgtttgcccaaggcgggtatgcgcatttgtacggacagggaaaagtaaattatcaacagatagagctggctgctgatgttatcaccatgaatatggacagcagtacagtatatgctcatggagtggaagattctttaggcgtgaagacgggaactccggttttcaaagatggcgaaactccgtatgagaccaatacgatccgttataacttcaagagcaaaaagggggtgatcagtaatgtggtcagtcagcaaggagaaggatatgttaccggaaacaatgcaaagaagggggctaatgacgaactgtatatgaaaagcgggcggtacacaacctgcgaccaccatgagcaccctcacttctatatgcagatgacttatgcgaaagtacgtcctaaaaagaatgttgtaacgggacctgcctatctggtggtggaggatgttcctttgccgcttgctgtgccgttcttctttttcccgttttcgagcagttattcatccggtttccttatgcctacatacatggatgactccagtcgtggtttcggtctgacggacggcggatattattttgctatcagtgataagatggacttaaagttgagggccgacatttttacgaaaggctcatgggcattgaatgctgaatccaattatattaaacggtataaatactccggtttgttccaggcgagttatcaggtgaccaagaccggtgataaggggctgccggactactctgtcgccaaagatttcaagattgtctggtctcacaggcaggatgcgaaagccaatccgaatcaaacattttctgccagtgtgaattttgcgaccagcagttacgagcgtactaatattggaaacatgtacaactcgaatgctatgtcgcagaatacgaaaacttcaagtatcagttattcccgttatttttttgatagaaagctgacggtagcggcaactactaatatcgctcagactatgagggactcttcggttaatgttactttgcctgatttgaatatttctttatctacgatctatcccttcaagcgtaaaaaagcggcaggcgaggagaggtggtatgagaagatttcagtacggtatacgggccgtttgactaatagcatccagacaaaagataatctgctgtttaaatccaacctgataaaggactggaagaatggtatgaagcatgaaataccggtcagcgctacctttactttgttcaagtattttaatgtaactccctccgtcagctatacagaacgttggtacacacgtaaggtgatgaaagactgggacccgaactatggtacgaacggtagggaagtggctactgatacgatttacggttttcatcgtgtgtataattataatgccagtctgggtatcaatacgaagatatacggtatgtataatccgattttttttcctaaaaagaagatacagatccgtcatgtcataactccatcggtaagcataagcgccgctccggattttggttcttcacgttacggctattatgattcttacattaagaattatgcggacggcagacgcgatacggtcatttattctccgtattcgggacaagcatttgatgttccgggaagaggtaagcaaggaaacataaccttcagcatctccaataatctggagatgaaatattatagcagtaagaaggatacggtaaagaaggttagtctgattgatgaactgggggccaatatcagttataatatggctgctgcaacgcgcccctggagtgatcttggattgaatcttcgtctgaaactgagtaagaactatacattcagcatgagttcttcgttcaagacatacggttataaattcgatgagaatggtaacgttgttgataatgaccgtacggaatggtcttacgggcgtttcggtatattccaaggttatggctcttctttcagttatacgtttaataatgatacgtggaaaaaatggaaagagaagttaagcggtactagagactccgataagaagaaagaagaggaagctgcttcggatgaggagggtgcggaaactgatactgatggaaacggtattcctaaaaagaaagtggaaaaggcggccgttgatgccgacgggtatcaagtattcaagatgccatggtctctgaacttcaattacagctttaatatctctgaagatcgtagtaagcctatcaaccgtaagaaaatgcgctatccctatcgttatactcacaacttgagtgcttccggtaatataaaactgtctaataaatgggcggtaagttttaattccggttatgattttgaagctaagaagattgtgcagaccacctttaatataacgcgcgatcttcactgtttcagcatgtcggccagcctttctccttttgggcagtggaaatactacaattttaccattcgtgccaatgcaagtattttgcaagacttaaaatgggaacaaagaagccagacccagagtaatattcagtggtactgatttattattttaccatttgatctcttcttcgccatgtgccctcaaatagtcattggccttactgaaatgtttgttgccgaaaaagccgttgtaagcggaaagcggagaaggatgtgctgatgtcaataccagatgcttgttgcggtcgataaacgcgcctttccgttgtgcataagctccccatagaatgaataccaagtgctcccgctcttcggcaaggatacggatggcggcatctgtgaatgtttcccaaccatgattttggtgagaaccggcttgatgggcgcgtacagtgagggtggcgttgagcaatagcacaccttgttccgcccaacgtgtcagattaccggtaggtggcgcgtctgctccggtatcagctttgatttctttaaagatatttactaaagagggagggaaaggaacaccgtcatttacggaaaaacaaagtccatgcgcctgtccggggccatgatacgggtcctggcctataatcactacttttaccttatcgaaaggacatagattgaatgcgttgaatattaatttacccggtgggtatatagtattcttgccgtattcttcgcggacaaaattcgttaacttataaaagtaatccttatcaaattcaggctgcaaatgtgttttccagctatcttctatttgaacattcataattggaagtgttggtgatttagggtgctaagatacaaatatttcaccacagagtatacaaagtaccgcagagttttgtcaagtgtattaaaaaactctgcggtactttgtatactctgtggtgaaatatttaaatgagatgtatgttgtgtgctttacattcccggcgcatgtcttcgggccagatgctggcttgtatttctccgatgtgtgctttacgtaagtagaacatacataaccgggactgtcctatgcctccaccgatggaaagtggcagtgcgtcttccattaagcacttgtggaaataaagccccatacgcttctcttcaccttcctgtttgagctggcgtagaagtgcttccttgtctacgcgaatacccattgatgataattcaacgctgcgttgcaggacatcgtcccataacagtagatcgccgtttagtccggggagtccgttcagtccagaggttgtgtaatcatcgtaatccggagcacgcccgtcgtgctttttgccgtcgcccagtttgcagccgatgccgatgataaatacagcaccaaacttcttgacaatggcgtgctcacgacatttcggctctaagttggggtacatctggcggagttcttccgcatggatgaaatgtaatttctgtggcagacagggcttgatttgtgggtacgtttcgtataccatgtattctgtacggaccattgcagcataaatgcgggtgacaatctcttttaggaaatcaacgttacggtcttggtcggtaattacacgttcccagtcccattggtctacatatagagagtgcaaattgcctaattcttcgtctgcgcggatggcattcatgtcggtatagattccgtatcctgattctatatggtattcggcaagcgtcaggcgtttccatttggcaagtgaatgcactacttcggcttgtgcatcgcctaagtctttgataggaaaggaaacggcacgctctactccgttcaggtcgtcgttgatacccatgcctttcagtacaaaaagaggggcggtgacgcgacgcagacgaagttcggatgaaaggttcaactggaagaactccttaatctgtttgatgcctaattcagtttgttttaagtctaataaaggtttatatccttcgggttttatcaggtaactcataggttttatttatatgtcatttgttaatttgttcggcaaagatagaaataatattgatgattgatgctattttgaacgaaaaaataacaaaatgtatatatgtgctcgtgtagtgctctcaaaataataatatagaaagtgaatgttgctagatagaaaaagtgatgaatattaggaatatgccgagattttttctacttttgcactcgaattaaggctccgtagcttagtgaatagagcgtcagattccggttctgaaggtcgtgcgtttgaatcgcaccggggtcacaaaaaatccttgataatcagtagattattagggattttttatgtctgtattattttttttaatacgggtagtaaaaggatttttagcttctgtttctgtatttgctggctagttagagtagttgtaatgtgttgataattaggttggaatagcttatgatgaacgagccgtagttcactatccgtaactgctgcgatagatcacttcctttcaactaatttaccaaaataagggttagtaatgcgcttttgttctaaagagttattacttgaaacagtcagacattcttattctatagtgaaaaggtaagttaccccaattaataacttacctttttctatgtatataaaattaactacaacactttaattttaatatttttaaaccatacttcatctccatggtcttgcagcaaaatattcccatattccgaattaccaaaattctcccagtttttatacttactgtatgctaccaaagcattccacatttcattctgacgggtatattctattagcttcactccattcagccaatgctccacatgattatctctcacaataatcatagctgtattaaaatctttcttattgaaaggcttatttgccggagctggaatcagatcataaagtgagcctaattgtcgatttcctttcactcccaattttgcatcagggtgtttgtcatcgtccaatatctgaaattcgcatccgatagccgatccggctcccctattcatgcccggattaacaaaatactttataccgctgttagctccttcagtgatcttaaaatctactttaagaataaagttcttatattcttgctctgtcactatatcaccaccatttgctgattccgcaccgccactttttaggactttcagaataccattttccatgacccaacctttcttagggaaggcatcaattcttgcaccccgccaaccttccgaggttttaccatcccaaagaagtgtccaaccattttttacttcatttggagaaagagtgttagaaatcacattaatctccggtgctttgactggagtcaaatagcgttctacattggtagtacaaatacgtatattcttccaacggacagttttcccttcatcagccgcactggcaatagcatgtacctgcaaggctatgaaacctgaaagagtcatgtcatcccaaatattggcacatggaactccatttatccacgtggcaatggagttgccaaacgcttcaacacgtgctttgttccattccttacttttaaaggctgttttggcctgcggattccaagtcagcggataaagccaattacgacgggcctcatcgtaaatacctcccgaccaggcacgttcggaaggatcaatctcaaattgatagccatgcactcggcctttttgataatccttcttgctttcactacgcaattgtacaccggagttcaacccttcatcaatcttaaaatcaaattccaagataaaatcaccatactgcttctgagttgccaagaaagtgttaggcgtgcccagctttgagatccccacaatcgtaccatccataactttatattcagctttcccattcagttttttccaacctttcaggttcttgccattaaaaatatattcccagttttgagcctgcataaccaaaacagaaaacaagcacaaaagcaataagtaaactcttttcataccagtatatttattaaataagtaacattataatttataaaattcatcccaacccttacgaggaggtgttccaatcagcatcgcattggcaaattcattatttgtaatctgtttcatacgtgaatcaaagaacagtctggtgttcaaacgctgtgctattactcccaatgagaagacctggctcagcactccgttaatttcaaatggagaacgagttttctcctgtcccatgcaagccaataaaaagttttcgaaatgatttgatggactttttggtatttcaggaagtatgcctgccatttcttttgctttttcttccggtataatagaaagagtactgccatggcttcctcctttaaaaaccaggtcttttgtataaataatctttcccgggtttaatttggcagccggtgtgtctccctgatttgttttgggaatattgggatcaaggcctgacaccccatagccttccggaatgggaggtaaattatccaaaccatcataccaggtgatatctaccggcggcattcctttacgctg

SEQ ID NO: 224 - DNA, 6096 bp, unidentified
  source 1..6096: mol_type = unassigned DNA
atggaggacaaacaaatggcaaagaaagttgtattagcaggcgcttgccgtaccgcgatcggtactatgggtggaaccttaagcacaactcctgcaccggagctgggcgcaatcgtgatcaaggaggctctgaagagagcaggcgttgctcccgaagcagttgaccaggtatatatgggatgtgtaatccaggctggccagggacagaacgtagcacgtcaggcagcgatcaaggcaggacttcccattgaagttcccgcagttaccatgaacgtggtatgtggttccggtctgaactgtgtgaaccaggctgcacagatgatcatggccggtgatgcagatgtcgtagtagcaggtggtatggagaacatgtccatggctccttacgcaattcctcagggacgttatggttatcgtatgggtaacgcaaccatggtagataccatgatcaaagatgcactttgggacgctttcaatgattatcatatgattaagaccgcagacaatatctgcgaagagtggggacttacccgtgaagaactcgatgagttcgcattaaagagccagttaaaggctgaagaagctcagaagaacggtgctttcaaggcagaaatcgttcccgtggaagttaagaagaaaaaagagaccatcgtattcgataccgatgaaggccctcgtcatggttctaccatcgaaggtctggctaagcttcgtgccatcaatcccggtggattcgttaccgcaggtaacgcttccggtatcaacgacggtgcagcagctatcgttgttatgagcgaggagaaggctaaggagctgggcgttaagcctatggctactttcgtagcaggcgctctggctggtgttcgtcccgaggttatgggtatcggccctgtagcttctaccaagaaggtaatggctaagaccggtatgaagatcgaagacttcgatatcatcgaggctaacgaagcattcgcggcacagtccgtagcagttggtaaggaactgggcatcgatgtagataagcagctgaaccccaacggcggtgctatcgcgcttggtcatcccgtaggagcttccggatgccgtatcctggtaactctgctgcatgagatgcaggcaagaggtgccaagaccggtctggctactctgtgcatcggcggtggcatgggctgctccaccatcgttaagatcgaggattaattttataaatattcgctggggcggtagaatctctatcgccttagtgtggttttgaaaacacgaatagaaatgtgaaatgaggtaaaaacatggattacattttgtatgagcagaatggtaatgtggcaaccatcaccattaaccgtgagaaagcactgaacgcactgaattctcaggtgctggatgaactgaacgctacattggatgcagtagatctggcaacggttcgctgcctggtgatcaccggtgcaggtgctaagtccttcgtagcaggcgcagatatcggagagatgagcagcctgaccaaggcagaaggcgaagcattcggcaagaagggtaacgatgtgttccgcaagatcgagaccttccccattcccgtgatcgcagctgtcaacggcttcgctctgggtggtggatgtgagatctccatgagctgtgatatcagaatctgttccgataatgcagtattcggacagcccgaagtaggactgggaatcactcccggcttcggtggaacccagagactggctcgtctggtaggtgcaggcatggcaaagcagatgatctacaccgcacgtaatatcaaggcagcagacgcttacagaatcggtctggtaaatgaagtatacagcgccgaggttgatgctgacggcaatgtagtaaagagcgcacaggaagtaatgctggcagcagcacagaagatggcagcgaccatcgccaagaacgctcccatcgctgtacgcaactgcaagaaggctattaatgatggcctggatgcagatatggatcaggcagtagtcatcgaagagaagctgttcggagattgcttcgagacagaagatcagaagtatggcatggctttcttccttgacaagaacaaggaaaaagtaaaagagcctttccaaaataaatagttataatagtttttcaaattaatgatagaatgtatagaaaacaggaggatttaccatgaaagtaggtattatcggtgcaggtaccatgggacagggcattgcaaaggcatttgcccaggtagacggatatgaagtagctctctgcgatatcaagcaggaatgggctgaaggcggcaaagccaagatcataaaaggctatgcaagactggtagaaaaaggaaaaatgacccaggaagcagttgacgctatcgtagctaagatcactccgggtctgaaggaagacctgtgtgcagactgcgatctgatcgtagaagctgcatttgagaacatggaagtaaagaagaccaccttcggtgagctggacaagatctgcaagcctgagtgtgtattcgcttccaacacatccagcctttccattaccgagatcggcaatggactgactcgtcctctgatcggtatgcacttcttcaatcccgcagaccgtatgaagctggttgaggtaatcgcaggtgtgaatactcccgcagagaccgtggataccatcaagaagatctccgaagagatcggcaagacccctgttcaggtaaacgaggcagcaggctttgttgttaaccgtatcctgatccctatgatcaatgaagcagctttcatcaagatggaaggtgtatccgatatcgcaggtatcgacgccgctatgaagctgggcgctaatcatcccatgggacccctggagctgggtgacttcgtaggactggatatctgccttgccatcatggatgttctgtacaacgagaccggcgacagcaagtatcgtgcatgtcctctgatccgtaagatggtacgtggcggcaaccttggtgtgaagaccggcaagggcttctatgtatacaatgcagaccgcaccaagacgcctgtggatgcacagtaaagtataaacaatccgtaggcatcaaagtcggggttcttagaccccgacatcatgataattacaaccaagtataaataacaatggaggattaacatcatggattttacattatccaaagagcatgagatggcgagacagctgttcaaagagttcgccgagaacgaagtaaaacctcttgcacaggaagttgacgagaccgaaactttccccagagagaccgttgagaagatggctaagtacggcttcatgggaattcctgttcccaaggagtatggcggacagggctgtgataccctgacctatgctatgtgcgttgaggagctttccaaggtttgcgcaactacaggcgttatcgtttccgcacatacctctctgtgtatcgatcctatcatgaccttcggtaccgaagagcagaagcagaaatatgttcctgatctggcaagcggccgcaagatcggtgctttcggtctgaccgagcccggtgcaggtaccgatgcccagggtcagcagaccaaggctgtattagatggcgatgagtgggtcatcaatggttccaagtgcttcatcaccaatggtaaagaagcagatgtttatatcgtaatcgcagttaccggcatcgtagagaagagaggcagaaagatgaaggagatctcttcctttatcgttgagaagggaactcccggatttaccttcggtaccaaggaaaagaagatgggtatcaagggctcttccacttacgagctgatcttcaccgactgccgtatccctaaggagaacatgctgggcaagcagggacagggattcaagatcgcaatgcacactctggacggcggacgtatcggtattgcttcccaggctctgggtattgcagaaggcgctttggagagaaccgttgcttacaccaaggaaagaaagcagttcggaaagtccatttccggattccagaatacacagttccagctggctgatatggctaccaaggtggaagctgccaagatgctggtatacaaggctgcacgcaagaaggacgagtacaagaccaatcctaagatctcttactctgtagaagctgctatggctaagctgtatgctgctgaggttgctatggaagttactaccaaggctgtccagctccacggtggttatggttatatcagagagtacgaagtagagcgtatgatgcgtgacgctaagatcaccgagatctacgagggtacttctgaagttcagagaatggttatctctgcagatctgttgaagtaagcgttgttgaatgaataattagaaaagtaaggagaaaatacaatgaagattgttgtttgtattaagcaggtgcccgataccaagggcggtgttaaattcaatcctgacggaactcttgacagaggcgcaatgcttgctatcatgaatcccgatgataaggctggtctggaagctgcactgaagctgaaggacgagttcggcgcagaagttaccgtactgaccatgggtcttcccaaggcagcagatgctcttcgtgaggcgctggctatgggtgctgacaaagcaattctggttaccgacagagtactgggcggtgctgatacctgggctacttccactaccattgcaggtgcattgagaaaccttgactatgatctgatcattaccggtcgtcaggcaatcgatggtgataccgcacaggttggtcctcagatcgctgagcatctgggacttcccgtaatctcttatgcacaggacattaaggttgagggagacaaggtgatcgttcagagacagtatgatgacagatatcatgtagtagaagctaagatgccctgcctgatcactgcattatccgaactgaataagcctcgttacatgactcccggcggaatcttcgatgcatgcaaagcagagatcactacctggggcagagctgatctgaaagatgttgatgacagcaaccttggtctgaagggatctcctaccaagatcgcaaaggcatccgataaggttcgtaagggcgcaggtgagaagatcgttcccgattcacccgaagacggagcagcttacattgttgctaaattcaaagaaaagcacatcatctaatataggaggcaaaccatggtaaccaataatattgaagaatacaagggtgtatatgtgttcgcccagcaggtagacaatgagatcagtggtatcgcattagaactgctcggcaaaggtaaagagctggctgcaaagctggagaccgaggtaaccgcggttctgatcggttataacgtaaaaggactggctgataagctggctgagtatggtgcagataaggtgatcctcgtagatgatcccgaactggagacttacagaaccgagccttatgcacatgcactggcatctgttattgagaaatataagcctgagatcgttctggtaggtgcaaccgctatcggacgtgatctgggacctactgtttccgcaagagttcagactggtctgaccgcagactgtaccgtactggaaatcggtgatttccctctcgttgctatccccggacaggagcagaagcacaatcagctgctgatgacccgtcctgcattcggtggtaacaccatcgctaccatcgcatgtcctgacaacagacctcagatggcaaccgttcgtcccggcgttatgcagaagattgctcctatcgcaggtgcaaaggctgtgatcgaagagtacaatcccggatttactccgaacaacaaatatgtaaccatcaaggaagtcgttaaggctgtatccgataccgttgacatcatggatgccaagatcctggtatccggtggacgtggagtaggcagcgcagagaacttcaagatcctggaggatctggcagaagttctgggcggtaccgtatcctgctcccgtgcagttgtagataacggctggaaacccaaggatctgcaggttggacagaccggtaagaccgttcgtcctcagatctacttcgcaatcggtatctccggtgctattcagcacgtagcaggtatggaagagtctgatctcattgttgccatcaacaaggatgag

SEQ ID NO: 225 - DNA, 9631 bp, unidentified
  source 1..9631: mol_type = unassigned DNA
  misc_difference 4775: note = a, c, g, or t
  misc_difference 4776: note = a, c, g, or t
  misc_difference 4777: note = a, c, g, or t
  misc_difference 4778: note = a, c, g, or t
  misc_difference 4779: note = a, c, g, or t
  misc_difference 4780: note = a, c, g, or t
  misc_difference 4781: note = a, c, g, or t
  misc_difference 4782: note = a, c, g, or t
  misc_difference 4783: note = a, c, g, or t
  misc_difference 4784: note = a, c, g, or t
taaagacgtggccgtcctcctcaatgtcgatcttgcagttgaagttggcgcacatttcctgaatgaccttgccgcccttaccgatgacgtccttgatcttgtcaacggggatttgcatgctgaacatcttgggtgcatacttggaaagctctgcgcgcggctcggcaatgcagggcttgatgatctcgtccaggatgaacaggcggcccttgcggcacttttccagtgcttcggccacaatatcataggtcaggccgtccaccttaatatccatctggatagcggtaataccgcggcgggtgccgccaaccttaaagtccatatcgccgtggaagtcctccacgccctggatatccagcatggtcatccagcggccgccgtgcagcgggtcgccatcggtgatcaggccgcaggagataccggcaaccggtgccttgatgggcacaccagcatccatcagggccagggtggaagcgcaaatagaagcctgagaggtggagccgttggagctcatgatttcagaaacggtacggatggtgtacgggaactcttccatgctgggcagcacggggatcagggcacgctccgccaggttgccgtggccgatctcgcggcggccggggctgcggggtgcgcgggcttcgccggtggagtacggcggcatgttatagtgatggatgtagcgcttgagcggggtgtcggacaggtcgtccatcatctgggcatctttggtggagcccaaggtgcagatggtcagggcctgggtctggccgcgggtgaacaggccggagccgtgcacacggggcagcacaccgacttcggcggccagcgggcggatctcattgatgccgcggccgtcaacacgcttgccttcttccagcagccaggtgcgcacaaccttcttctgcagcttatagctgatcagatccaggtcggcggcgttcagttcggggtgttcctcggcaatagcatccatgatgggcagcatggcggcatcgcggacgtttttgtcgtcggtgttcatggcagccttgacatcttccaggtgcttggcgtacacatccgccaacagagcgtgatccagttccaccggggtaaagctcttcttcggcttgccgatctctgcaacaatgccgttcataaaggtgagcagctttttgatttcctcatggccagccttgatggcgtccatcatgacctcttcggtcacttcgttggcgccggcttcaatcatgacgatcttttccatgctggcagccagggtcagggccaggtcagagcgctcgcgctgctccttggtggggttcagcacgatctcgccgtccacatagccgactgccacgccgccgatggggccattccagggaatatccgacatggcaatggcgagagatgcgccgttcataccggcaatctcaggggagcagtccgggtcaaggctcatcacagtcatggtcacgcagacatcgttgcgcatatccttggggaacagcgggcggatggggcggtcaaccacgcgggaggacaggatggcgtgttcaccggggcggccttcgcggcgcataaaggagccgggaatgcggccggcggcgtacagcttttcttcaaattccacgctcagggggaagaaatccaccccttcacgcggcttttcgctcatggtaacattgcacagcacgcaggtttcgccatagcggatcattgcgctgccattggcaaggccgcagagcttgccggtttccaccacaaacgggcggccggcaaaagttgtttcaaacttgcggtagttggggaaagttgccttacgggatgcaaattccagtgccatagtaattctccttctgatataatttttgatacctggtgggaatatgcggttcaggcagccccatgctttgagcaataaatccagcggcggaacggttgttttgctccggcgttcgatttactgcacaaaccatgcgggcggccaaaaacattaagttaggagataagagggaggagttaggagttacagcactgaccaaggtaccgcacattacattgtaaaaggcagtgggatataatggactggcaacggtggccagagtgccaaagtaccgttctcctccctcggggtcctaactttattcaatatgattacaggccagcggcagagcataataaaaatgaatgccggaacacctgctgaaatatagaaaatgggcagggcgcacatacagcgccctgcccgttttgcgaattacttgcgcagacccagttcagcgatcagagcacggtaacggttgatgtccttcttctgcagataggccagcaggttacggcggcggccgaccatcttgaacagaccacgacggctgtggttgtcgttcttgttggtcttcaggtgctcagtcaggtggttgatgcgtgcggtcagcagcgcaacctgaacttccggagaaccggtgtcaccctcatggatggcggcttttgcaatgatgggctgtttttcgatagcagacttctggctcatagtagtaatacctcgctttataatatttgcctacggcgcagcaaagggcaatcaaggttccctgatgcagggcatacgcccaaagccgggccgcggtaacatttagattatagcatatccggcatagcgtggcaagccgtaacagcaaaaaaactgcacagattttgccctgcttttccggcaggggtcacagggtcacgtttttcagattgcgcagatccccgctttcgcggaaatcctcataatccaggctcaggttcgggttgtaataggggtcatgcaggatattctgcttaccgtgtacctcatacaggcgggcctgttccttggcaaagcgggcctttttgacggggtcttcctcgtccgaaccgcgggatttgctttcgtggtggtacagctccgcatagggggtccacacaatacgccagcctttttcccgcaggcgcaggcagaaatccacatcgttgaatgcaacagtaaaggcttcatccaacccgccaacggcatcataagccgatgtgcgcaccagcaggcaggccgcagtgcaggcggaataatcctgcacggtggccaggcggaacatgtacccgctaccgccgcgcttgtggtacttgtggctgtggcccgcatacccacccaaaccggtgataatgcccgcgtgctggatggtatcgtccgggtaatacagcatggcgccgcaggccgccacgccgggctggctggcttcggccaccatctgggtcagccagtttccgctgatgatttcaatatcgttgttgagcagcagtaagaacttgccgttggcaaacttgcggccaaagttattgatgcggctgaaattgaacccgccgctgtaagccaccacgcggcagttggcatagcggtccggcagcttttcataataagcctttgtggcggggtcggtggagttattttcgatgacgatcacttcaaacgcttcgtacagcgttttggagtacaggctgaacagacatttttccaggtcgtccacatggtccttgttggggatcaggatggacaccagcggttccggctccggcagttcccactgcacatggcaggtaccagggaagatgccctcctctaccctgccgctgcggccggttgccgccaggtggtccgccacggctttctgcgcggcttttaccacatagggcttggcctcggtgccgccggaggtggacgccgcatgaacccgccagtaatacagcacctgcgggatatgcagcggtgcggcgttggcgtctttcgcctgcatggcgtcgatcagccgcaggaacagatcatgatcctgtgcgccgtcacactccgggcgctccccgccgatggcatcaaacagacttttgcggaacacggccaggtggcagatatagttgcaggccatcaggtattccggcgcatagtccggcttaaagtgggccacatgggcggttttggggcttttgcggaaaagggcttcatcgctgtaggcgaaatcggcccccgttttttgcagttctttgcccatgcagtagatagcgtgcggggccaggatgtcatcatggtctgccagagccagatattccccctgtgccagccgggccgccgcgttggtgttggccgcaatgcccttgttttcaattttcacatagcgaatgcgcgggttggccgccacgtgcttttgcaccagctcccccacataggtgtgggcatcgtccgaagcatccgccaggcagagctgccagttgtgggcggtctggttttccacactatcgagaaattctgttaaaaagttttgcggcgtattgtacagcggcgttaaaatagaaatgatggggaaggtttccgccgcggggtcgctgcgctgggcttccagcgccatgttggacggccagtaccgcgcccgcttgccgaaaaagcgccgtttgaaaaagcccgccgcgcgcacgcacatggtgccaatgccctgttccttcgtcaaggtacgggcatagccaaatagttctttgatgcgcttggcctgctggttcataacgttacgtcctttcgggtgtcagattgttgggggttgttccggttcgggttcaggcagtccgtctgctatgtttgggggttggaatcgatgtacagccagatggtttcataatctgtctgggtacggatgacgtggtcatggaaggatttttgccagatggggtgatggaggtgtttggttacgcagctctttcattgttggacgatgttggaaaccgtaggggcnnnnnnnnnntgcgcgcccgtcgccctggaacaaaagcagcaaatgcacatggttgggcatgaccgcgtatttttccagatgcaccgtcggatatttatcagggatttgcaaaatagcctgttcaaccacattccctatcgcagagagttccgggcaaggtgacgggcgcgcaatgcgcgcccctacggcctgggaattctgccgcaatcgggtgggttctttccaaaataaatgcactctgccctgcgtacagaaggttatgaaatatgcaccattttggctgtaatcatatccctgcaaacggtttggcactcttgtatgatgctgcatgccgttcaccaaacataaaaatcctgatatactttacccatccagcccgtttgcctggcgctccatgttttctacaatgatcttgtgcaaatcgccctggctggcggcgtattccagcaccttccagggggtatcggtgtggtaatgcactttcaccacttcctcatcccccaccacgatcaggcagtcgccctcggcgctggccatgatcccggcgcggatgtcatcctcgtccaggttgctgccttcgatcaaaaactaggtatcaaacttatttaccattgttttatcctctgccccgttttatttcagcccaaagttttcaaacaggttgttgaaatgcgggttatagtacgggtcataatgatcaatatattcgtgatacttcgtgtaaaagtttgccttttcgcgggcatagcgggcagcgttttccggggtggtgtccagaccgcggctcttgctctcgtaatggtaggcttcggcacggggggtgtacacattcagcaggcccttctgccacagcttcaggcagtaatccacatcgttataggccacggcgaacttagcttcgtccaggccgcccgccgcgcggtacagctccgttttggtcatcaggcaggcacccgtcacggccatatagtcctgcgtggtgacaaggcggtacaaatcgcccacagccttgcgcgggtaactcttgtggctgtggcctgcactgccgttgatgcccataatcacgcccgcatgctggatggtatcatccgggtaatagagctttgcgcccacagcacccacatccggccgctgggaatagctcagcagctcccgcagaaaatcatggctgagtacctcgatatcgttgttcagcagcagcagatgctcgcccttggcaaagcgcgcaccaaggttgttgacggcagaaaagttaaacggccccacataggtcaccacccggctgttggggtaacgctccggcatggttttgtagtaggcgaatgtttcctgctgttcagagttattttcaatgaccaggacttcaaagttatcatagcctgcgttggcatacaggcttttcaggcagcggtccaaatcgtcaatatggtctttgttggggatcataacgctgaccagcgggtggccggtcagctcgtaccgcacctggaacgcaccgggcgcgtcctccacctgcatggctttgccgggcaggttcagccgcttgagctgggcatcgattgcgcgcacaccggccgccagggcatagggcttcgcctccatgcccgccgcggtggaacccgcatggccgcgccagatatagagcacctttttgatatgggcaattttatcccgcgtggtctgttcggtcaggcgcagcatcaggtcatggtcctgtgcaccatcgtactcactggattcatatgcaccggcacggtccagcaatgcgcgggagaacaccgccagatgggtgatgaagttgaccccgcgcagatagtccggcgcaaagtccggcttaaagtggtagccgcccagctgtttcaaatccgccgaaagcacgatctcatcgctgtacaccagctcggctccctggctttgcagggttttcacgctctcatacagcgcgttgggatacaacacatcgtcatggtccagcagggcgatatacgtccccgttgccagcgcaaagcctgccgtggtgttggccgcaatgccgccgttttccactttcttatacaggatgcgcggatcctttgccgcggccttgctggcatgggtgctgaacgcggcatgggctgcgtccgaagcatccaccagcaccagctgccagtgggggtaggtctgcttttgcacgctggccagcatctggccaaagaacttttccggcgtgttgtacagtggcactacaacgcttaccaccggtcccggcttgccgtctgcgtactcggcgcgctgggctttcagctcccggcgcaggggcaggtctgcccggtgctgccaggaatcatggtggaacgccagccccacgcggaaggtcacatcgcgccacagctgctcggcaccctgctctttcagggtggcggcgctgcggcgggcaaggtctgacaaatgggcggggttcagcaggcgtttggccatgccgcccacactgtccgcctgggccacatccgccgggcggttctggttcgtgtcctgtgccatgcgccttatccctccactttgtccgccttcatggcgtccttcttttcaaacttgcggtattccgccgtcacctctttggtggggccaaggcggcgcaagtggccgtggtccagccaggccaccttattgcacatgcgctcaatctgctcaatggaatggctgaccagaatcacggtcgtgccgccggaaagcagctccgccatgcgcttctcacacttttcctggaacaggaaatcaccgaccgaaaggatctcatccgcaatcaggatatccggcttggtcatggtcgccacggcaaaggccaggcgcgccaccatgccggaggaatagtttttcagcggcacatccaaaaattcctgcagctcgctgaactccacaatatcgtcaaacttggaatcaatatacttgggggtatagcccagaaccgtgccgttcaggtagatgttttcccgcgcggtcaaatccatgtcaaaaccggcacccagttcgatcagcggcgcaatggtgccgttcaccgtcactttaccggcgctgggcttgtagacgccggaaatcactttcagcagcgtacttttgccggagccgttcaggccgatcaagccgtaaaaatcccccggcataatgtcaaagctaacatccgaaagggcgaagaattcatcaaatcgcacaccgccgtgcaaaagggccacaaaatattctttcaggctttcgtgcttttcttttgccaggttaaaacgcatcgaaacatggtcgatggaaataatgggctgttgcttttgttcgctcatcttgcagcccccttacatgtacaggacaaatttgtcctggttctttttgaatacatacacaccgatccccagactgagcgcagaacacaggaaaggaatcagcaccatgttcagggtcaggccggtgccccacatcacgcaggaacgcaccgccgtgatgtaccagtagatggggttcaggttgatgacagcctgcatccaggatgccatctggctggggtcatagaaaatggcactgccgtataccagcagggtgcagaagacctcccagatgtgcatgatatcgcgcacaaagacatacatcgtggacaggatcagcccaacgcccaggctgaaaacgaacagcataacaatgggatacaccgccagcagcaccgtgcgcagcgaaatatgggaccaggtaaccagcgctacaaagaagagcgccaccagactgaaaaagaagttgaccagcgcaaagcagcatttttccagtggaaaaatgtacttggggatatagaccttgcgcagcagcgggccgtttttcagcacgctttccatcgccatgctggtggattcgcggaagaagttgaacatcaactggccaatgatcaaaaacagcgggaaatcctcaataccatccccgcgctggttgaacagcgcgccgaacacagcccacatgacaaggcaggtcagcagcgggttgagcacgctccaggcaacgcccagcacgctgcggcggtacttgagcttaaaatcccgcgtgatgaggttttgcagcaggtagcggtatttccagaaacttgcaaacgagttttttaaattctgcacatcggttcccctgaatcagtatttttcaaagtattcaaacttctgctcggcaaagggcgtgtgctctttgtccttggcgctggtcttatgctcgcagccgcagtccggccactgaacgttgacggtcgggtcatcataggggatgccgccctctgcggtcggatcatatacgtcggtacacttatagcagaattccgccacatcagacagcaccagaaagccatgggcaaagccttccgggatatagaacatctttttgttctcggcggaaagggtcacacccacccacttgccaaaggttttgctgttggggcggcagtccacggcaacatcgtacacttcgcccatggtcacacgcaccagcttgccctgggtatggttcttctggaaatgcaggccgcgcagcacgcccttggtggagcggctctggttatcctgtacaaagggcttgtcaatcccggcggcggcgaaatcgtcgatctgataagtctccataaaataaccgcggtcatcgccaaacacggtcggttcgatcacaacaacaccggggatttcggtttcaataaaattaaacttacccattttttcatattctccttttatcgttcgggctttgcccacagaataacataataatacagatacattatattctgtttccggtttttgtgcaagacttcctgaggcaataccgcataattctaagtgccgatacggcgagcgaggtgcggcagatgc

SEQ ID NO: 226 - DNA, 24376 bp, unidentified
  source 1..24376: mol_type = unassigned DNA
attcttatctgtcgcctgtggcacctcatgtccctctgcttttaagaattcgataaatttctcactaatctgtgttgcaaatttccttccaccacgatagtccgcacagagaagctgtccattcacatcataaaaatccaccataaaattatcatatacgcgtatgattaattttgcagtccgaacctcaagataatcaattccttcctgcacatcaaaatgtatatgctttgacttttctccctcgatggcttttgaacgatgttcctcacattcaaacggaacaaacacatttacaatgttatctgtcagaacctctaaacttcccttgccatattcaaatgcaaaatgaatgattccattctccacataataagattttctttttcccagcatactttttcctccgcttttgcttatattagcagtaatgtacctcccactatcataagtaatccaaagaatgcctttggctgtagtctttcatttaaaaacacagatgaaaatacaattgtaactacaatgcttagtttatcaatcggcaccactacgctggcttcgcccagctgcagcgcccggtaataacaaagccaggatgctccggttgctattccggataaaatcagaaacattccatcccggaaggtcatactccggacctgtttctgtttctttgttacaaatactaccacccatgccataacaagtaccactccagtacgatatgccgttccaagattggaattcacaccatctattcccaccttggcaaggatggacgtcagactggcaaatactgccgacagcagtgcatagataagccacgcccggctctttgtgccactgcttttctttctggtaatcataagcatcgttccaacgccaatcaataccatggcaatgattttcttctcgttcagtccttcatttaagaaaatgactgccagaatcatcgtcaggattgtactggatttatcaatcggtgttactttatttacatctcctagctgcaatgcccgaaaatagcaaagccaggatgccccggttgctattccggataatgtaagataaattaacgtccgcgttcctatacttccgattggagtataagatcgggtaagccgtaccataatccatgcaaaaatcaatactacaatcgtccggattgctgttgcaagattcgagtctattttcttaattccaacttttgccaatattgccgtaatacctgcaaaaaaagcagagccacatgcatatgcaagccacatatttattcctcttttctattatcccgggaaaattctgtcttaatctgcactgcagcagactttatttttaccacccacttttgcatcgttcaaatacagatgccacttcacttaatatccatacccgtcataatgtttcaaatattatcttattccattcttccgcctctttcggtatttctcttctcttgtttgttctttcctgcacccttcattccccatacatatcctatttcagaaatccatttacaatctgctcctctgcctctttttcagacagtcccagtgtcatcagcttaatcagctgttctcctgctatttttccaattgctgcctcatgaatcaatgctgcatcgatatcatttgctgcaagagacggaattgcctccacctttccattgtccatgatgatggcatcacattctgtatgtccgctgcatgcattattaccacgaatataagaaacaaacttctggtgggaatctccctttgctaccgaacgagataccacatttgcactggaatgtgctccatttaaatctaccgtaaaatctgtctctgccttctgctgtccatgagtcataatacgttcatgaatcacaagggacgcatcttctttaaggtctgcttcggttgtacggattgtggagtctactcctttaatctgaacactgtccatatccatgaatccgccttcttccatgtggatcacggtagttggatttaagactctggctccatttccatccccttcaccataatgcttttctacatattttacttttgcattctttcctatataaaaggtgtgtattccatcatgctgtgatgtctggtctccgcagttgtggataccgcatcccgcaatgattgtcacatctgcaccttccccgatataaaaatcattatacaccaggtcctttaagccgctttcacttaagataaccggaatatgcatactctcattctttgttcccggttttacatagatatcaattcccggcttgtccttcttagttacaatatcaatatttgcagttgtatttcttgcctccagttttccgttgttgcggatgttatatgcgccttccggcacgctgtgcaaatctgatatctctgctaaaagattcttttctatactgtccattttctcaccttttcctagactaatttttccatcaaagtagagcaggcttcactgctgcctaacagctttggaagcacttcttcccggcttccggctgcgcttacttctccatctgcaattacaataatccggtctgcaatgtttaagattctctcctgatgtgaaataatcagaatcgagccattgattttctgatacatattctcaaatacctgaatcagattgttaaaactccaaaggtcaattcctgcctccggctcatcaaatatggataatttggttcctcttgcaattatcattgcaatctcaatacgctttagctccccaccggaaaggctgtcatttacctccctgccaatataatcctttgcgcaaagtcctacttctgaaagataggaacatgcctggctgatggaaatatcttttcccgatgccagtgtaatcaaatcctttacggtcaatcccttaaatcttaccggctgctgaaacgcaaagctgattccctttcttgcccgttcggtaatggataatcctgtaatatcctctccatccaataaaatctgtccggaagttggtgttactattccggcaatcagcttcgccagcgtggatttacctccaccgtttggtccggtaattgccacaaaccggtcttctatcttcagattgatattttttaatatttccttgtctgctgtttcatcatttacctgaaaactaatgtcttttaattccagcatttctctttcctcaccttactgtcagattcacctatctgcctctctgcgaacctggtttttataaaaaaaggatagcacaaaatggcttatttgccaacttctttcccttctattatacattttggattctttttaatgaaatattaataaatttttatcgagatttaccgttgttttttttcttaaatagatatatccttattcagtcaaaagtaaattatatgtaaaaagtgtgtaatctactgggaggagaaccattattatgagagaaaaacattcttttttaagtaagtgcaagaacttattttttaaactaaaaaacaaaataaatacttttaagaaccgggagaagaaaccacatccacaccttgaccgtgcagttgtgattatgaacaaatactctttggtattccatctgttactgtcctgtttcctcgttctggtgattgaatgtatttccagacgaaatgtgctttctgcattttcctttattgcaggacacaccattgcttacctttataactcatttattatttttgcaagtttatccctggtctatctgattcgaagaagaacacttgcccgtctcttaatcagcggcttctggcttttccttggaaccatcaatggcgttattctttccaaacgtgtaactccatttggttttacagatttgaaatgtctgtctgacttatttgccatgcagaacaccaaatactttacctttggtgaagcactcgccgttattatcgtagtcggtcttttcctgcttttctgtatctggctttttatcaaagggccaaaatatcagggcaaaatcaactggattgtaagtccgcttatggttgctgttatcttcctgatgttaccggtaactaccaaggcagcccagtccaataatattgttgcttcctattttgccaatattgcacagggctatgaaaattatggttttgtctacggcttctcatccagcgttgttgaccgtggtatgagtaaaccggacagttattccgaagagcgtattgccaaaataggggcttccgttccggaagaaactaccgaagctgccgaagatacgccaaatattattgttgttttactggaatcctttgtagatccctctgatgttaagttcttacagacttcagaagatccggttccgaattttcacaacttattaaacaactattcttccggttacttaaaagttcctgttgtaggtgccggaacagccaatactgaatttgaagtattaaccggtatgagcatgcagtattttggtaccggcgaatacccatataagactactttaaaagaaatcgacagttgcgaaagtattgcttccgaccttggaagtctcggctatggtacacatgttgtacataacaacggtggtaacttctacagccgtgccaatgccttctccctgatgggatttgacagcttcaccagtaaagagtgtatgaacattcaggagtacacaccacttggttcctggccaaccgataacatcttaatcagtgaaaccttaaaggctatggattctacccctgatcagtcagatttggtatataccattaccgtacagggacatggtgattatcctactgaaaagattcttgaaaatccggaaattgcagtaagcggtgctgcagatgaggcttctaacaatcggtgggaatattacattaacatgattcacgaagtagataaattcatcggcaacttaaccgaagagctttccaaacgggatgaaaagaccatcgtggtattcttcggcgaccaccttcctaccatgggactgaccgatgatgatatggtatccggtgacattttcaaaaccaaatatgttacctggaacaactttaatttaccaaaacaggatgctgactgtgctgcttatgaattattggcaaacatcaccaaccagcttgacatccacaaaggaaccatgttctcttacatccagagccagaagggttctgcttcttacgacgagaacttagagaatttacagtatgaccttctttacggaaaacgttatgcttacaacggaacagataaatatccagcaagtgatctggttatgggtattgatgatgtaacgattaacagtgtatggaaatccgatgacaataagttatgtatttacggctccggatttactccttggacgaaaatttatgtcaacggagagaaggtatccacttccttcttaggaagcaccatgttaaagattaatcttgacgacattgaagacggcgatacgattgttgctaacattgtaggttccagcagcaccatcttccgaagctccaacgagttcctctatgaggatccagatgtagaacatacggaagagcctgctaccgaaacagagcagccttctactgatacagaaggttctacccagtccactgagaaatccactgagcagtcctctgaacagtctttaagtggtgccggtacagcaactgaccagtctgtagagcatacagtcaatactccactgacacagaattaaaataatacacagaaagccccgatgggatgaattcttctatcagatttctcccatcggggctttgttatttcttttatttcacataatttttatctacgttgaccacgatatgatactgttcgcccagcttttcctttacctggtgctccagttcttttaacactgcttcatcactggaacggtagccaaatggaatcactacatcaaagataagattggtatgggtcggtccctgaaccatacggaaatcatgcatggtaatgacctcatcaatatccttcaaaatacctgtaaccgtttcttttatctcggtcagttccttgcttccggtaatcaccggatccatatgtatgacagcctcacaattcagttcccttttcaatttcatttctacattgtctatcatatcatgtattacaaggatattcatttctgccggcacttccgcatgtagtgataccatcagacgtcccggcccataatcatgtacgactaaatcatgaataccgataatcattttttcttccaacaccagatgttctatctcttttacgaattcttcctccggtggctgtcccagcagtggatttaaagtctccttcgctgcattaattccaccatataagataaacagtcctaccgccacaccacagtagccgtcaatattgactgacgtaaattctgcaatcaatgtggtgattaaaaccacagatgtggtaatgctgtcgcttaagctgtccatggccgttgcccgcatagccgctgaattaatcttctttgcgactctcctgttgtagaaggtcatatacagctttacagcaatcgatatcagcagaatcacgataattaatgcagagcattccgttgcttccggatgaagaatctttctgatggaatcctgtatcagttccactgccataattaaaataactgcagcaaccacaagcccggaaacgtattccattcttccatgtccaaatggatgctccggatccggctttgctgctcccagtttaaagcccagcaatgttacaatggatgagccggcatccgacaggttattaaatgcgtccgctgtaattgcaatggatttactgatggttcccgcaataaattttcctgtaaataataatacatttagcaaaatacctacaataccacataaaataccgtaggaaagccgtaccttctccggcttgtcatcttcccggataaatatccgggctaataatgttatcataaatcttctccttttgctcccttattcgtttcgcactaattcaatattttaaaattcttcagtggccaatatcggaaaatcgcttttccaagtattttacttttcttcacataggtattggtccagtatcttccatcataggagttattccggttatctcccattacaaaatagctgtcctccggcacttcaaaggtatacggtcctgtagctaccgtccatgtctctttgagataatcctcctctaagagttctccgttgacatatactttgccatcttctatctttaccgtatctcccggacagccaatgacacgttttacatagttctggctctcatcatccggaaacttaaagataatgatgtctccccgctccggtccggaaaacagatatgaccatcggaatccaatcagcttatctccggtcatgattgtattttccatggaaccggatggaatctctgcattaattaacacaaaacgatttaaaaacatagcaatcagcaccgctgctacaatcgtaattacccagcttagaaattcccctgccacagaagctgcattctttgtatcggattttcttcctttcttcctgcgtctgccgccctctgaatattcctcttctggttcttctaattcttcccggttgtcctctgactcttccggttcttcgatattctcaaagtcatctatatattctaattcttcatttctttcttttttctgcatctaaattgcctccggtctctttccttcccgttgttcgttctattatactccaagcaggaaagaaattccactggaaatgctttgcgagtttctcgtgtaaattaaaaagtccccgaaacataacgtttcggggatgttttctatgtgttcaatgacatctgcgttctctaagtgttcaatgacatccactcggctaggattcaaacttcgtccgcgactcgttttcatcaagtctcgggatgggctttcacactaagttcacgcttcgcctatggctcgcgttctctaagtgttcaatgcctagcagacaccctgagctaacatagcttcagctactttttcgaagcctgcgatgttagctcctgctacatagttaccttccatgttgtaacgttttgcagcatcatcaatgttatgatagatatttaccataatctgttttaacttagcatctacttcttcgaatgtccagcttaaacgctctgagttctggctcatctctaatgcagaagttgcaactccacctgcgttagaagctttaccacagatgaaccatactccgttatcctgtaagtatttggttgcatctaaggttgtaggcatgttagcaccttcacaaactgctttacatccgtttgctactaactgttttgcatcatcgataaggagctcgttctgtgtagcacatggaagagcgatatcacatttaatctgccatacaccacggccttcatgatattctgcactctttcttgcagcagcatactcagtaagacgagcacgttttacttcttttacttcttttaataatgcaacatcgattccttccggatcataaatccatccggtagaatcagaacaggtaacaacttttgcacccatctgctgcgctttctggatagcgtagattgcaacgttaccagcaccagatacaacaactgtcttaccttccatagattcaccatggcatttcattaattcttctgtaatgtataaaagaccatatccggtagcttctgtacgagctaaagatccaccataggtaagtcccttacctgtcagaacaccttcgtacattccacggattctcttatactgtccaaacatgtatccgatttctcttgcgcctgttccgatatctcctgccggaacgtcaacgtcagcgccaatatatttgcaaagctcggtcataaagctctggcagaatgccattacttcacggtctgattttcccttaggatcaaagtcagaaccacctttaccaccgccgattggaagtcctgttaaagagtttttaaatacctgctcaaatcctaagaatttgatgattccgatatttacggaaggatggagacgaagacctcccttgtacggtccaatagaattgttgaactgtactctgtatcctgtattaacctgaacctgtcccttgtcatctacccaaggtacacggaatttaagctgtctatccggctcggttattctctcaagtaatgcttctttacgatatttctcctcatttgcttcgattaccggtcttaaagactccagtacttcttctactgcctgaaggaattctggctcagaagcgttttttgcttttactctttctaatacttcatcaacgtagctcatattatatctcctttacatattaatttgagtattatatatacatcaacactactattttagtatgaaatgaattttttcgcaacgtttttttcatatttgtgtcaaaaactttatacttttgtgtactttttcttcttttttgcaagttttgtaccaaaaaaattcatttttataattaaaaagaagtagaaaacagttttttatttcccttctccacttctttttttgtataaatatactattttttatttttcaaatatgattcatatttcttctggaagaacttcaccagttttcccagtgttccaatcagaatctcactctcctggtcagtcaggctctccttgatatcatgtatcatattgctgtgaaaacgtgcatgatgctcatatgcccggactccggaatcggtgagtgatacacggaccacccttttatccctgtcatttctgcaacggtttacataacctttctgttccagtgcttcaattgcttttgtcagggttcctgttgtaacattcatcttcgccgccacttccgacatcctctttggttcatccagaccaattgcttcaataatatgcatatcatttccggaaatgttcatgaattctccggagattaagcatttttcctcaatttccatcaaatcattaaacagctttaccagaatgtcatttaaggttttatccgcattcattcttatctccttttaccagaccagtaccgctgcgccccatgtgagtccgccgccgaaaccagccagtacaactttatctcctctatgtatcataccatgccggttgatattatcaagcaaaatcggcacacttgctgccgaaatattgccacattccgtcaaatttaccgggaatttctccatcggctgtttcaatcgttttgctaccgcttcaataattcttaagtttgcctgatgtaatacgaaaagtgaaatttcctctgcctctaaatccgcctcttccagcacctttgtaatggttgccggaactgtgcggacagcaaatttataaacctcctgtccattcatgcttacataacccagcggactttccatcttatgatatggattattgaccggacggttctcacatgccagtaccagtcccttcgcaccgtctgagccctgcaccacatgacagatattttcttcgtctgcccggactactgctgctcctgcgccatctccaaaaagaacacaggtacttcggtcattccagtccataattttagaaagtacctctgctccgattaaaagtgcatttttaaatctgccactggcaatatatacctgtgctgtactcaatgcaaataagaatccggaacatgctgcaccaaggtcaaaggctacggcattcactgctccgatttcccgctgcacttcacaggaaagtgtcggcacaagatgatccggtgttaccgtcgccgcaatgataagttccacttcttccggcttcatgtctgcatctgcaagtgctttttttgcagcttctgtggcaagtgatgttgttgtctcttccgttgcaaggtgtcttgtttttattcctgttctgctggaaatccattcatcggaagtatccataatctgacttaaatcgtcattggtaatttttctttccggtaacgcacttccagttccacatattcgaatgttcatgctctgctcctttaaaatttacggaaacgttcataacgtgcttttgcaatctcttctccgctttttccttcatatgattctaaaaattcgcggatacatttatgcatataaactgcaatggaactcaatgcctcatcatctgctccaccatactctggtataattttctcgataatgccaagttctaaaagatcctttgctgttatcttcattacttctgctgcttctttggcacgcttgccatccttccagagaatagatgcaaagccttccggagaaagtacggaataagttgcattctccatcatgcagacttcatttccaactgccagtgccaatgcaccgccgcttccgccttctcctatcataaaggtaataaccggaactttcaaccctgacatttcataaagatttcttgcaatagcttctccctgtccgccttcctctgcttccataccgcagaatgctccggctgtattaacaaaggtgataaccggacgatggaatttttctgcctgcttcatcaggcggattgctttacggtatccttccggagatggcattccgtaattatgacgcatgcagtccttcatgtcctttcccttctgaattccgattaccgtaaccggttgtccgtcaaggtatgcgataccgcccacaattgccggatcatccctgtaataacggtctccatgaaattctatgaatttggtaaagatactgttgatataatcctctgcggacagacggtctaccttacgtgccatcttaaccttttcccatgcactcttttcttttgtattgtaagcgcgttcccgcatcagctctgtcggtcttccgtctacttcagttgccgggtcaaatttggcatatccacttactttatgcatacgaaggatttcatacagacgtttctttaaatctttccgctctacaatggcatccacaaaaccatgctctaactggaactctgctctctggaatccctccggcagtttctgtccgatggtctgctcaattactcttgctccggcaaatccaatcagtgcgccaggctctgctaaaataatatcacctaacatagcaaaacttgctgttacacctccggttgtcgggtcagttaatacagaaatatataaaagtccggcatcggaatgtttctttaaagctgctgctgtctttgccatctgcatcagggatacaataccctcctgcattctggctccaccggaacaacagaaaagaataaccggaagtttttcttccgtagcacgttctactgcccccgcaattttctctccgactgcatggcccatgcttcccatcataaatctggcatcacacacaccaatgactgcatcttctccataaatcttaccttttcctacggttactgcttcttttaatccggttttctcacggactgccgtcagcttatcgacatagcccggaaaatccagcggattcgttccatgctcttcggcaaaccattcttcaaagctctgtgggtctaataccatcttcaggcggtttccggtttttacgcggaaatatgctccacactcataacaaacatagcggtttcttactacctctgctttatttaccattttgccacaggctttacaaagtacttcctctttctttttttcttcctgtaaaataccttctgtggcatcctttacagctctattttccttgattttatccagtaatctgctcactttactcaccacttccaatcgcaaatgtcaactctgctgttgcagctatttttccatctactgttgcagttgcctttccaattccaatcggtccctttacttttatgatttctgtctctaaaacaagtacatcccccggaaccacctttttcttaaattttgcattgctgattcctgcaaaatatgcggtttttcctttgaattcatcctgacagagcattgcaaccgcgccggtctgtgccagtgcttctataattaaaacacccggcattaccggttctcccggaaaatgtcctgcaaaataaggttcatcaaaggtaacacattttttccctactgcacgaagtcccggcaccagttcttcaaccgtgtcaatcagaagaaacggatgacgatgtgggatgatttccataatttctttcgttgtcagtactgacattgttcccttctcctttatgcctgatattttttcagaagcagacttgcattatgtccgccaaagcccagtgaattgctgatggcatatggcacttcttcttcatatgcctctttgcaataattcagattcagttcttcatccggtgtctcataacctacggttgcatgaatgtaaccttcttcgatttcctttacacaggtcaggcactcgatggctcctgctgctccaagaagatgtccaatcatggatttggtggaattaatacggatatcctttgcatgctcaccaaacgccagcttgattgctcttgtctcaaataagtcattatgatgggtgctggttccatgggcattgatataagtaatttcttccggatttacaccggcatccttcattgcatttatcattgcggttgctgcgcctgcaccatcctctgccggagatgtaatatggtatgcatccgaagaacatccatatccggttacttctgcataaatctttgccccacgttttttggcatgttctaattcttccagaattacgattgcggcaccttctcccataacaaatccacttctgtttttatcaaacggaatggatgcatgttttggatcatctgaagaggtaagtgcggttaaagatgtaaatcctgctattccaagcggagtaatgcagctttctgttccacctgctaccatcacttctgcatcaccatactggatggtacggaaggcttcaccaatggcattcgttccggatgcacaggcggtactgatatttaagctctttccttttaatccaaactgaatggatacatttcctgctgccatattggaaatcatcatcgggacgaataacggatttactcttcccggtcccttttccaataatttgctatgctctctttcgattgcctgtaaacttccgactccggaactgatggaagtacccacacggtatgcatcctctgcttccatggaaagtccggcatcctccagtgcttctccggctgccgctacggcaaactggcagaatgcttccattctctttgcagagcggaaatccatatattcttttgcatcaaaatcctttacttctgctgcaagatgacatttatagtctgttgcatcaaaatgtgtaatctctccaatacctaccttctgctgctttactgcagaccagaattccggcacattatttccaatcggggtaattgcacccaatcctgttactacaactctacgattcatgttcttatcctctctatctaaacaatccatctctcgtcattcgtcatccgctgttctttctagctttttcatcagccagtattatttctgcatctacatagtcattccgccatctacagccagcacctgtcctgtgatataacctgcctcttcggatgctaagaatgcaactgctgccgcaatttcttccggctttccgattcttccaagcggaatgttatgaaacatattttcttttaccgtatccggtaaatcctttgtcatatcggtctcaatcattcccggtgctactacatttgcagtaataccgcgggaggaaagttctctcgcaacacttttagtcaatccgatgactccggctttggctgcacaataatttgcctggccggcatttccggtaattccggatacggatgatatattgattatccttccacttttctgttttaagaaatagcgggatgtatgatgaatggtatggaatacaccctttaagtttgtctcatagactgcatcaaattcttcatcattcatcttcatcacaagattatctcttgtaattcctgcattatttacaagaatatccagatgtccgtatttctttatgatatctctgagcatggcctgacatgcctcgtcatctgccacattgcactgataggattctgctctgccacccatatcggtaatcatttttaccacttcttcagcccgttctttactgccattgtaatttacaattaccgttgctttgtcttctgccagacgaagtgcaatggcacgaccaatccctttggctgcaccggttaccagtgctactttattctccaacataagctttataatcctccagtttttcaatgcttaccgttttgacatcccggttgattttacgcataaatccagataaagtatgtcccggtccgatttctacgaattcatcataaccgtctgctatcagacgctcgatgctctgctgccatcttacagaagaagatacctgcttctttaacagctcttttaccggttctgttgtggtaacgtaatctgctgtcacattggttacatacggaatgctaaattcctgcagctttgtattttccaatacttctgctaatttttctccggctccggtcaacatggcggaatggaacggtccgcttacttttaacggaaccacacgctttgctccagcttcctttaatgctgcaccggctttttctactgccgcttcttctccggtaattacaatctgtcccggacagttataatttgctatagatacaattccttcggtattgctgcatacttcttcaattgccttcgcatccagtcctaaaacggctgccattgctccgccggttggtactgcttcctgcataaagattcctcttgcacgaatgacacggaatgcatcttccatactcatgacaccggatgcaatcaatgcaccgtattctccaaggcttaatcctgcacaagctgccggttcttttccagctttctttaatgctgcataaattgctgcctctgtggtcagcatggcaatctgtgtatactctgtaatattgatttcttcattttcttcaaaacaaagctttgcaatatcaagtccggttacttttgaagcaagctcatatacggctttactctcttcacaggcatcatagaaatctttgcccattccaatatactgcgctccctgtccagggaacatgaatacaaccttactcattttcttctccttatttccgattcatcagacgttctgcctctgatacgatagaagtaataatttccttacaggacaattcatcctgtatcattccggcaatctgacctgccatcagacttccatttaccacatcgccgtccatcactgctttgcggagggaaccaagggtaagctgttctaattcatctaatgttgcgccttctttttccatcttcagatactcacggctcatcttattacggatgacacggattggatgtccggtactggaacctgttatttcagaatcaatgtctttggattttatcagcttctctttgtagtttgcatgtacgatagattctttagctgccacaaatcttgttcccatctgaactgcttctgcacccagcataaatgctgcagccattcctcttccatctgcaattcctccggctgcaatcaccggtgcatcaatggcatctgccacctgtggcaccaatgccatggttgtagtggaaccgatatggccaccagattccattccctctgccacaacagcatctgcgccaccgcggaccatgagttttgccatagctacacttgctactaccggaattactttaacacctgcttctttccagaggctcatgaatttggctggatttccggctcctgttgtgacaaccggaacctgctcctcaactaccacctttgccacttccggtgcattcggattcatcaacatgacatttacaccaaatggtttgctggtgcgttccttcaccttgcgaatctgctcccgaaccacttcaggtggagcactggctgcaccgataataccaagtccacctgcttcagatactgcagcagccagatgatattctgcaacccatgccattccgccctggataacaggctcttctattcctaacagttctgtgattcttgttttcatattttattcctcaacgccctttgcttttaagtagtcaataacatctcctacagttgcgattttctctaaatcttctgacggaatctctacaccgaattcttcttccatgctcataaccagttcaaacaagtctaaagaatctgctcctaaatcatccttgaaattggattctgcttttacctctccatcatagtttaactgctctttgattaattctgctaatttctctaacattattttgttctccttttttgtcttttctttgataatactttgagtcgcaaatattttgattgtcaaattatttgtaactcaaagtatatacataagcatttctgttgtcaactatatttttaccgactcgcgtaaactacgagaaacacgctttgcgtatttctcgagttatcgcggtgctcgccaaaatctgctgagaaaagaaattcgctcaggcaagcctggctctttcttttctctcagattttttctcgctactcgcgtaaaaaagacagtgtcggaacttttctgttctttcactgtcttatgttagttacttcttttattttttatcacttatgcagctttcttacgatttgatactacaaagtaaacacctactaataatactccgatgcataagaagaataccggattgataccgtcacctgtcttcggtgtgctgtccttctcatggctgcctgaagttactgtcttaccggaattgctgtacttggttgcgccaatcacatttccgccagtcactgctgtgcctccaccagttactgtagtagcggaaccacttccgttgttgctgttggaagtatctgttgaaccattgctattggaattatttccattatccggagtcggctgtggattctctcctccaaggctctggaaactgattccatttccggttgcatatacctgtgcctgtgttcctgaataaccggaaattgtggatggactccagctgctctggcttccgattgacgttacacttgccggaatcaaaattgtactgatactgctgccgctgaacgcatctgtttcaatggtattaacagaatccggaaccgtcagcgaagtaaccgacttgcagtttgcaaaagcacctgctccgatggttacagtactggtcgcaatttttgcaccggattttccctccggacaacggattaacctggtcattgctttgttataaaggcatccgtcactggatgcatatgtaccatttcctgatgcagcactgatggatgccagtctgctgcagccggtaaatacattgcttccgatgctggaaacgccagccggaattgtaattccggttaaagacgtacaatcataaaatgctttatccccgatgcttcctacggattccggaattgtaaactgggataatgaactgcactctgcaaatgcctgggaaccaatggatgaaattgaagttccaatagatacactggtaaggcttgtacagttataaaatgtctctgccggaatagaaccgatatctccttctatgctgacagaaccaaggcttgtacagttatagaaaactgcggttcccattccagtcacataagatggaatcgttacacttgtaatggatgtattggatgcaaatacaccacttgcaattgtagataccgactctggaattgtaattgctccaccggctccgctgtaggcaaccagtgttccactgtcatctactgtaaatccattttcatctgttgtctcgtctgcccggactgtctgtcccggcatcactgccagcagcaaacatactgctgcaaaaatagaaaatccttttttcaatatctgcatctctcatctctcctagctttatctgcttgatacattatacttcttatctgcttactgtacacgctttgccagtataaacattcttccgtcctgtgtataattattgcaggtagaaagagtcagcagctggtctccataagtactgtctatctctgtgccatatacagaaagctgtgccacattatttaaatattcctgatattcttcttcggaatctgcattcagaaaattataataccggaatacattttcatcctgatactggacctccgataatcccacttcaatgacttcatagactcctctttcataaagagtattaaattctatcgtcttatgggcattgtagaaatcttcgtccagatatttctttaattcgccaaacatcattccgcttttcatattatgtccgtaaatgatgatattggtatccctgtttatgtaatcatttctggcatcgataaaaagggtgccattcaggtcgtcatttttatcaaaatcatgtttcagataataatccggttcttcctgcgaagactgcatgaccggataatcaatatccgtatccggaatatgtaaccatccgattaattccggattttccgcatacagggaaacataatcctctaacataatcagtggctgctctgttgtctctcctgtttcagttgcatcttctgtgatttccggattcatctgctccgttcctgttacaaggtgctctactacattattctgtttcttattctgtaaatccttaagcctgttagcagctttataatccgcatattccgaaatcgcataatatccgatacaggctgtcgcaacaatgatgcatacgatgccgaccaccttctgccaggtaaaatgaaatggcagctttgcttctgcttccgcttcttccttggcaattttttcttctatcatgttctgcgaactatccgcaacaatatctgaaatgcaccagaagaacgattttccgatttcacttttaaaacggattttcttcgtgcgcatcatggtatacaaccggattgctacttccggatcataaatatccagttcatcggtaatatacttgattttctttaaatcttcctgcgcctgcctgtattcccttaaggtttcgaattcataatcacctattttataaatcttttcatccataatttatgattcatctgccttatcttctcatggtccaggtagttttattataggtcattttgtcatctttcgcaagatttttccgcaagatatacacaatgtaccacttcttatttttatatcgtctatatcttgcgctttctttagtctaaattggatttttccagaaaataacggaacatctgctccgctgcttccttatgttcggagccaagggcaataccaagaatacattccttttcataataaccgtgttcaaccggccagcttccggctccaagacggatgcctgctacaaaagtatctccggtgtccttatcctctacatagaagatataatcctttaactgttccagctcgtctttggaaaagtactgcgccaaatctgctatggcaccggactgggcaagattttcaaaaaccatttcatcggcacccaaaacatctactccaccgcctgcaatcactgtctgcagggactgataggaatagagattactggtatctgtgctggttaaatccacataatatgcatcatttaccacaacctcctgggctgctgtatcatacccatattgctccatgaattctgagaaatccggttcttcatctgccggcatactctttgcatttactaatacaatctgggaaatatcttcctttgtggtcatataatgatgtaccgtcataccaatcaaaataatcactgcaactactgccagtattacaagtctgtaatagtcccagacaaatccgatccgctgtttccaggtcattgtctttaaatcagctttcttttccatattatcgcctttcttcctctgccggagctgtattatctcctgtagtgtcattttctatggtgtcattctctgccgcattaccctctgtcacatctgtgccactctccgcatcagcatcattgcctgtaccaagaggtgccacaaaatctgcatacggtaattctttatgtaaattttccatataatcataccagatttctcccggatagctggctcctgtcagtcctggaagttctgccggaatatcatatccaacccagacgctggtggtgtaatactttgtatagcctacaaaccagccatccttattggaattggtggttcctgttttcgctgcactggcagtctcggacaatgccattccctttgctgttccttgtgtcagaacaccctctaatatattggtcatccaacgggctgcattggttttataaacctgcttttcatcgacaattttctgatagatagcgtttccgtctgcatcctgtatctctacaatgcaggtaggctcccggtattttccatcattttctatggtggcataagccgccgccatttctaccggagagactccattggtaaatccacccagggatgcggcaggtctttcatcctccggggacagctttgcgaaattcatctccttcagataggaaattcctgtaacgggagtcatctcttctaaaagattccacgccactgtattaatggaattttctactgcataacgcaaggttacgctgccaagatacctgccactggcattttccggtccatcctcaatcggtgcatcttccaccacagtatccggggtatagccccgctccaacgccggtgtgtatacaatcaacggtttgatggcactgcccggctgccggtaactctgataggcgcggtttagcatatgcccgtcatattcctgacttctgccacctacgattgcctttacaaaaccggtctcattgtcaatgcatactgccgcactctgcaatgtataaatgccctcttcattgacatcggtaaaatcctgcaacttctcatccactgcattctgaagctgctcttccatatttaaatcaatggaagtatagattctatagcctcctgtataaagagactgttcgcaggttttatactgctcctgataggcatcttcataggtctttcgatcttcctccgaagaaaaatctgtccggaattcaaagccctgctgctccatcaatgcccgtgttgcacaatagcaggcataggtctctactgcatcataacgctttgttggctctgctgtgctgagtacaatcgtttcctgtctggcatccttatattccctgcggctgattttgccatcctcatacatgttttttaaaatgcggtcacgtcttcctaacgtattatccgggttcttataaggattatacatcgtcggattattcggtatcgcacaaagatatgccatctgggacaatgacaaaaacgaaacatctgtatcaaaatatccccggctcgccgcctgaatgccataatatccatttccaaaataaatattattaagataaaactctaagatttcatccttggtatatttcttttccagctctgtggcaatgaatatttcttccatttttcgctgccacgttctgtcattatttaagaaaatggttcttgcaagctgctgcgtaatggtacttccgccctgggttacttctccgttacgcaccattgcccagactgcacggataattgccttaaaatcgattccgccatgactgtaaaattttttatcttcaatactgaccatagcttctttgacttcttccggtatctcatcactggtcagatagcttacatccttggtgccacgaagtgacatgattctcgttccattcacatcataaacctggctggtctgctccgcccgaaatgtgtccttcgtcgactcttttacaaaccggactgcctcttcatgcatggcactgacctgactggcatacccgccaaaatagtaatacgccagcccgccgattaccagaagtatcagaactatctgcagctttacaaaaagccagaaaccacggtatttcttttttctttttttcttctctttatgggacatgggattcctccatattgctctattttacactgttccataaaaagttacaaggctactgttccatttgtcttcctaaaaatcccgccgctgtaatagcaagcttgctttcggtttctcccatttttacagtttcatttttctcatataaaacaactgctccgatggcatctccttcacagataatcgtgctgattgcctggtcatgatagttcccggtatcatctaaggtaattcgtacaaatttgctgtctccctgctgtgcaagaatatttttccggtcttcgatcagttcctctaactgcctgctgattggctttccttcgaattccttctttccgtttcctgcagccgcaatcacatggtccctgtcggtaatacataccagatgcccagtgctctgtgccaggctctccgcatactgtccggcaaactggctcagttctccaatcggagaatatttcttaagaatgatttcaccttcccggtctgtaaaaatttccagtgggtcaccttcccggattcgcagtgtcctgcggatttcctttggcactacaactctccccaaatcatctattctacgtacaattcctgttgctttcattaaaaattcctcctgtttcctacatactttccatttttgtgctgtatgggtagtatgtggaaaacaggaggaattatgcaaaccttcctcgtatttacatttttaaatcactggtgtttttattagccaaaatcaatcttttttcatttttggctaatagttcatttatccaataaccaatccgcaatatcgactatcttgattccctcatattgatatgcatcatgtctcgttctggcaataacatacttagggtatgcatctttaatctgcagtagtggtgatacctctctttcaaaagtcttatcatcacttatgttatcagatacctgaatataaattttttcgctacgtttaattgcaacaaaatctatttcctttttatacaatattcccacgtaaacctcatatcccctacgaagtagctcaattgccacaatattttcaagtattcgaccataatccatgttttttgttccaagttttgcataacgaaaagtatggtcactcagatagtatttatcattgctcgacaaatatttttttcctttaatgtcataccttcttactttataaaatgcgaatgcgttgcacaaatactgcatataagagcctacagtcgtatgatgaattttttcatgcatacttcctaatgtatttgtaatactacgggcagatgacaaatttgaaatattatccattaaaaagtccacaattctatccataagctgcacattccgtattttgtatttttttctgatatcccgtataatcagagtatcaaatacatcagccacataatcaaatttagcttcct

SEQ ID NO: 227 - DNA, 32987 bp, unidentified
  source 1..32987: mol_type = unassigned DNA
  misc_difference 1033: note = a, c, g, or t
  misc_difference 1034: note = a, c, g, or t
  misc_difference 1035: note = a, c, g, or t
  misc_difference 1036: note = a, c, g, or t
  misc_difference 1037: note = a, c, g, or t
  misc_difference 1038: note = a, c, g, or t
  misc_difference 1039: note = a, c, g, or t
  misc_difference 1040: note = a, c, g, or t
  misc_difference 1041: note = a, c, g, or t
  misc_difference 1042: note = a, c, g, or t
ggcgacaatgagagcatgagcatcagcaaccagaaactcatgctccgggactttgcagaaaagcatgggatgttccagtatgagtattatgtggatgacggctatacgggccgcaatttcaaccgccctgccttccagcgcatgatcgctgacattgaggcggggaaaatcggctgcgtcatcacgaaagacctatccagacttggtaggaactatatcgaagctggaagctatatcgaaatctttttcccaaaacacaatgtacgctatatcgccatcacggacggcgtggacagcctgacccgtcaggaaatggacatcacgccctttaagaatatcctgaatgacatgtacagccgggatatttccaaaaaggtgctggcgggacgcatgacccgttcccggcagggaaagttctgcggcggacaaccgcctcttggcctgatgcgtgacccggaggacaaagggcatctcatccttgacccggatactgcgccggttatccgaaaaatctatgatatggcactggatggctggggctgtatgcggattgcaaagcagctcatggatgataaaattcctattaccagagtaaagagtaatacagaatgtgacgtgaattactattcatggggaagtgcgaggatcagccatatcctgcggaatcccttttataagggcgcacatcttgtctgccggacacatcagaaaggcatccgctccaatacctatgacattatcccccgtgaggactgggaagtgattgagggctgccacgaagcgattgtgacaccggaggaatgggaacaggtgcaggaaatcattgaccgcagaccaaccattatgaaaggcaacgcctgccccttctataatctgttccacgggcttgtctactgcgccacctgtgggaagtctatgcaggtgcggtatgaaaaggtcggcagaaccggcaaaaaccgtttcaccggcgagatgcgagagccgattgacaaggcatactatatctgccagacttacaaccggctgggcaagnnnnnnnnnncagccacaagattgaagcaagggatttatataatctggtgctgaaggatatacaggaactggcggtgcaggccatgaaggacgctgatgcgttttaccagcggctcagcagccggatggagcgccggtatctggtggacgcttcccagacagagaaggaacggaaacggctggaagcccggaatcaggaaattgacggaatgtttttaaacctgtacaccgataaggccaaaggcatcctgactgaacagcggtttatgaagctgacggcggcgctggaacaggagcaggaagccaaccagaagcgcctgcacgatctggcggtgatgcagagccgggcggacgcacaggaaagcgaagtccgaacctttatcaaggaaatccggcgctatgccgccattgaggaactggacgagtccgtactgaaccggcttatcagcaaaatcctgatcggcgagatcaaaaaggtggacggccagaaggtgcaggaggtcaggatcggttataactttgtcggggaaatcccggagattgcagcgtaaatagtttgccccatctctcaaccattgagggatggggcttttgttgtggataaagcgatttgtctgaacgatagtattatcccatataatccgttcgcagtgcttctaccagatcacatttcagaattttcttgccacccaggtaatatgccagtgcaacaaagccaaaaagtgccacgataaaaagcaggataggaacaatgggagccactgctaaaaattccattggattcaggtagcttgccgttatcatcaaccacacaaacacaacagtaatcggcagcgtgatcagaaccgggcggcctgcgatgacgagggcctcgatccaaaacatttttcgcataccttccggtgtcatgccgatggacatatatctcgcaaattctctttttctttgccggataaatcccaacgtgttggaaaacacattggcaatcccgatgaaggccagcagcacacacagcgctccaacgaccagtttgtatccgttcagcatagcatcgttgtccagcttttcctgaactcgattttccatctcgaaagaaatgtcgtgtcccagcacattcttcagttcaacctcaatcgtgctcagttctgtcagggttctttctttttctgaaagaatgcgaatataagtgtctggttccgcatttccaatcgtttcctcgatttgttcccaggtggaaagtgacacaaattgaactaaggcatagttatcatattcttctcttaaaaccggcggctcttgcgtaaaacccaaaactgggattgtcacagtcgcagccgtgtctccctggctctgcaaaatcatcgtgtcctggttttctgataaaaaaggaacgtattccttgtacctgaaattgctatgtatgttatcccaaatacggttaagaacaacacttccattctcagttgaagaaacgccgatctgttcacagtacatggcaaaactgctatcatccataattacaatgggagcctgaatggtataaatcccatccgctatacggacatcgctttctgcgattgcttcaagacctcccaggctttttacttcttcgctgacagagtccaccggaacagagcaaacagcatttgccttttgatagattatgctatctgtatcagccaatgcatggatttcatccgtataagcaaagtcctcgatctttgtgtcctcaagtgttgccatcacatcccaggcattctgatagcgttcaaagtaggtatggtttgtactaatcccagatagcgtaaaaaagctcagcattaacgcgaagcccaaaaaagaaagagttaacgacaacgtagcggttcgcagagatttcttctgtgctttcagcgcatttccggcaagctctccttcggtcccaaataaaagcgcaagaatacgggacttttttctccgttttaactgcaattcccccgtattttttatagcttccagcggggtcattttgcttaatttccgagccggcagccaggcagaaatcagcaccgtcaaaaacgagacaagaatggtgagggcaaacacgagtggatgatagataaaggtagcctcatgtctgccgacaataccatctgcgagaacattgacagcttggatggctccaaacgtcaaagcaattccaataaaacttccgagtaaaataggaatcacacaaagtatcgccgcttcctgtaagaggcaggtacgaatttgccccggtgtcgccccaatgctggagaaaatgccaaattgatgtacacgggcattcatagatactgcaaaggagttatgaatgattaaaatcaaagacactgacactagaaggagtacaaaaagataaaaagccatcaataagggtggcgtgctatcctgcggatcgttgatgaaataacttgacaacagcgattcatgataggatacggaagtttcaggaacgcctacctgctgggcgataagaggcatatcctgatatacagccttcatgtcatcaaagcaaatatcaacgacaagcgtttgctcgtcagataaatcttcattgatttctgccgtttttacattggcaaaattttcgatctcagacactacatcttcttcaaatgccccggtaatacgtccttgccaggttccttcttctaaaataacggattctacctcataattccagaagttataaaatagaccgcacagtaaagacaaaaacaaagcggaaataaaagctgcgaccagaacggatatgctggaagcccgattcttttttataaatcctatcgaatagtctttccacatatccttacctccgtttctgatcgctgatgatttttccatcctctatggtgataatgcgatccgcttccaacgcaattttttcatcatgggtgatcaaaagaatggtctgatccaaattgcggttggacaatttcagcaagtcaataatttcctctccgtttttccgatccagattgccggttggttcatcggcaagcaggatggcagggcgataaatcaaagaacgagcgatagcaactcgctgctgttgtccaccggaaagctgactgggcagtgattccagtttatcttcaattcccagggaatgtacaatctgctcaaagtattcctgattgggtttgcgcttgtctaacaggagcggcatgagaatgttttttcggacggtaagggtggggataaggttataaaactgatagaccaacccgactttcctacgccggaaaatggctgcctgtgttcggttcatggcagatagttctgtcccctctatcaggactttcccttctgtcggcttatccacacttcccaaaatatgaagtaaggtggattttcctgaacccgacgcccctacgatggcaacaaattctcctttttgtacggacaggtcaatatgatccagtgcaacaacctgattgtttcctgcaccatatacttttcggacgttttcacatcttaatatttccatgtcactttctcctttctaccggatggttttgcatacagtatagcaaagtaaagtgacatctcagtgactgtatatccttatttcaaagcaagcaccgccgttttgcaaattgtaagcggttatagttccgttctgtaattcaaaaatggaacgggtaagagccaggccaattccaatgccattggatgctgcacgccggccccggtaaaaacgatcaaaaagatgcggtaagtcttctgtgtcaaagcccgccccgtcatcccatacccgaatttctacatagagaggattgcctgcatagtcacaatggacgattccgcccggtttagaatattccatacagttttttatgagattgatgagggcttccattgtccactctaaatcccccccaaaattcaatacagccattttctggaatgtcaacagtaatatgatttttccgcaacagatcgttcagattatctgccgccagatttaacaccgtataaagatcgaccttttcccgcttaagcggcagcgttccagcatcaattttggaaagcatgagcaaggattcttccagacggtttaatcgcttcaactgctgtttaacctgttctgcgtaagcccccggaatctctttttccataagctgcaacgataaaaatgccgctgtgatcggtgttttcagttggtgcgcaatattagccaggttctctgcaaaatttttctttgcggcgactgccgtttctcttgtttgataaagcatcgtgacagttttgtatatctcgtcctgcaaatgagaatattcatcttccttcgcttgtatcaatgtcccgccagcaccgatattgacttgttccaaatactcggtcaaatcatcgattcgctttcgattttttctgcgggacagaaagatcccagccccaaaagcacaagcggtcacaaggaaaaatagaatcggaaaaagcacggtatccggtgggaaatcatagcaaaaatcatcggcccggtatccgtattttcccagataatcgttgcctctgagttcttgttcagtcaatgaatgatagtctttcagagccgctaatagctgcggctcggcttcaggagaatttgccaatatggtttcgcataatgccgaagtgtgttcaaatgcaatctgccggtatgtgtgcaggaagaaagcggtggtaagcatcatgcctgccgcaagaacagcaaacggaaaaatcagaagtattttttgtttccatttttcgctcattgtgtgtcctccatacggtagccaaaacttcggatcgtttttaagcaggctggatgattcagcttttcccgcagtcttttcatggtgaccgtcagcgtattatcatttacatagttcccgctgcgatcccaaacttgctctaataactggtttctggtaatcgtttttcccttgttttccatcaggatcaggagaatccggtactccggctggctgacaacgatttctttctgcccattataaacagccgttttctctttatccaacatcaagtcatcgcagaatagttttgtgtgggttacgccctcggttctccgcagcagagctaaaatacgcgaatacagaacagcaagatcaaagggttttaccacataatcatccgccccattttggaagcccgtaacaatatcatgggaatcaccgcgaaccgtcaaatagacaatagggagggttatccatctttcccgaatccaaaggcacaattcactaccttgtccgtccggcatattccagtccaacaaaacgatcgtaggcaaatgaccgatcaatgctttcttgacatcggcaatcctatcaaaaacagtcactttgcaattctgctgctccaaatattcttttacagacttgccaatcgtttcgtcatcttccgcataataaacttcaatcatgatgttctcctcctgattgcccggcagcttttcttcgtccgtctaatggctttgttgcatttttcgggataagccaaacggttcccattttttccgctcctgggatacgtcctgcggaacagtaataatttatccaacggggtgttactccccaaattttatttgcttctttcaaagtcatgtaatccatactgcacctccatattgtcatattataattcgtactctcgaatagtacaagttaagcagtatgagtcaggctgaaaaattatcagaatggtagccacaaagataaattctttgaaattggctaccttttttaattcaccacttgacattgtggcaaagatattatttggtatggaaataaaaaattagtatgataattatattttaatttatttaattcccaatcattatcttatataatttttctatagatagagcgaaattgcttataggaggccattatgaaaaaagatctacttatgacaattcaatataaagatatgggccctttttcgctttttattttttaatttgaaacatatcttttctaagatatgttttttttacaatcaaaaggaggattaaagatgccaaaaagagaagacattaacacagtattagtcattggttcaggaccgattattattggtcaagcatgtgaatttgattattcaggaacacaagcttgtaaagcattaagaggattagggtataaaattgttttagtcaattctaacccagctacaattatgacagatccagaaactgcagatgtgacatatattgaaccattgaatgtagaaagattaacacaaatcattgaaaaagaaagaccagatgctttacttcctaacttaggtggacaatcagctttaaatctatgttctgaattaagtaatgccggagttttagacgaatataacgttcaagtattaggggtaaaagtagatgctattgaacgtggagaagaccgtttagaattcaaaaaagctatgaatgaacttggtattgaaatggcaagaagtgaaattgcaaatacggttgacgaagctttagctattgctgataaattaggatatccagtagttgtaagacctgcctatacaatgggtggagcaggtggaggacttgtttacaatgttgatgaattaaaaacagttgtaaatagagggttgcaagcaagtttagtacaccaatgcttaattgaagaatctattttaggatgggaagaattagaattagaagttgtaagagatgctaaaaataacatgattacaatttgttttattgaaaatattgatccattaggagtacatactggagattctttctgtagtgcaccaatgcttacaatttcaaaagaagtgcaaaatcgtttacaagaacaagcttatcgtattgttgaatcaattggagttattggaggtacaaatgttcaattcgctcatgatccagtaacagatcgtattgttgttattgaaatcaatccaagaacatcacgttcatctgctttagcttctaaagcgacaggtttccctattgctttaatttcagcaatgttagcggctggacttacattagatgagattccatgtggtaaatatggaacgttagataaatattatcctgatggggattatgttgttattaagtttgcacgttgggcttttgaaaaattcaaaggagcagaagataaacttggtacacaaatgaaagctgttggggaagttatgagtattggtaaaacttataaagaagcttttcaaaaagcaattcgttctttagaaacaggacgttatggtttaggatatgcaaagaactttaatgatttatctaaagatgaattattaaaattattaattaatccaacaagtgaaagacaattcattatgtatgaagctttaagaaaaggagctactgttaatgaattatttgaacttacaaaaattaaacattatttcattgaacaaatgaaagaactcgttgaagaagaagaaaaaattgcttcttataaaggaaatcaattaccagatgacgttttaaaacaagcaaagaaagatggatttgctgataaatatatttctaagttattagatgttgaagaaaaagaaattagaaatcaaagacttgctatgggtatgcatcaagtctgggaaccagttcatgtatcaagtacaaaagatagttcttattattactctacatataatggaaaagatcaagatgaagtatcaaataataaaaaaatcatgatcttaggtggaggacctaacagaattggtcaaggtattgaatttgattattgctgtgttcatgcttctcttgccttaaagaaattaggatttgaaacaattattgtaaactgtaacccagaaacagtttcaacagattatgatacatctgataaactttattttgaaccattaacattagaagatgttttaagtattcatgaaaaagaaaaaccattaggagtcattgctcaatttggtggacaaacaccattaaatcttgcaagtcaattaaaagaaaatggtgtaaatatcttaggaacaacacctgaaacaattgatatggcagaagatcgtgacttatttaatgaaatgatggaaaaattagaaattccaatgcctgaatcaggaatggctgtaacaatcgatgacgctttagaaatcgctcaaagaattggttatccattaatggtaagaccatcttacgtattaggtggtagaggtatggaagttgtttacgatgatgattcattaaaacaatatatggcagctgctgttggggtaacacctgatcgtcctatcttaattgaccgtttcttaaatgatgcgatggaatgtgaagcggatgctatttctgatggagaaaatgtttttgtgcctgctgttatggaacatattgaacttgctggtattcactcaggggactcagcatgtattttaccatctaaacatattccagtaagacatgtacaaacaataaaagaatatactaagaaaattgctagagaaatgaatgtacgtggtttaatgaatatgcaatatgcgattgctgatgataaagtttatgttttagaagcaaatccacgtgcttcaagaacagtacctttagtatctaaagtatgtaacatcaacatggtaaaacttgcaacagatatcgttacgcgtgaacttacaggtagaccatcacctgttaaagatttaaaagatagaaagattcctcatattggtgtaaaacaagctgttttcccattcaatatgttccctgaagttgatccaattctagggcctgaaatgagatcaacaggagaagtattaggtttagctaattcttatggagctgctatctttaaagctgaagaagctactcaaacaaaattaccaacatctggtcgtgttttaatttctgtctctgatagagataaaaaagatgttgttgctcttgctagaaaatattatgatgcaggatttgaaattgtggctacaggtaaaacatttgaattaatcaatagcaataacattccagctatcaaaattaaaaagatcaaagaaggtcgtccaaatattgcagatgctcttacaaatggtgaacttgatatggtaatcaatacgccacatggtaaagaatctgcacatgatgatagttatattagaaaaacagctattaaaatgaaaattccatacatgacaaacattgctgctgcaaatgcagctgtagaaggtatcttagaagctgaaattcatggaacacatgaagtaaaatcacttcaagaatatcataaagcaattaaagattaatatgaatgattgttaggaagtcataagatttcctaacaatttttttatttttacaaaaaagaagaaaaaataaaaaaagagcgaataaataagtaggaggactacttatggaaacaatcaataaaataacaacgagtaaacaaacaacaatgtatgatcatttatgtaagatgatcataggaaatgaagaagaatcataaaggcagctgtagatgaagcaaatcatttaaatgttgaagaaattagaagactaataaaaggagtacatataggtgatctaatagttaatccacattttcatcttgtagataaaaagggcttcatcaaagatgaaggtatggtttattatgatattttatgttatattgatgtaccacaagaagatggaaagaatatacgggtttatttatatgtagaaatacaaaataatccttatccaggatattctattattaccagaggatatgcttatatttcaagaatagtatcagagcaatggggaagcgaatatgatgataaaaactatgatgggatgaagaaggtctattcattatggatcatgccaaaagcaccaaaaagaaaagatgggtatatgaatgtctatgaaacaaatgaaaggattatttgtggaacgacagtagaagaaaaagaaatttatgacaagggagtaattcttgcgatatacttaaacaaagaacatgatgaattgttgacaccattgacggtccttctaaataatgtattagattataagggaaagcaaagaattatagaagaatatggcttgaatacaaagaaaatagaaagtgaggttaaagatatgtgtgatttaggtaaaagcattgtcttagaagcaagaaatgaaggcaaacaaatagaacgtaaagaaaagaatatagcgcatgtaaaaaaactaatgataggattataaatgtcatttaaagaagcgattaacttattagaaatacctgaaaaggaagtaaaagaaatagaaaagtattttcaatcatagaaagagagtaaaatctcttttttcttatactaaaaaatgttaataaaataaaattacataataataaaaaattataaattggtgttgaaaaatgttgtcaaatctactatactattcaagaacaaaaggagatgagggctatgttacaacaaagtgtcaaatatgattgcttacaattgaatacgagtacctcatttttatattctcattgtttctaacatatcatttttaattgatatgtttttttataacaaaaaaaggaggaaaatatatgaaagcctatttaatcttagaagatggaaacgtatttgaaggtgaaagcgtaggagctgataaagaagttgtcagtgaatttgtatttaatacttctatgacaggatatgtagaagtactgacagatccttcctatgcaggacaatcagttgttatgacatatccattgattggaaactatggagtatgtttagaagatcaagaatctacaaaaccttatgttgaaggatttgttgtaaatgaacttgcaagacttggaagtaactttagaaaaaatgttgatttaaaagattatttaattgaacatgatattccttgtattcaaggaattgatacaagacatttaactaaaattattagaaataaaggttgtatgaatggaatgattacaacaacaaaatatgatgatttaagtgaagtgatggaaaaaatacataactttaaagtaactggtgtcgttgaaagaacaacatgtgacaaaccttatacagtaggtagtggagatcgaaaagttgctttattagattttggtgctaagaagaatattgctaaatcacttgcaaagagaaatatagaagtcacagtttatccagcatctactcctgcaagtacaatcattgaaggaaactatgatggagtgatgttatcaaatggtcctggagatccaagtgaaaatgttgaaatcattaaagaagttaaaaaactatctgaaagtggtttaccaatctttgcaatctgtttaggacatcaattgatggctttagctcatggttttaaaacagaaaaattaaaatatggacaccatggtgcaaatcatcctgttaaagatttaaatacaggtcgtgtttatatttctacacaaaatcataactatgtaatttgtgatgattctattgatcgaaatatcgcaaaaccttggtttattaatgtaaatgaccaaacaattgaaggtgttgaatatattggtaaaaatattaaaacagtacaatttcatccagaagcatgtgctggtccattagatacagatgctttatttgatgaatttgaaaaaatgatggagggtaaataagatggcaagagatttaagtataaaaaaagtattagttatcggttcagggcctatcatcattggtcaagcagcagaattcgattatgctggaacacaagcatgtcgtgctttaagagaagaaggggtagaagttgttttaattaactcaaacccagcaactatcatgacagatgctgatatcgcagataaagtttatatcgaaccattaactgtacctgttgttaaaaaattaatcatggaagaaaaaccagatagcattttaccaacattaggtggacaaaatgcattaaacatcgctatggctttagcggatgaaggattcttagaagaacacaatgttcgtacaattgggacaaatacagataccatcaaacttgcagaagatcgtttagaatttaaaaacttaatggaaagaattaacgaaccatgtgctgcatccatcgttgttaaccatgtgaatgacgctttagaattcgccgaaaaaattggttatccagttgttgtaagacctgcttatactttaggtggtactggtggaggtatcgcaaataatgaaaaagaacttcatgatatttgttcaaatggtttacgtctatcaagagtaagtcaatgtttaattgaaagatgtattgctggatggaaagaaatcgagtatgaagtaatgagagatagtgcaggaaactgcattactgtatgtaacatggaaaacttagatcctgttggtgttcatacaggagatagtattgttgtggcaccaagccaaactttatcagataaagaatatcaaatgttacgttcatcagctttaaatatcattacagcattaaatattgaaggtggatgtaacgtacaatatgcattaaatccaaatagctttgaatattgtgttatcgaagtaaacccacgtgtttctcgttcatcagctttagcttctaaagcaacaggttatccaattgctaaattagcggctaaaattgctttaggatataccttagatgaaatcaaaaatgccgttacaggtaaaacatacgcttcttatgaaccaacattagactatgttgtatgtaaaattcctaaatggccatttgataaattcgttgatgcttcaagaaaattaggaacacaaatgaaagcaactggagaagttatgtcaatctgtaataactttgaaggagctttaatgaaagctttacgttctcttgaacaaaatgttttctacttacatttagatgcctttacaaaattaacacatgatgaattaaaacaaaaattaaaagatgttgatgatcaacgtatctttgcagtagctgaatccttaagaaaaggaattactgaacaagaaatccatgaaattactaaaattgatgtttggttcattgataaaatcaaacatttagtagaaatggaagaaagaattaaaacagaagaattaacagttgatttattaaaacaagcaaaaagattacaattcccagatagagtcattgctgaattaactggaaaaacagaacaagaaattcatcaaatgcgtaaagaaaataatattgtttcagcttataaagttgttgatacatgtgcggcagaatttgatgcacaaacaccttattactattcaattcaaggtggagtgaacgaagtagaacctcaaagagaaaagaaaaaaatcatggttttaggatcaggaccaattcgtataggacaaggtatcgaattcgattactgttcggtacattgtgtatgggccttaaaagcagcaggatacgatacaattattgttaataacaaccctgaaacagtatcaactgactttgatattgcagatcgtttatattttgaaccattaactgctgaagatgtagaaagcattgttgatattgaaaaaccagatggagccatcgtgcaatttgggggacaaacagccattaaacttacaaaagctttaacagatatgggtgttaaaatcttaggaacagatgctgatgatgtagatgcagctgaagatagagaaagatttgatgaaattcttgaaaaatgtcatattgaccgtccaagaggttcaacagtctttacaacagaagaagccattgaagttgctaataaattaggatatccagttttagtaagaccatcttatgtattaggtggtgctggtatggaaattgccttaaatgatggtgatattaaaaagttcatgaaaatcattaatagacaataccaagaacatccaatcttaattgataaatacttatctggtaaagaagttgaagttgatgcagtttgtgatggacatggtatcttaattccaggtattatggaacacgttgaacgtgcgggagttcactctggagatagtatttctgtttacccaccacaaaaaatcaaacaagaaattaaagatgttatcgttgattatacaaaacgtcttgctaaagcattacatgttgtgggattaatcaatattcaattcattgtttatgaagatcaagtttatgttattgaagttaacccaagatcttcaagaacaattccttatatttcaaaagttacagatatcccaattgttgccattgctacaaaagcaattatgggacatacaattgaagaacaaggatattcttatggaattgttccggaaaaagaaacaattgcagttaaaatgccagtgttctcatttgaaaaaatcaaaggtgcagaaatttctttaggacctgaaatgaaatcaacaggtgaagttttaggtatttctaaaaacttagatgaagctatttataaagcattcatgggaacaggtattcaattacctaagagaaagaatatcatttgtacaattaaagattcttctaaagaagaattcttaccaatcgctaaacaatattatatgtttggttatgatttatatgcaacagaaggaacatataaattcttaaaagaacatgacgtacctgtacattttgtcaatcgtatctgtgaaaaaacaaatacaatctttgacttaatgtttacggatacagttgatttagtaatcgatattccaacaagaaatgataacttaaaagatggcttcttaattagacgttttgccgtagaagcaggtattccaatttatacgtcacttgatacagcaaaagcacttattgattcacttgaaaaacgtaaacaaggtgtaccatcattaattgatattacaaaattaagataaaactaaaaagaacaatgtagtaatactaaagcattgttcttttttatatgaaaaattaggttatatcttattggatataacctaattctttacatgcgtaataaataccatcttcatcaatagaagttgtcacaaaatcacttaatctctttaaatcactatttccttgtcccatacaaatagaaaacgatgcatgcttaaacatttcaacatcatttaaagaatcaccaaaagcgacataattatctatattccataacttcataaaataagcaatacctgttgctttagaaatgcctttgattgtaatatctgcataactactttcaccaaccattacatctaattcatcaatagctttaaattcttgataatcatatcctaaaggaccataggcaatcatggcacctacttcttgatttgtatatgtacctacagttggaatagggttattgaaataattacatgagcgaataacatcttcatttggttccatattaataattcttggtgtacatttaagtgctaaaggaatgttatgttttttagaagcttctagagcttttaaaaccacttctcgagaaagattttctttgtgaattaaatttaaatctttatctaataaagcttgtccactattacatacatagccatcaaaagaaaaagtatcataaatatgtgtattttttaaagaatccacacttcttcctgttgaaactagtaaaagatgtcctttttctcttaataagtttaaagctttaacagtgctttctggtacttgatgatctgtggttgttcttaaagtaccatcaatatcaaaacaaaacaatttcttcattatttaccttgagggaaaaatcttgcaagtgaatttgcgactgctgaaataggcattgtttgaaccacaattttaccagggccagtaaccactgtattaaataatccctctcctcctaaaaatttattttttaaaccaggaactgattggatatccattttacaagtagcatccatcattgcaagataaccggtatcaataaccatttgttgacctggtagtaaattatattctacggtacttccatcaatttcaataaaacatgttccgtgtcctgaaatctttgttaaaataaaaccttcaccaccaaatataccagaagaaaatttcttattaaagcaaaccgatgtttctacattttcttcactagctagaaaagcagatttttgaatgatgacttcttttccaggttctacatcaatagcgacaatttttccagggaaacttgaggcaaaggcaatcaaaccatctttgtttgccgtataactatttctaaataaagtttcaccagaaaacattctaccgatgattttaccagcaccaccaccatttgtttccattttcatacatggatccatccaagccatagcaccactatcactaatcattttttcacctttatttaaatgacaaataacaacagggagagtatctccaacaatttcgtatttcataatttttctccttttataaagccacacaaacaggttgaataatatctaaggtatttcctgtaggcttaatttcttctttttcttcatcaaatgtgtaaagctccaaacgatcatcttcttgactagcaacaacaatataacgatcatcaataatattaaaatcacgaggtccttttccagtatgcaccatataaagtaaagtgatttttccagtttcttgattcacacgataaaggacaatactatcatgacctctattagaaacaataatatgtttaccacttgatgtcatatgaatagcagcagcacttgaaaagccatggaaatgacgaggtacacaatgaataacttgaatcaaagtaaagtgtccatcttcatattgataaaccataatactatttgcaatttcgttaacaagataacaatatttaccatcatgagaaaaaatcatatgacgaggcccactaccaggaatcacagattgacttaatgatgtttcttgtaatttttcattaataaattcatacataataattttatcagcacctaggtcaacactgtaaagatatttatgatcaggagtaattcctacataatgagcatgaggacttgtttgtcttttaagtaaatcaattcctgaaccatgatggtgaacaactgaaagtttatctccaattttatgatcctttaaagggaaagcagctgttgctccaacgtgataatttgcagtaaataaatatttttgatcaggacttaaacataaatgagtataagaacgaccatgggaattataaaaagaaagttgttttaaatcatcttcttcaatatgataacttgcgatacctcctccttcaccaacacgtgcatcttttaaagatacataaagataatcatcttttttaataacataagaaggaaaatcttcggtaggaatatgtttatttaaatgaagttcatttttagtttcatctagagtacatacataaagacctttttcttttcctttagcgtaacttgatacataaaaacgatacacaaaatcgcctccttttgaaataattgtaccataaaataactataaaaaactttctatataagaaaaaaagagatgcatgaagcatctcaaaacattatttttgcccaatgcctttacaataagtttgaacaacttcataatctctatctaaaacaacaagatcagcatcataaccaacgccaattgttcctttacgatcatcaacatgtaaacatcttgctgggtttgatgtacatgcattgatcgcgtaattaacaggaactaaagcatcttcaattaagatttttaatcctttattcacatttaatgtagatcctgctaagttaccagcttctactaagtgtgcactaccatctggataaataacaacttcttgtccaccaaaatcaaatttagtacctacagggaatcctttacacattaaggaatctgtaatcataatactgtaatcaggaccttttgaagtaaagaaattatttaaagctgcaagagttgaatgatttccatcacaaataatttctccatacatatttctaatacgtaaagcaccaccaacaagaccatttgcacgatgcgtaaatggtgtcattgcattataaacatgagtcatacttcttgctccatgagcgtatgcttgaacagcttgttcataagttgcatttgaatgtccaatacttacgaccacattattttgactacaatattttgtaagagcgtaatcttcatcattttcaacagccatagtaatatatttaattaaaccatgagcagctttttgatatcttttaaattgttcaatattaggttttacacaatattcttcaggttgagctcctttatgtgctttatttaaataaggaccttcaaaatgaatacctaagatttctgcaccttcataaccttcttctacgacttttgcgacattacttaccgcgtttgtaagaacttcttcactttgagtaagagttgtcgcaaggaaagaagtaactccttcatcaacgattccttttgcccattttcttaatccttcaggattagcatcatttgtatcaaagccataagctccatggcaatgaatatcaataaagccaggaagaattcttaaatctccataatctttcgtaacttctttttcattgtaaggatatatttctttaataattccatcttctaattctaattgtgctggcgtgaattgatccgcaatccagacttttttactttgtataatcataatttcacctcatatttattatagaacactttacttatctagacaagaaacaactcctcttatttctaataaaaattcaatttaccttacctctaaattagtatataattagagtcataataaggaggaagaggatatggatgaaaatttacttttatcattaattgaaaacaacgcgaaaatggaagtcgttgatcttgcggccgccttaaacgaaacagaagaaaatgttgataagacaattaaagatttagaaaaaaataaaacaatctatggttatcatactttgatcaattgggataaaacaaatcacgatgtgtgtacagctgtgattcaagttaatgcgaaacctgaaagagattatggatatgatcgtattgcaaaaaaaatctataattttccagaagtagatacaatgtatttattagcgggaaattatgagtttttattaattgttaaaggaaaaacaatggtggaagttgctaaattcgttaatagtcgtttagcggttattgaaggtattgaaagaacagccacaatgtatgttttgaaacaatataaaaacatgggtaaacttgttgaggatgataataaagatgcagcagaaagattattggtaactccataatggattttgaaaaaattgtaaatcctattgtaaaggatattccaccaagtggaattcgtaaattttttgatttagctaatcaaatggaaggtgttatttctttaggggtaggtgaacctgattttgcaaccccttggacaattagagaagctgcaatctattcaattgaaaaaggaaaaacattctatactgcaaatcaaggattattagaattaagaaaagaaatttgtaaatatcaaaaaagaagatttaatttagattataaaccagaacaatgtattgtcactgttgggggatctgaaggaatcgatttagcctttagaacaattattaatccaggtgatgaagtcattttattacaaccaagttatgttgcttatacaccaggtgttgcacttgctggtggagtagtaagaaacattattttaactgaagaaaatgaatttaaattaacacctgaacttttaaaagaagctatcaatgaaaaaacaaaggccattcttttaaactatccaagtaatccaacaggtggatttatgacaaaagaagactatgaaaaattggtgcctatctttaaagaatcaggaattatgatcataactgatgaaatctatgcagaactttcttatgaacataaattctgttcaattgcatcttttgatgaaatcaaagatcaagttattttagtgagtggtttttcaaaagcttatgcgatgacaggatggcgtttaggttatgttcttgctaatgaatatcttattaaaatgatgaaaaagattcatcaatatgtcattatgtcagcaccaacatgtgctcaatatggtgccattgaagcaatgagacattgtgacgaagaaattgaaaaaatgcgacaagcttatcttgcaagaagaaatttcttagtcaaaacatttaatgaaatgggacttaaaacatttacaccacaaggggctttctatgttttcccatgcatcaaatcaacaggtttaacatcggaacaattctgtgaagaattattaaatgatcagttagtagcctgcgtgccaggaagtgcttttggtgaagctggagaaggttatattcgtgtttcttatgcctatagtttagaagaacttaaagcggcaacaaagaaaattagaaaattcttagaaaataagggagttatttaactccttttttttggttttaaaacagatacaaattaatcataaaaatcatcattttcctataatatagataaagaaaaggggatgattttaatggtagttaaaagttatgaacaaatgacagatgtatcaattatggaagtaaaaacatatttattaattcatagtgacggaatttatcaacaagatatttatgatttaatgaatacgtgtattgatgtttttcaattaaaaagaaaattaaataaaagaaaagatattcaattatggcttttttcaaatattaaaagatatattgattgtagtttatcttataatgaaatggaatatcatttagtcatgatgaatttattaatcaatcaacattttaaaccattagtcgaatataaatataatttattttattatattttagatcatagtgattttaatatagaaatttattgtctagtaaggcatttgcttacatttcaaatgaatcaactcaatcaagtcattttaggtatgacacattataaaatgatgagtgatgaacaaacacattatcaagcaagtcttattcttttattagaaaaacaatataaacaagcttattttcatttaccatttgttacaatagatgaatcatttaaacgctttgaaaaatctctttataattattcaccatcccgttatgaaatgttgtatcataaagataagacatattccacattgtatgctagataggagatcattatggatagactttattacacatatttaattattaaagaatctttagattatatacctgctgttgaaataaaaaaactacttgaagaaaactatcaaattaaagtagatattaaaacaatttatcaagcaattagaaatattaatgaattatctaaatatatttatcaaaaagaaatcattaaaactaaacatcgaaaagggtatagtattgatgaagaattctttaatgatggacaatttcaatatctatgggatagtgtgcttttcaataatgatttaaatgaagatgaagtaaatgctttactcacaaaattacaaactttaagttcaagtaaacaactttcacgtattcaaaatcaaccaagaaaaaatcaaccaagaaattataatctgcttttaaatatgacaaccgtcattaaagcaattcatgaaaagaaaaatatttattttaaatatgtaagttatgaaatcaaaagaaataagtttgtagaaattgcgcataatcatggaaatcataaagaaaataatgaattctatattatttctccttataaactaattcaaagagattctaaatactatgtattaggttattttaaccaacgacctggtaaactttctatttatcgtcttgatcgtatgcgtcttgtaagaaatcataaaagcccttttgaagaaggggaacaatttgatttagaacaagaagttgatcatataaatatgtatgtttcaggacaaaaggatacacttgaaattagttttgatgaagtggttttaagagaagtcattgatcaatttggacaagatcatcctgttaaaaaagactttgaaaatcgctatcatcttactatagaagatgttcttatttctgatggattgataggatggctcatgatgttacaagatcatgtaaaagttattaaaccttattctttacaagagaaaatgaaaaaaagaattgaaaaaatgtttatacaatataagtagagctatcatttagatagctcttttgtctttttccaattaatatttttgatttgtttaataataggttgaaatacatttcttttatcttttggataaatcgcataataacgaacatgggcttctggatcagtaatcggtattaaaatacgattatcttctgcctcttctctttgaatcgtgatattgcttctaaaattaggcaaagcagacatcttagtaagttcattaaaaacagaaggatcatcttgaaataaaagatgtgattcaggaatcattcgttgacaaacttcattccaaaaaccaatgtgtgaaagaagtaaaacactttgaccgtttaaatcagaaaaagatatttctctaaaaggtgctaaaggatgtgctgggggaacagataaataaagagattcatttaaaaattcttgtgaaatatattttttatcttgtaaaggatgatgtaaaacgattaaagaaaaatctcccttgtctagtccttcaatcaatatattttcatcttgaacaagagtactttcaatttgggattctgtattatttaataaagcatattcaacaccccataaaggagctggtgcacaagaaccaaaagaaatatgattttgacttagttttgtgagttccttaatcatttcttctcgtccatcaagtaacttttgtgcaaattctaccgcaagttttccattttcattcaattcaattttatttttcttacgattaaataaagaaagtcctaaatcatcttctaatctttgcatagatcttgtaagtcctggttgagaaatcaacaattcttcagcagcttttgaaatggttttatttttcgcaatggatacaagatgttcaagttggttaaattcaatcatagtttcacgtccttttcgttattataacacactatgactttgagttatagtgagacaattgaatgataatgtgcttttttaatgcatatattaaaataaaaatattaataattagtggaagccctcgtccaagagaaaatacaaagattgccctcgatgaaatggttaaaatctttgatcaagaagatattgaaagtgaaattgagcatgttggaaataaggatattcgtggatgtattgcctgtatatcatgtaaagcaagattaggtcattgtgtctttgatgattgtgtcaatgcgattgatgatcaaaagtttgaagaggcagatggacttgtcgttggaacacctgattattatggctctgccaatgcgaccttagttgcttttctatataatacgtcctttgataaaaacgatgaaggttggaattttatggcaatatttggtaaaaaactatctttggatagctttttttgtataactgacagttatagtgagatgatttattgatattgtacttttgtttctttgaaatctacaataaagatgtaaggaggaacaagatatggaatatataactttggctaatggttatcaactaccgatgttaggatacggtactttacatataccccctaaacaaacaaaagagtgtgttttaaaagcctttgaagctggttatcgtttgattgatacggccgcttcttatcaaaatgaaaaagaaataggggaagccattaaagaatcaaaacttaaaagagaagaaatctatttgacaacaaaggtatgggttcaagatgccggttatgaaaatacgttacaggcatttcatcaatcattagaaaacttaggagttgattatttagatctttatttaattcatcaaccctatggtgattattatggctcatggaaagctatggaagaactttatcaacaaggcaaaatcaaagcaattggtgtttgtaacttttcaccagaaagattcatggatctttatatgaatagtttgatacaccctatgatcaatcaacttgagtttcatcccttctatcaacaaaaaaatcaaaaatgtgttttaaaacaatgtgattgtctgttagaagcatggggtcctttaaatgaaggacaacgcgatatctttcatcatccaatgttattagatattgcgaaaaaacatcaaaaatcagtttcacaaattattctaagatggcatctagaaaatcacattattgccattcctaaaaccacacatttaaagcgtatgaaagaaaatatagatatttttgattttcagttagataaagaagataaaaaacaaatagaacaacttgatttaggttatagtgaaattattgatcatcaaaattatatgaccgcaaaatggcttaataaatataaaatacatgattaaaaggagaaaggaatatgttattttactttacaggtacagggaatagtttgtgtgtggcgagacaaattgaagaaaagcccatcagtatccctcaaatcttacatcaagaaaacttaaaatttaaagatgaaaaaataggaattgtttatcctgtttatgcaggagaagcacccaaaattgttttagagtttttagaaaaggcaacatttgaaacagattatttctatttgattttaacttatggaaaagatgtcacagatgctcctgaatgtatcgcacgcttattagaagaaaaaggaagacatgtaaattatattcattctattttaatggtagataactacttaccatcttttgatatgaatgaacaaagagcaatgaataaaaatgttgaacaacaaatccaacaagcacttcaagatatccaaaataaaaaagaagaaattcctgaagcgacacaagcaggaagagatttccatgcttctgccaaagaaatctttgtgaaaaatccagaactcattaatggtgaacaaattacggtaaccgataaatgtgttggctgtggtatttgtacaaaggtttgtccaagaggtcttttctatattgaagataaaaaggctaaaagaaaacaaaatacctgtgaattttgcttagcatgtgcacaaaactgtccatcaaaggctatcatcacaaaattgaaagacgccaatcctaatgcacgttatagacatgaaaaagtaagtctaaaagatattattgaagcaaatcaacaagtataactgacagttatactaacatgcactatttatattgtacatttatagaatttaaaactaaaataaagatagaaattggaggagataataatgaaaacttttgaattaaataataaacaaacaatccctgcagtaggatttggagtcttcatgattcctaatgatggacctacttacgaagcaactttagctgctttaaaagcaggatatcgtcatattgatacagctgctggttattgcaatgaaagtgatgtaggaaaagcaattaaagatagtggtattgatcgttcagaaatctttattacttctaaattatggttacaagattatggttatgaaaatgcgaaaaaaggtattgaaacttctatgaaattattaggagtagattatattgatctttatttattacatcaaccttatggtgattatttaggagcttggaaagctttagaagaagcgtatcaagcaggtaaaatcaaatctattggtatttctaatattactgtgaacttatggaataaatttaaagacggtatgacggtaatgccagcagttaaccaagtagaatttaacccatttgttcaacaaaaagaattaagaaaagtgatggctgaaaatgatattcgtttagaagcatggtatccattaggacatggaaataaagatttattagaaaatgaaacaattgtttcattagctaaaaaatatcataaaaatgctggtcaaattatcttaagatggatttatcaagaaggagttatttctttacctaaatctacaaatgaagaaagaatgaaaggaaacattgatatctttgattttgaattaacagatgaagaaatgaaagcaatgcaagccttagataccaataaaccatctcataatcctgaagatcctgccaacgaaacacgtttaatggggttaaaaattcatgactaattttattactttaaacaatgggtaccaaatccctcaacttggatttggtaccattcaacaatttggtaaacaaattgaagacaatgtagcttttgccttaaaccatggctatcaactcattgatacagccaaccgttatgaaaatgaagttgaagtaggaaaaggtttaaaacaatcaggattaaaaagagaagattattatttagaaacaaaattaggacctacactttatgaaaatgatcacgctattgatgatactttaaaaagattaggcgtagactatattgatgttatgattttacatcatcccgttaataattatatctatgcttataagatgctagaaaaagcctatagagaaggaaaaatcaaagcgattggactttctaatttccaagtttcacaaattcaagaaatcatggatcaatgtgaaataccaccaatgattatgcaagtagaatgtcatccttattatccagcagaacatgtatatgatttttgtaaaaaaaatcatatacaacttcaatcatggtaccctctaggacatggaaatagtgatatgttggaagaggcaatctttatagaacttgcaaagaaatatcataaatcaacggtacaaattattttaagatggcatcttcaaatgggatttggtcttgttccgggaagtaaatcattagatcatattgaagcgaacgcacaaatctttgattttgaactaacagatgaagaaatgaaagaaattgaaaaagtgaataaacatacacaattttataaagtgactaaagaatctttacaaagacttgccacaacaaaatgtaattttgaagaaggagaataattatggaatacaaaacattaaataatggagtgaaaatgccagttgttggttttggtgttttccaagttaaagatgaagaagaatgtaaaagagttgttttagatgcgattgatgcaggatatcgtcttattgatactgcacaatcttatggaaacgaagaagctgtaggtaaagcgattcaagaaacaaatgtaccaagagaagaattatttattacgacaaaagtatggatttctaattatggttatgaaaaggcaaaagcttccgttgaagaatcattaaagaaaatgcaattagattattttgatttagttttattacatcaaccatttaaagattatcatggagcttatcgtgctttaattgatttgtataaagaaggaaaaattaaagctattggtgtatctaacttctatccagatcgtttagtagacttagctttagatacagaagttgtaccagctgttaaccaagtagaagtgaatcctttccatcaacaagatacagctttaatttacaatacaaaatatggtgttcaattagaagcatgggcaccatttgcggaaggtaaaaatggtatcttcacaaatgaaacacttgtagaaattggaaacaaataccataaatccgtcggacaagttattttaagatggcttgtacaaagaggaattgtgcctttagctaaaacagttagaaaagaaagaatgcaagaaaacttaaatatctttgattttgaattaagtgaagaagatatgcaaacaattgcttcacttaataaagacacaagttcattcttctctcactatgatccagcaactgtagaaatgatttgtggcttaaaacgctagtggagaaaagtttatagcatgcttgatagtgtaagtggttagctctatataaataaaacaaagtgatctcttaatgaaattaggtttatatttaaaatatgtaagaaaatagtgggacgtagttctcacttttttgtataactgatagttatagtggtatgagatatcaataatgtacttttatgggagtatggataaaataatattagatagaaatttgattaaaggagccaggttatgaatgattcaacaaaaataaatgatattttaaaaaatctgttatttagcgatataggacaatttttattcaattacaaataatatgatcctaaaagatgtagactatttacttccttatcatagtcatattgaagtaagtacaactttagaagtattataatatttagaaaagcaaaaacaaaaaagaaatatgaaaaaactctaacccttatggaacctaaagaatggtataaagcaagtgaacttataaaagatttagatattaaagaaagaagaacaagagaacttttaaatgaacttgaagaaaaaggagttactaagggtaaacgttgtaggaaaaaataataaaaagtgagttcgtgtttataaacatggacttttttcattttacataaacttaacataaaccatacgttcttttgatttttgaaagtgttgaaaaacactatgataggagtgtcttaagaaaaggaaacaaaaataaataatatcttaagagaaaacaaaggaaggtaaataaaaaatgaaaaagaaagtattaagtgttttaatggttttcatgatgtgtcttggtttagccggatgtggcggaggatcaaatagtgcatcagatgacattagtggaaaggtaagtttaaacggatcaacttcaatggaaaaattcgttaatgccttatcagaaggaattaaagaaaaatatccaaacttacaattagaagcacaatttacaggatctggtgcaggtcttgaagcagttgcttcaaaaacaacagatatcggagattcttctcgtgctttaacagatgaagaaaaagtaaaaggattagaagaaaatattgttgctatcgatggtatcgcaacaattacaaacaaatctaataaagtaacaaacttaactaaagatcaattagcaaaaatctatacaggacaaattactaactggaaagatttaggtggacaagatgaagcaatcgttgttatcggacgtgaagctggttcaggaactcgtggagcatttgaagaattattaggaattgaagatcaatgtcaatatgctcaagaattaaatgaaactggtgctgttcttgctaaagttgctaaaacttctggatcaatcggttatgtttcattagatgtattagatgatacagtttctcctcttcaattagatggtgttgaacctagtgaaaaaactgtaaaagatggaagttatgctttacaaagaccatttgtaatggctacaaatggaaaaattagtgaacaatctaaacaagttcaagcagtatttgatttcatcaatagtgatgctggacaaaaaatcattgaaaaagttggtttagtaacaccaaataaataaaaaataaagagggaagtattatggaaaaaaagttatcaattattagccataagaaagcaaaatccctagtagaaaaaacagccgcgatgatctttcgtggctgtgctattatctctgttttagcagttgttactattacaggatatatgattatttcagggacacctgccatctttaaagaaggaattacaggtattttgttttctacaacgtgggcgccaacagcagctaatcctcaatatgggattgcttatgttatattaacatccattgttggggtttttctagcaatctgtataggagtacctattggtttatttacagcaattaaccttgctgaaattgcaccagtaaaacttagaaaaatattaaaatcagcaattgaattacttgcagggattccatctgttgtctatggattattaggaattcttattgttaatccaatgatgtataaattagaattaatggtttatcatggctctaaaacacatcaatttacgggtggagccaatttattatctgccattatcgtactagcaattatgattttacctacacttattaatatttcagaaacagccttaaaagctgtacctgatgattatcgtaaaagctcacttgctttaggggcaagtaaaattcaaacaatctttaaggttgttgtaccaagtgctaaatctggaattatgtcagctattgtacttggtgtaggtcgtgctattggagaagcgatggctattttgttagtagccggaaatgcagtatctcttccacttccatttaattcggtacgttttttaacaacagccatcgtttcagaaatgggatatgctagtggtacacatcgtcaagttttattcacaattggacttgttctatttatctttatcatgattattaacttaatcttaacatatgttttaaaaagaggtgacttagatgaataatacaatattagaaaaaaagaaacgtgttagtgatcaaattctctatgcacttattcaattaagttcatttctttcaatttttatcttattagttattattggttatattctctatcgaggaataccagcctttgatttttcttatttagtaaatacaacaagtattattaatgatactgtaggtatattacctaatattattaatacactttatattgttattgtgacacttttaattgcttgtccaataggaattggtggagcaatttatttaaatgaatatacaaaaaataaaaaattcgttagtatcatttcatttacaacggaagttttagcaggtattccatcaattatttatggattatttggaatgttgttctttggatctgtttgtcatttaggattttcaattttgacaggttcacttacacttgccattatgattttaccaatcatttcaagaaatacccaaacagctttagaatgtgttcctaaaagctatcgtgaagctgctttaggaattggagcaacaaaatggtatatgattcgtacagttcttttaccaagtgcaattcctggtatcttaacaggagtcattcttgcgatgggacgtattgttgctgaatccgctgccttattatttacggcaggctcagttgctattttacctactaatatttttaaacatttgttaagtagtgggggaactcttactattcaattatatttagaaatggctaaaggtaattatgaagtttcatttgtgattgctcttgttttagtagttattgttttaggtttaaatatgttagctaaatggatcagtcgcagatttgatgtaaataaaggggataattaagatggaaaataaaatagaagcaagacatctgaatttgtattatggacaaaaacatgctttaaaagatgtcagtttagatattaaagaaaataaaattacagcgtttattggcccttcagggtgtggtaaatcaacatttttaaaaacattgaatcgtatgaatgattatgttgataacgttaaaattgaaggggatgttatcttagatggtgaagatatttatgatagccgtgttgatacaactttacttagaaaaaaagttgggatggttttccaacaaccaaatccattccctatgtcaatttatgataatgtcgcttatggaccacgtattcatggtattaaaaataaaaaacaacttgataaaatcgttgaagatagtttaaaagcagcagcactttatgatgaagtttcagatcgtttacattcaagtgccttaggtttatctggtggacaacaacaaagattatgtattgcgcgtgctttagctgtacaaccagaagttatcttattagatgaaccaacaagtgccttagatccgatttcaacacttaaaatcgaagaacttttattacaattaaaagatcaatatacgattgctatcgttactcacaatatgcaacaagcaagtcgtattgctgattatacagccttcttcttagtaggagaaatggttgaatatggaccaacaaaagatgtctttggtatgccaaaagataaaagaactgaagattatattactggtagatttggatag

SEQ ID NO: 228 - DNA, 20468 bp, unidentified
  source 1..20468: mol_type = unassigned DNA
  misc_difference 7652: note = a, c, g, or t
  misc_difference 7653: note = a, c, g, or t
  misc_difference 7654: note = a, c, g, or t
  misc_difference 7655: note = a, c, g, or t
  misc_difference 7656: note = a, c, g, or t
  misc_difference 7657: note = a, c, g, or t
  misc_difference 7658: note = a, c, g, or t
  misc_difference 7659: note = a, c, g, or t
  misc_difference 7660: note = a, c, g, or t
  misc_difference 7661: note = a, c, g, or t
  misc_difference 14018: note = a, c, g, or t
  misc_difference 14019: note = a, c, g, or t
  misc_difference 14020: note = a, c, g, or t
  misc_difference 14021: note = a, c, g, or t
  misc_difference 14022: note = a, c, g, or t
  misc_difference 14023: note = a, c, g, or t
  misc_difference 14024: note = a, c, g, or t
  misc_difference 14025: note = a, c, g, or t
  misc_difference 14026: note = a, c, g, or t
  misc_difference 14027: note = a, c, g, or t
cgagatctacactctttccctacacgacgctcttccgatctccattcattatattatatattttacctggaagtatgcttaatactacaaaaaagcataccattattactgctacaacgccacgtaaaccctgcttgatttttcctgttttggcaagctttgacacggctgtaaccatcagtataaaacatgtaaaaaacggataatatgctataccattgttagctattaaaaatgtgaaaaacaatgctacataattaatctttcttttaaagaaatctttatctaatgttaatacgtcatccctctcatatatccatatacataaaagtattgacaaaggaacaaaataacattctgtaagaactatatgtcctatatttctaaacagcatataaggtgataacgcaaatacagctgaactaagtgatgctacccaacagtttatctttatatttctcataacaaaataagatattattcctgctataaaaaatatagataaatatgtcagattcattgctactgcagcatcctttgtaattacagcaaatatcttcataataaaaagtccagaattatgcatcatggaagatgtgaaatcataatattggattgtataaggagcgccaagtctgccacatgtcagattccagaattgttctgtaaactgtttagcatttacaataacacccatatcatctccacccatataaaaaagtggtatattaagctcacagttacttaattccatcagatgatacatcatgccaaatataataattatcattagtataaaactggcataatcctgccatttttctttaaaatagctaaccaacttctgtttcataattcacctttcttatgcagtagttttccccacctttgctataatatcatcaaacttcttcataatatcatcccactggaaataatcatctacatactttcgtgcatttttacacattatttcatatacatccggatgttcatataagtaattgaggcatccttcaaactcaaagaaattcttataatataagcctccattactcttaatgcaatgtcctttcagcacatcacatataccattaacaataaccggcttggaaagtgtcatagcttcaagaacagatattgaaagactttcaaacttagatggtaacataagtgcttttgcaccacttataccatcaaacttatcctcatctgttacaaatcccagattaataatatctggatgcttaggaatatcacatactgcttttcccataagtacaagtttaaggtcactgtttttatttctctttttatattccataaaatatctgaataatctaggacagtctttaccttcatctattctaccgacatagatgatataattatcaagattatactggctatatttctttctgaatctgtcagcgctcacctcagatggtacatcaaccccaactccacatacttcatatggtacatcttcattgtggaatatagaatgaacaagatctttctcctcatctgtaaggaaaacaaaagcatcagccgcaccaaacaccttcttatacatatcaaaatgtataaatggttcctgatgtgctgttggaataaagattgctttatccttaattcttactatactcttaactgctgtataataaagataagttactacaatgatagcttcatattcatcctgatgttcatctacatattcaacaagctgaggacaataaggtcccatatgttctatccatctgtcagaaagttctacaggtgcatccggattagaaagcatctcagaatcaagtgctgagaatatcttaggaattctttcgtgttctgtcttaaaccttcttacagtcacaccattaatgtcttcaacgccttctttataataattagaccacttaacatactctactgcacatgaagtaagaacttcaacctcatacttagccttaagtctttcagctatctctcttgaatataactctgaaccaccattaacttcaagtccatatctctggttaataatcgctatctttttcataataatcctcatttctgcgtatgcttttggcgcaaagcctgcgacacaatttgcacacatatatgtcacaataatcttaattataattctaagaaatccataaatttcttaagtactacatcccatttgaaattatcaagaacaaattgtcttccagaatgacccatctgcgatgccgtctgtggattatctatatagtaattaagacaaccctcaaactcaaaataattgtcaaaatacaagccagaattagattctcttgcaaaatcacttgttacattgcactgactatgcacaagtactggtctttctgtcagccagctctccataataactatagaaaagctttcattcttagatggctggcataaacatatcgcaccagcacatgcatcatatttgtcctgtatatcaacaaaccccagatcaatcacatcattcttaatagtgtctggaatattcacttcaccgccacctataagaaccaacttaatatcaggaatcttgtccgaatttctttttttatattccccgaaatatctgataagagtattaatatttttcgcttcatcttttctgcctgcataaataatatatggagaattgatcttatatttttttctgaatctatcagcatcatattcaaagtctgtctcaatacctattcctaatagtaactgattaacgcctcttaaatctaatatttcattggcaagctcctgctctggtctagcattaaatgctattcccctaagatccctgaatgtttctctgaaatgtctgaaataagcataagcctcatcatgaagacatggtattaatattgatttaaatgggcatgactgaattccgtaataagttgttccaaacatataaggaataaaaacaaacctgtgataatcttcactatgttccctaagataatcatacatatccggactattaaccatctccttaaggaacgttgtttcttcttcataagaaatagtctttccctgcattaactttgcattaacgctatggaaatctttcatatttccttttcttactttaaatcttctaactgttattccatctatctgttctgttccttctttgaaataattctcagtccagtcagatgcaaattcctttacgcatgttgttataacttcaacctcaaccccggcagcatgcagatgctggacaagtcctcttaattcctgttctgcaccaccacgtatatctttataataccatggaataacaaatcctatcttcttcatactaatcctcatttctgcgcatgctttttgcgcatatcgagcttgtgtcaaacatgtacagacacaaatcctgagtgtgataaataagctatcaaacttatttttacactatttcctgctattcttattaatgaaatccctgagatattttttaaacatttcagctatattattatactcaaaactttgtaatctttcattctgccagtttacaagctgctgtctgagctccttatccctgacaaccctgtctatacatcctgctacatacacaggattattatcgtctataatcattcctttatatcccatagtatctgctattgcagttttatcatatgctattataggaaccttaaacttcatcgcttctaccaatggaacacagaatccctcatgttcactcatacacagaaaaacatctgctgttttataataagcaagtatctgattaaacttgatatggcctgtaaacacaattgcttctccaagacctagtttcttagtatactctgtaagtctgatgtaatacggatcattctctttataggagcctgctagtataagtcttgatttattattatataatctattgtaataatagaaagctgctattaaattctcatgtttcttgttaggtgcaacccttcctgtaaaaagaatattggtatagccatccgaatattcctttattacatctttgtctggttttttgtcgtaatctgacataggaataataataggtaaaacgtctatatcacacttatatcccatatctatgagattctgcttattaaactcagatactgcaagacaataatccactttatcagcaagatattttgcaccttcaagtccatactcgcatatctttgtaaaacgttcatcacaattcctaaaatattccggaggtgtgatattatgataaacgactatcttacggcaattatactttgctacatcataattaagcttactaccagtagacatatgaaatatgattatatcatcctgatgcacatcagtaagtttatctacgctaacagctgtcttcttatcaagcggcggtacaatactttcagcatatatttttgtatcatatcccatttcttttataattttttccatagctatagtgtcattacttaccgcatcaccatatgcgattgttgacagcatctgaataatacgcatattattttccaccctttaattcttcaatctgcttcttaagttcggctatttccttgttctgttcatctatataacatcccatctgattcataagtcttacaagagaagcattgaatccatcctgtgccattacgataggctctacaaaaaaataaacaagctttctaataaccttcttaaagaaaactgctgctttattaccctgaagcggtctgtatggatttacctcccattcatgattagcaacatataaatcttcattaaatttaaccttatcaaacttatttacattcatagctccaacatctactataacatcatcaaagcttaaaaggtcattagtgtaacctttaacttctatgtccttttttatttctttcattatatcctgaacattaatctgattattgttgtccatgaaaatcctccattctgattattacagacttacatttaattactattctggtctgtaatacgcttattcaatatatgctgtaggtaaactttaaccttgacagacctctttagaaattagcatatataaatgcctgtactccacctgtatatccaaacattattataactagtataagtacataatacaatgtccatctgatcactatattcttagaagcaatactctctcttatatttatacccttttctttcagaacacttattataaacactactatacagccaactagtataattacataatcccttgcttcaagtcctaaagttaacagacttccatcagtaaactgagaaaaactgaaacttaccactgactgtttaatcatagtgagagcagctcttaaagatgttcccatgtcaaaataccagccaatattgacaagtataaatgttcttaatatcatccataatttccatggtttagaatcatttctgatatttaacttatccaaagctttgttatataaaggttcaacaagattactaaaagcaataataacaccattgtacataccatatgctatatatttccacgaagcaccatgccatatacctactacaaagaatatcacaagattagcaaaacatataggaagtgtacgtcctacattgccaaaatgcttctttccccacttaccaaacttattcatagctttagaaagtgacataggatagaatatataatccttcatccatgtaccaagtgtaatatgccatcttctccaaaattcacctatagatttagaaaaataaggctgtctgaaattttcatccatagttatgccaaacatctgtgcggtaccaatcaccacatcaataccacctgaaaaatccatatataactgaacagaatacataagaacagccacaatattaagaagaccaccatacatatcataatcttcaaacaccatattaaccaatacagctgccctgtctgccagtataactttcttagcaagaccccagcatattctctgaaggccatactgcacattctttaattcaaatgaatttccttcgtacagctgtgatgaaagtctgtcatatcttcctataggtccctgcaggagctgaggaaagaatgaaacaaacaatccaagcttaaaaacattgttctggcatctgtactttccctgataaacatcgattatataagaggcagactggaacgtaaaaaatgaaattcctaaaggaagtgcaaactttggcagattaatcatattctgaccaccaaacagacttatgatactatttatgttttcaatagcaaagtctgtatacttaataaccgcaagttgtccaaaacaaaggagcaatacgacaagaagtgcctgtctctttctcttttttgttttatccttatatgcttttttctcttcctttgacatagatgctttattagccgttatataagcattactatctgtaataatcttatcgagccatattccacccatatatataaccaccgtagtaaataccatatatatagatgtctttatactgaatgtaaaataatatatataacttaaggcaagaagccatatccatcttatcttcttaggtaaaacataatacaacaccaatcctattaataaaaaggcaaaataacctacaaccgcaaatgacatattaaagtcctttccattcgtttccagtctctttagtgtaatcctgtttcatatttttatacatatcttcaaatgttgaataaaaatacttactctcgtcaacgccaccattttttctgtcatataaaagattagctaaagcctttgaataaatttcagcaagctgtcctcccatatgtccttcctgatcaccataatcacagtcatctcttggaacactactcataagtgctttgttaaaatcataatattcaagtccgcattcgttaacaaagaattcagacatagtatcatgtactgttgacattccaagcgttttagttactgaaggtgttataggtgatgtgacacatataagttctatattattgtctttacaaaattcaacaatgtccataaagatttcctttacagccgtatctatctcatcatcatatctgtccacccatgtagctatataatcttcaccaggtggaagctttccctgttcagttccctgtctgtcaaaaaagccctttccaacatatggaccatctgcaccctctacaaagccattctcaccatatgcagactctattgtataattcttatatgcatcagatgtcttcatactgacatttcttttaacgccacttactgacatattccagcttaacctgttaactaatacattccgcatatccagaacatcaaaattcctagccatgtactcaagctttaccatcggatcagtaaactgctgatatataaaagacttagtaaaatgtgtagtaggctgctcataataccagtactgataatcaagatcaaatataatggtcttaatgtcattattcttagctgcatcttttatgagaaaatatgaatcctgtactgattcacctggaattgcaagattaagtgtattagttccaagtttatcatctaatctttgtggatctatcgctcccctgcaatgagatgctccaactacaatcgtatcgtaaccaccctttttttcttcatggattatgaatcgtnnnnnnnnnnccgctcttccgatcttaccattaatataactgcaagaccagctataaatccaagaaccttaatccatggttttgcctttttcatttcgcattcctttccttaataaaaccaacatttattattacattaattgctagcattatcttttgtttaatatacttatttctgttcttctttcttttctgcagtttcatgatattccacatcaagttcccaactatgaggaattctcgtaacacctacatctgtgaggtttgaaaccacttcaaacttaatagcctgcttgtaataatctacaggtattccctcaccatattcaatagttatatctacccagtaattacctggtataaggttaacatcatcaagaataaccttatattttccatccttttcaatatcaaaattcgatattctatcaattcttgtgttagttccataacaccataatgcatcatttctgaatataccaaatccaaataccgcatctgagactttattttcaacatggtaactgagatctaatatcattttttcgccagttctgaatatacgtgattcctctcctttggcattatacatatgaatctcagtaaacttagcgtcttcactaccatatcttgaattaactttagctctttccttcttgatacgttcttcttctttctttttctccatctgttctcgttcaagctttgcctgacgcatctgttccttttcagcctgctccatacgctcctgattcatataatcaagatacttaagatgaacatcctttggagttccttctgcttctataagaccatctttaatccatatagaacggtcacatatctgttctatctgtccaagtgaatgtgaaactattactatagttgttccatctgcctttatttctcttaacttattaaaacactttgcctgatagttagcatcacctactgcaagaatctcatcaataagaagaatatctgcatcaacattgatagctacagcgaacgcaagtctcatatacatacctgatgaatatgttcttacaggattatctatataatcctcaagttcagagaacgctattatatcatcaagtcttgcatctatctctttctttgtaagtccgaatatagatgcattagtatatatattttcccttccactcatatctgggtgaaatcctgcaccaagctcaagaagacttgatactcttccacacatttcaatagaacctgtatcaggatatatgatttttgtaagcatttttaatgtggtactcttaccacatccatttttaccaacaagacctatagcctcacctttttttacagtaaaacttattccttttaatacatgtcttttctcatatctgttacgtttccagaaaagcatcttttctttaagttcgcttcccttatcataatagactttaaaatctttagttatattcttaacttcaattgcattctctttatccataccaatctccatttctgcgcacgattttgcacatatcgagtctgtctcaagcatactcagacgcaaatatcgcatgtataaaataagttatccggcttattttttatactagaactcctctgcgaatcctttctgaagtttcttaaataatatttctcctacaactataaatacaactccaacaacaacagctatcaataatgatgaaagttctggaacttcaccataataaataatctgtctgtatatcttaataataggtgtcataggattaaggttaaatataagaataagccacttaccagcccctgatctttcaaccatatcaacaccatacataactggtgtcatatactggagtgccataacaaatattccaagaatatactgaaggtctcttaaataaactgtaatagatgatactattaatgctataccaagacataatatatattccaccatcataacaactggaagacataataaggccaatggattaattgacctgcctgcaactataacaactgcaaaaacaactaaaaaagtaagaatcatattaacaaatgcacttgttactgtagatataggcagcacctctcttggaaagtatatctttttgaccatatctttctcttttaaaatactggcggccccatcagtaacactagatgaaaagaacatccatggtactaacgcaacaaaaaggaacagataatactgctcatagttagcattcataataatagagaatactattgtatacacaataagctgtaacaatggattaataaatgtccataaaaatccaagtacagagcctttatatcttcctctaagatctttccttacaaggcttataatcatttccctgtattcatataattcttttatgtgctgcataagaaaatctcctctatacgtctaatatgttaattgctgttaatatcttttgaaatatgcaaatcttgcatattataataacaacatttttctttgtcaaactaacacagattatatatacactattctacatatctcctgaatgtatagctttcagtctttcactgactatgtcagctgagcgtttatatgctagatgttccttagcatatgactgtccatttgatgctatcttattatagaaaacattatcctcatataatctcttcatataatctgccgcctcatcaacatgtgcatcagcccatacatttccttttttgaagacatcataatctttatcaagttctatcagatcatatcctaccatacatgcggtatcattattcataaactctgtatttccagaccagttagtagctatgacaggtgttccaagatacatagcctcagccataacaagcccgaaaccttctgatctatgtaacgaaacataaacatctacatctgctaagagtgaatcaacctcttttttattaacatgtccacacatataatatatgttatcatctttatcaataaccgaattaataatagactcatcatcagcagatagctctgactcagcaacttttattacaagtcctgcattctgatattttttctttgtttcttcatctttacagaaagcctctttaaatgctttaatagctgccaatggattctttcgttccataacacttccgctattatacataacaagaaagaggaatttatcctctggaagtccaaaatgctttctatcataagttggttctgccttaggtgccacacagtgtggtacagtaataaccggcttatcagtatatttcttaagcgtattagtcacaaaatcagaaggtgtccatatctcatctacaagtttaaatgcaggtatccattcttctggaaatgtttcaagctcccaggcccaatatcctatattatatctgtaatcccatacctgttttcccatactgacgtatgccaccatcatctcactggcattgacgtgtattatattaacatcatacggaagcttgtctgtaagcctgtcatcatatgtatcatttgttcttgagcctcctggtggaacaaaaaaatcctttataacatgttcttcattattctcatcaagtagcctgcacattattcttatactttgtcccaggccattatctcccttgacattaccaataacattagctccctctttgtaatatccatgttcatatttaattatcgcatcagcagaaagcttatctgctgcattattaattacccctgccttaatcctgcttaacattttcataggaataatctttgtaagtgctggtcttaatgcttcaccagcatttaaaagaatcttggatatatccatatctgacctctgtttattttttataaatatatatttattattaccaactttttaattaataagtcagaaatatagcaatagtttctgatcacagatgactatgtatactatcatcttaataacatagttcataatgacccagaatattgtcacattatctgaataattttaccatacttcatatacaaattcaatatattaaaatctaaaagcaccttcacaacaaatattgtcacataaaaaattttataccatatttaaatctttcatgcacaaaaacatcccagcatcttttgttataacaaatggtcttcttaattttttctgtataaatgtcttaaaatcggaatatctgtcaagcagatactgattctggtttccatgacacgagagaatatattctaccaatggatctgccttatccactaaaagataatcatcatatctcctcatactaatccgttcaaagtatccatcaagaagctcttctccaccttcaagaccaaacttatcatacagattatcagctgccagcactattcttttatcgaattccttaacaagcttacttatttcctgcatatggtgtgaaccatatgtagcacatataaatattccacctggttttagaaccctttgaatctcaccgaatgctttatctatattatcacagtaaaacataacatgattggcaattatacaatcatatgtattatcctcatatggaatactctggcagtcagccatcccatattcgaatttctgacttatatttgaatttaaagtgaaagaagcttccctgattgcacactctatattacgccttgcatcattaaccataccttctgatatatctgttacagtaatttttttaatatgtacagcttcagcaacattagatatattatcaacccatagtcttccatcaccgcagccaagctccagtatttttttatgttctgatatattcccctcttcatatatccacctaaaccatccatgcttattaacagaatacatcgcatgcagattaattcttgctgatatatttcccgcattctgatactgtgtcttcaaactactttccatattagtaagatgaattagtgacagcatactgctccagtctattgaattattcctatctattgtttcaactgtatcctctatagcattctttaccagctccatctgttcaatcttatcctgtataagcttaagctgtaaatgaagtgaattcttaagtatgttataatccgaatcaccgatagtcatattttttatatcatcaagtgaaaagccaagatacttaagcaataatatctgctgtaatcttgtaaaatcagaatctgtataaaaccttacacctgtatcagttacataagatggctttaatatattctgtttatcataataccttatggttcttacagtaacatttgccttctttgcgaactctcctgatgaataaaatccttccttatgcatagttttctacacctattggaagtttcaatatttcccccatactccaatactcccttccgaatgaattgtctgtaactaaatgtattctaccattattgcctttttactgcaactttcataatttttttaaaaagcacttgaagattacgtaacgtcatcatttattatgtatttgaaataaatgaaaacaaattaacttattagacaaaatattaattttaaggagaatacatatgaaaggtattattttagctggtggttcaggcacacgtctttatccacttacaatggttacaagtaaacagcttcttccaatctatgataagcctatgatttattatcctatgtcagttcttatgactgctggaataagagatattcttatcatttctactcctcaggatacacctagattcaaggaacttcttggggatggaagccagtttggtgtcaatctttcttatgctgtacagccatcacctgacggacttgcacaggcatttattatcggtgaagaattcataggcaatgacactgttgcaatggttcttggcgataacatatttgccggtaacggtcttaaggacagacttaagagtgctgttaaaaatgctgaagatggcgttggtgcaacagtatttggatactacgttgatgatcctgaaagattcggtatcgttgaattcaataaggacggaaaggctgtatctatagaagaaaagcctgaaaagcctaagagtaactactgcgtaacaggtctttacttctatgataataaggttgtagaatatgctaagaatcttaagccatcagcaagaggtgaacttgagattacagaccttaacagaatatatcttgaaaatggtaatcttaacgtagaacttttaggtcagggatttacatggcttgatactggtacccatgaaagccttgttgaagcgactaactttgttaaaactatcgaaactcaccagcatcgtaagatagcctgccttgaagagatagcttatcttaatggctggataactaaggatgatgtaactaaggtatatgaagtattaaagaaaaaccaatannnnnnnnnnttccctacacgacgctcttccgatctgaaaaaccaatatggtcagtatttaaaagatgtacttgatggaaagtatatagatgtgctacatagctaaatttcatatactaattcctattctaaattacgaatcaaatatgatatcagagtcaaaacattttccaccctgatatcttaatataactatcagaaaggtaaattaaattatgaatattattgttaccggcggtgccggatttatcggaagtaactttattttccatatgttaaaaaaatatcctgactacagaatcatctgtcttgactgtctcacatatgcaggcaatctttcaacacttgcccctgtaatggataaccctaatttcagattcgttaaagaaagcattacagacagagaagctgtatataagctttttgaagaagaacacccagacatggttgttaactttgctgctgaatcacatgttgaccgttctatagagaatcctgaggttttccttgacactaacatcaagggtactgctgtccttatggatgcctgcagaaaatacggcatcaagcgttatcaccaggtttctactgatgaagtatatggtgatcttcctcttgacagaccagaccttttcttcacagaagaaactccaatccatacatcaagcccatacagctcatcaaaggcaggtgctgatcttttagtattggcatatcacagaacttatggacttcctgtaactataagcagatgctctaataactatggtccatatcattttccagaaaaacttatccctcttatgatagctaacgcccttaacgataagccacttcctgtatatggagaaggtcttaatgtacgtgactggctctatgttgaagatcattgtaaagctattgatcttatcattcataagggacgtgttggtgaagtatacaatgtcggaggacacaacgaaaagagaaatatcgacattgttaaacttatctgcaaagaacttggaaaacctgaatcacttatcgttcatgtaggcgatcgtaaaggacatgatatgcgttatgctattgatcctactaagattcataacgaactcggctggttaccagaaactaagtttgaagatggtataaaaaagactatacagtggtatcttgataataaagaatggtgggagactatcatatcaggcgaatatcagaattactacgaaaaaatgtattctaaccgctagaattgacattcaattctgcaataagaatgcctgttaaattccgtctgacagtatttatccacatgtcagacggattatataataatgaattacaaagaggtaataattatgggacagattaaagtaacaccttgtgatattgaaggtctttatataatagaaccaactgttcatggtgacaaccgtggatattttatggaaacatacaatcagaacgatatgcacgaagcaggtcttgatatggtattcgttcaggataaccagtcaagctctactaagggtgtacttcgcggattacattttcagaaagaatttccacaaggcaagcttgtgcgtgttataaaaggaagcgtatttgatgttgccgttgatttacgtgccggttctaaaacttatggaaaatggtttggtgtagaactcacagaagaaaacaaaaagcagttctatataagtgaaggctttgcacacggattcctcgtattaagtgacgaagcagaattttgttataaagttactgacttctaccatcctggtgatgaaggcggtcttgcctggaatgatccaagcattggtattgattggccacagcttgttggtgaatatcctggaaacgcagatccatccggatataagcttgaagatggaacaccacttaactttagtaaaaaagatactaagtgggatactcttgagaatacatttaaattcaaataattaccattaagcatttcttttaattatatatattaagcataaaaaacactcttaagcactttcttaatttatatttataaagtataattataaatataaattaaggaggtgtgtgttttatgaaacctatttttaacccttaccttccaagttacgaatacatccccgatggagaacctcacatatttaataaccgtttatacatatacggaagccacgaccgcttcaacggcacaacctactgtgaaaatgactatgtgtgctggtctgcgcctgttgataatttatcaaactggaggttcgaaggagaaatttataaccgtaggcaacatcctcacaaagaggaaagaatgttgctttttgcaccagatgttgtgcagggtattgataaaagatattatctttactattctgttgcccactcatcacgaatgtctgtagctgtatgtgatagtcctgctggcagatttgaatatcttggcgatgtaaaaacaaaagatggacgagtatatggcatatcaccaggtgattatgtccagtttgacccaggtgtttttattgatgatgataacagcgtatatttatactcaggtttctgtcctaaaaaaacagaagatgaacatggacgcatcatgcagggtgcttttgtatgccgtcttatgccagatatgatgactatgtatgaacttccacatatcattattccaagagattttaaatgtccggaaaatgctggttttttcgaagcctcctctatgcgtaaaataggcagcacctattactttatatattctgcacgcgttaatggactgcattatgcaacaagcacttatccagatcgtgattttgtatacggaggacgtattcattccgcctctgatataggactacgcggttacactatagagaatacagcatatcctaacggcaatactcatggcagtataatagacataaatggacagtattatatatttgaccaccgttttactaacaatagttcttattgcagacagggtgtagctgagaaaataaatattgaaaaaaacgggtatatacatcaggcagaagcaacaagctgtggattaaacaatgcagctcttgatgcttatggtacatatccggcatatataacctgtcatgtaagaaacctctccttaacacctgatataactaaagaagacaggctattacttatgccttatgtgacacaggatgaagatgacagggaagctggtgatgatcaatatattaaaaatatacagaatggctgcataatcggatataaatactttgatttcgataaacagcaatccaaaaaaatactaattaaaatcaatattaaaggtactgctaaaggatacataagcataacaaccgacatggattatgcagataaagaatttaaagactataataagaacgccagcacgtatatagacatatctgacacattacacaataataattcagataactggaaaaccattgagctacatttaagcaatccttctggaataaagcccctttactttatgttcgagggcacaggagccttctctataagagatttcacatttattccagactaactatataaaacaaccatataaaacaaccatataaaacaaaagccctgctatcaggtatcactaccagataacagggtacttttttatataattatatacatccgcttattaatgatggaataatctcattcctgtgaagcacattgctatatttctcttattacatgtttcaataacattatcatctctgattgaaccgcctggctgtgctatgtacttaacaccgctcttatatgctctttcaatgttatcaccaaatgggaaaaacgcatctgaaccaagtgcaacatctgtgtttgttgcaagccatgccttcttttcttctgctgtgaatacttccggcttttcagtaaatactctctcccatgctccatcttcaagaatatccatatactcatcgcctatataaaggtcaatagcattatctctgtcagctctgccaacaccttctttaaaaggaagtgcaagcaccttaggattctgtcttaagaaccagttatcagccttctgtcctgcaagtcttgtacaatggattcttgactgctgtcctgctccaataccaatagcctggccattctttgtatagcacactgaattagactgagtatacttaagtgttataagtgcaattataagatcaatcttagcctgctgtggaatatccttattgtctgtaacaacattattaagaagttcttcatcaatcttaaactcattgcgaccctgctcgaaggtcacaccatatacctgctttctttcgataggtgctggcttatatgctggatcgatcttaataacattatagttacccttcttcttagtcttaagaatctctaaagcttcaggctcgtaacctggtgctataataccatctgatacttcatgctgaataagctttgctgttgcaacatcacacacatcagaaagtgatataaaatcaccaaatgaagacattctgtcagcacctcttgctcttgcatacgcacatgctaatgcagaaagttcacctatgctttcatcaacccagtatatcttcttctcaacatctgagagtggaagtccgactgctgcacctgctggtgatacatgcttaaaagatgtcgctgctggaagtcctgttgcctcctttaactcctttacaagctgatatccattaaaggcatcaaggaaattgatatatcctggacgaccatttaatatttctactggaagctcacttccatctgccataaatattcttgaaggtttctgattaggattacatccatattttaactgaaattcgttcataataatctccattcttgcgctgcttctttgctcactatttctctattctgtgtattttccatacattttgaacccatatcatttatgcaaaaatacacatacacaaatattttatattacttattcttattgataattcttgtttcgtacttacctgtcttaatatcaataaatctgacaaaaagtgataccttattatcttcattaagattgttccatatcatattagtgaatgtatcaatatcaccatcaatctttacccatgccggctcaccttcaaagcttggaagaggatttccatcgttcatatatgtgtggataaaatgtccttctccggcaactggtgcatcataagtaaatgtgtatctgtcacactggtcaggattaccattgtggctctttaatatagacattgcatagtcatatttgccgtcatcaactgtcataagacccgatattctaggagtgaagttaggtgtatcaggttcaaactctcttgttcttaacgattcttcaaatgtctttccagaactcataagatcataaactgtatctgtctggtcaccattagtaactattgtcttcttaccaagtattcttactggtgcatatattataagacttggatcctcaagcttacttggatcaaaagcctctgttcttatgccttcaccatcttctacaaatactctgttacggctgttggcacttcttcccataatgaagtacgctgttactgccttacttccatcttccgatctgccaataacaattcctcttcctggataagcgcatcctgataattctttttccaatgttgtaatctgcatattaatcctcatttctacgcattttataaatcactatatagccatgccttatgcgttaagacactaactacaatgttacctagattgtctgcttcttatatagctgttactgtaaactaataaaacaacagatatataaaaagccgcccatcctgagtaacctttacagggttgcccaggcggtcggctgataaacatattattactgtactccctgtgggtaatcccaccacatatacttacttcaatgcaatgatacatacttcaacaccatgctgaatattctatctgatatcctatatatgctttccgccagttgtacagcttatatcaataggttacactatattaagatatatttcaattatatttttcataaacaatgttagctatcaataatattgccattatttaatagtttccaagtagtttaatagactttgcctcttcttctatgcctcttaatgcattcataaccctcggatcatctatatttccttcaaagtcaacgaagaacttataatcccactgctttgattcacttggtcttgattctattttatacatattaagtccattatatattatatggcttaacagattatacaatgttcctgcttcattagctgtctcaaatacaatacttgttttgtttgcattctttaagaacttacgtgagttagttattatgacaaacttagtcgtattattagataaatctgcaatacctgtctttcccagggagatgaaccttaccgatttgtagactatgaaactcttttagagaatc

SEQ ID NO: 229 - DNA, 10934 bp, unidentified
  source 1..10934: mol_type = unassigned DNA
  misc_difference 4783: note = a, c, g, or t
  misc_difference 4784: note = a, c, g, or t
  misc_difference 4785: note = a, c, g, or t
  misc_difference 4786: note = a, c, g, or t
  misc_difference 4787: note = a, c, g, or t
  misc_difference 4788: note = a, c, g, or t
  misc_difference 4789: note = a, c, g, or t
  misc_difference 4790: note = a, c, g, or t
  misc_difference 4791: note = a, c, g, or t
  misc_difference 4792: note = a, c, g, or t
tccctgaaaatacggtgcctgcagcggagccagcttgatctgcaccggccagtttctgacctgcgctgctgcctgctccgggttcttccactttgaccgtcctgtctcctgcttcagcttctttcgctctgcgtcctgctttgcctgctgtaccgcagcctcgtcgtatgccggtgcctccctttcttcaaaggtgattgctcctgcgggacatgccggcaggcagtccccaagtccgtcacagaaatgctcccttgcaaggcgtgcctttccttccacgatctcaatagcgccttcatggcaggcagccgcacagattccgcagccattacaccttttttcctctatgtgtatgatctttcttatcatttctgttttattcctttccttagaaaatcagaaaaacagtctcatctgggcatctttaaagctcttctgctgagcctctttcacaaaatctgtttcccgaagatgtccgatcagaagcggtgagtttacatcatgccgtttcctgttttcctctacactttttctgtcataattggcatagcagtacaagcacccatgcccacaggtattgtaaacgccaatgtcagcaccaagcagacaactgcaggcctctctggcagccttcttctttggcacctgcagtccacagccgatagcctgctccagaactctctgtgacaggcagccatccgcatctacgttaggtcttaccagtgcctgattttcacagcagagattgatctgcattccatttgcacctgcaatcccggcaaaagcttctatgatcctctcctgctcggctttcgtcacctctcttgcctccctgaaattccgctttgtcttttcataaagatccagaaagctgacaacacactgaccggtatatccccgaagcttttccgccatttctgcaaagcaggcaatatgatattccacagaatatttttctgtgataaaaaccggatcataacgccagctcattctctcttttcccaccatatcggaaagctctataaagctcctgatcacatcctcctttggcggtacgaaaggctcgatctccctgtcataaggcgtgatcgtcacaaaccagaacatgtcataggcgctgagatgttccagcctgcccagcatcggctgtggattcttcgtgcagaataccagcgcatccactactgatggatccagcacatatctggtcacctgctccggatagtagggattccgcaccatcacatagccttcttcgatccttttataaaaccagtcgctgaaatatgccgggatatccgtcctgctgccggtattcaatatcatggcctgttttccctggaggcaaacagcggattggcttcccttgttttttctccgtagacactcttcagatcttcaaaagcatttctcacttcttccagtatatccacatgggcaatatagtttttccctttgggtccgtatcctttcccgtcatccgaaagcctcgggatctctcccatcagcagattcacataccggtccatatcccacatgccatgaatttcttccgtgaaaacgagtttctctccctgtgccctgacttttgctgcataggctgcataattgatgatcaccgtttccttttccgcatatttgcgaagtcccgcatccatccggttctgcatagtggcatcctgacagataataatgcttttgcaggaaatattctgtttctttaaaagctccaacagatatgtgatattgtttccacagttggtagatgctttttccagataatccacatcacagtgatagatttccttcaggtatctgctgaaaacctctgcttctgaaagtccggttgtctcgatcaccggatattcatcgtggactctctgccgcaatgcttccgtcgtatgccctgctccacctacgatcacatagtttttggcaatgttctcctgaactgcctttgcaaggacatcaccaccagccaggatactgcccccaaacaggacaaatacatctgccttctcaaatccatatttttcttttagctgttgcccggaaagctcttctatatccctctttccacagaactttccaagaatattgatcttttccgctatctgctctgttttcatatcatattcctttctgccagcaaagatgccatgctatatctttttaaaaccagattaccgattttcctggatccccctttggttgaatctgtaaaaaaggctcccggcgttttacacggagccgggaacctttctgtcatttctgcttctgtccattcaggacattacattttcttacatcagtttgcggaacagtgctgtcagatcttcgatgctggcatccttcgggttacccggtgcacacgcatctgcatgagcggattctgcaaggaacggaagatcctcctccttcagtgcttccagtttagccggaatgcccacatcctcagaaagcctgcgtacagcatcaactgctgccttgcggtaggtctcctgatccatctgatctacgccttcaacacccatggcacgggcaatttcacgatatttttcgccagtgcagtctgcattgtactccataacgataggaagcatcattgcacaggcaactccatgaggagtatcataaacagcacccaaagtatgagccatggaatgtgcgattccaagtcctacattggaaaatcccatacctgcaatatactggccaagtgccataccttcccgtccttctttggtattggcaacagcgcctcttaaagatcttgaaatgatctcgattgctttcagatggaacatatctgtcatttcccatgctgcctttgtggtataaccttcaatcgcatgagtcagggcatccataccggtagatgccgtcagtcccttaggcatggaagccatcatttccgggtctacaactgcgatgatcggcatatcatgaggatctacacagacaaacttacgcttgcgctctacatcagtaataacatagttgatcgtaacctctgctgctgtacctgctgtggtaggaactgctatgatcgggatgcagggcttctttgtaggtgctacgccctcaaggctgcgtacatcttcaaactccggattggcaatgatgataccgatcgccttggaagtatccatggaggagcctccgccgattgcaataatatagtctgctccggaagccttaaaggctgccacaccgttctttacattatcaatagtaggatttgccttgatatcggaatagatctcataagccagtccttctttttccaaaagctctgttacctttgctgtcactccaaatttgatcagatcagggtcagaacacacaaacgccttctgaaaagcatgtgcctttgcctcatttgcaatctctgcgattgcccctgctccatgataagaggtctgattcagcataattctgtttgccataagtaaaaaatctcctttctcttctttgtggtaaaaccgttacctgctgttttcattataatcgaaaatgcagaggaaaggaagtcctctttaattggatgatcttccagtcggtatataaggaatgatcctctgtgccagtcctgctgcactcatggtctgcagccataccttccccggtcccttcaatgtcgtaaggaacagtccttcccctccaaacagtacattggcaaaaccctttaccatttctgaagagtattccacgctggtttcaaaagcagctacattgcctgtattgaccttgatcacctctcccggtgccagttccctttccacgatcgtcccatccagttccaaaaatgccagaccctggccggaatacttctgaaggataaaaccctcaccaccgaaaaatcccgcctttacaccggtaacatatgcactcactgacacattttttgtcgcacagaggaaagcatttttctgcgcaatgtattcctttccactgcctatctccagcatcctgatctctccgggaaaactggatgccatggtgatctctgcattgtcatgctgtgccgcataggttgccagaaagaggctctctccggcgaacatccggccaataccgccaagcagcccgcctttcatattggtttccatggaaaatccttctgacatccatatcataccacctgactgggtataaatttcttctcccctgtcaagagtcaaggttactgctggcataggggttccaaatattctgtaatgcatactcttctccttttaccttccttcttttattttattccttccggtgtcttacgttggcagcttgtctgaccattcataatgacagttacagcatttcctctatcccgtacttctttgctagatttctcttccacatgccgccagcttcacatcatagccagatagtaaattcaataatccatatctccccattctttgtatttccttacttctatttttctgctattctgtaaataatgaaatggttataaatgattcttttttctcaacaactgattatcatgatttaaaaggagttttcaaatgtcatttactcaggttattctattatatcatatagaaaaaacaaaggaaatgcagatccgccagctctgtaagaggctttttatcacagtaaaaaccgtgcagcggaccgattattcccagtcacttggctatcttgccggcatagaaggttttgcaagaaaaaatgcagtctatcttggcagggagctgcctgctgagatgcttgtcttctccggcatgacctctgagcagatcgatctgttccttgctgnnnnnnnnnnaccgtaaaatggggatttctcccattgcctgcaaagccgttatcacacccgtcaacattttctgggatgcaggaaatcttgcagaagagctattaaaggagcaccaccagctccataaagatcccggtatctgaaacagactgcattccctttctgagacacacttctttatccccacaccatatccgcgctttcagtcgtttcttgaaaagaaatgtctgatatggtatgattttcccagtactaaatttgaggggtgaagttttttgatcagaatatgttatgtagttggtatctcactgccattcgttatttattatcttatccgcatcagctatgtagaacagcacggagataaatacacagaaactgtccgataccagattgcccgcaatgctatttccatcctgaaattcaatggtatgatccggaccgatgtttacggtcttgaaaatctgccaaaagacggcggctacgttatgtaccccaatcatcagggcaaatacgacgtgcttggtattattttcgcccacgaaaaaccctgcaccatgatgatcgatgacaaacgggccgatctgccgctgaccaaggaatttgtttccttattaaagggcagccgtcttgacaagactgacatgagaaaacaggtgaacaccgttcttcaggtcgcttccggcagaagatatatcgttttcccggaaggcggctatgaccacaataagaatgaagttcatgattttctacctggagcttttaaatgtgccatgaaggccagacgtcctattgttcctgtcgttctcatcgattcctacaaggtcttcggtgtcaacagcttaaagccggtacgcacacaggttcactttctgaagcccatgtactatgaagattacaaggatatgacttcaaaggagatttctgatctgacaagaaaccagatcatttctgtgatccagaaggctagctgatctttctgccagccaaaaaagttcccggcaggatctgatgtacagattctttgaataagaattgccaaaagaactcagtcggtgcagatacgcacgactgagttcttcttatcttttattagctaattccagtgatattctttttcatattgctcatatattccagggaactgttccggtgtaattacattctgtggcaaatacttcaggattcctgtgttaagagccgactgctgtaaagaatccatgcatgctttcatagttcttatatcttcatccgtaacaggatatttattcctattatcttttgccttattttgaaaatatacaagtgctataattcccggaataatccaccaaaggaacccaatgattatgacaatacattctcctgtgcttagtgatgttcgtttgttgatttcctgtttatagtaattgtatagaggcttaattattccatatgatgtaataaaagaatatgttttataaaatacagcatacatcgttttttcattctcaacttttttattcatttcctctgctgatttttgagcatatacacaaaagttggatatatttgtattatcttcatggtattttgccagttccaaatatgcagctgctttcatagcattattgggccaaatatcaggattctctattattttctctagctgttgaatatccttatcatatacctctctctcttttcccatctcattatgacattgcaatactaaatatgccgcaaatggtgatcccttttctcttacaggctccaaatattctaaagccttttcataattattatgcatatacaaaatatatatctctgagactaattttaatacttcatccttctgttcataattaccattcaatttttcaattcgttttatatttaataacgccttgtcatataaatgatttgtttcttctattgccatacatccggaaactcgaaattttatattcccaattattttgtaaattgttgcagctgatgataatgcttgaatatttaatgttgcactcagtttatctgcccacttttcagcctcatctgcatcatactcttcaacagcataatatcttgctacagatatcattgacactaaatcaccttgttttgccaagttcaatatactcttctcaatcatccttttcctcctgttttcctctggatttttcatctgcctgcatcataagaagcaaatatcgtgagaggacatcctcatttttttctttttcaatcattttcttcaattcacaaatttcctgataaatttcttcgagtatcttatctctgaaaggacttttttctatttggttcacgatccttggtgcttcctcataatatatttgaatgcatcttctccccacaggtgttttagacagataattgtcacgaaaagctctcatcactgtcagctcttcgcagtcatccggcaatcccttatatccacaacatgcggttgtcaaaaaacatcccgtagaagattcacaggtattgctctgatcccagtgactgcaggaatcatccggataataatagcttctatagtaagaacagtacccttttgtatcccttccttcatactcataattcctgcaggaaccacatttatacttcacaacataatctgacattttctcccctcccgtataattatttttctcatattatagtctttttaacgactatagtcaacgtttagtgaagacaataccattaagatagttttgaaaaaaggtatgggaaaacaatgattgaatatagtccattttgggagactctgaagaaatcaaatgaatctacttacacactcattaataagcatcacatttcaagctcaactctggataaactaagaaaaaacaagccattgaccactactactatcaatgatttgtgcagaattttgaattgtaatatcgaagatatagcaagatatacttcttccagcacagatcagaaactataattctgaaatcgcatatctgtctgaccaaaaaatcaatgataaagtagaacatgattcgtaaaaaaagaggaaatacggtatatttacccgatttcctcttttctcatttctttctgttatctcttcttcctgaattaataatctatatgtccttgaatgaccactcttttctgagaatgctcttcctgtctgatattgctattctatcctctgcttaaaatagttatctgctgcaagcttcagataatactgccccttctccatagattcctgaatggaaatccctctggcaatttccactgcaattacacaatttctgcaaagttcctctgccggtactttacagataccacaaaaagaaacgacttccctgttactggcatgcttcctgataccactcaaaacctttcccataaggctctgttcatccaaacatccttccccggttacaaccagatcacagtctttcacaagcgcatcaaactgacacagctccagcataccttcgatgccgctgaccgtctttgctctgagaaatgccgcacatccatatccggcacctcctgcagcccccgctcctgcctccggcagcattgcctggcagtcacgctctatcacttctgccacgtggatcagaccagcatccaggactgcaacctcttccttcgttgctcccttctgtggtgcataaatataggcagctcccagaggtccatacaagggattagtcacatcactcattaccgtaaattcagcctctccgatccgctgatccagcctcgaacattctattttcgataccgctgacagcgtccctcctgccggaacaaatgaccgtccatctctatcaaagaaagtaattccaagcgctgctgccatcccacatccgcagtctgttgtggcactgcctccaagacaaaggaaaaacttccgacagccttcatccagtgccgctcttatcagctctccaaagccaaaggtactggcctccagtgcacgaaatccggtctgctttgtcaatccgctgctttctgcaatttcaaggacagccgttccatcaggaagaatcccataggctgcctcaatcagttttccctccggggaatgtactgtcactgtcttcctgcttccgccctttgcccggagaatacagtccatgcttccttctccgccatctgcaatgggaagtctgacaacctcacacttcaaatgttcttctatggatgctgccagaatatcggttacttcctgcgatgtcatacttcctttaaaactgtccggaatcacaatcactttctgcataataaagtcatcctttcctgctcataacttcatcatatcattctccggggcatcaggctatgttttcttcccatatgccccacctcagtcatttttacgttcatttcactgccttttggggcatctgcatgcacttttcccactgatgccccgctctgcgaagttttcggggcaccacagcacattttccttcctgatacccctgaactccgaaaacactcccggtggtcctgaactccgaaaacactcccggtggtcctgaactccgaaaacacacctggtgcccctgacctccggaaatatcttccgattccggcacctctgcgacgtgcgccgcaaggcgcatcaaaaaaggtggctctgccaaaaggcagagcccccttcacttccacactcttactgcacgatcagattggtatatcccatcaggctttcatccacagcccttgctgcttccctgccctcacggattgcccatactacaagggactgtcctctgtgcatatctccggctgtaaagacattcttcacgctggtttcataggcacctgcgccggtcttcacattgcttctctcattgatatctacatggaacgcatcggttacatatttctggcttccaaggaaccctgccgcgatcagtacgatctctgcgggaagagtctgctcggagcccggcacctcgctcatcttcatccgtccgcttgcagtatccttctcccaggaaagcttcacgatcttgactgccttaaggctgccgtttttatccttcacaaattcctttaccgtagactcatagatccggggatcatgaccaaatacagcgatagcttcctcctggccataatctgtcttgcagatcttcggccattccggccagggattgctggcacttctggtatcgggagcctttggcatcatctcgatctgtgttacagacttgcagccatgacggatgctggttcccacacagtcatttccggtatcaccaccgccaatgataaccacatttttgcccttggtatccacatatttcttgtcttcaaaatcagaatccagcaggctcttcgtattggccttcaggaagtctactgcaaagtagatccccttggcatccctgcccggtacactaatatctctcgggttggaagcaccgcaggcaagtacgactctgtcatactccttcaagagcttttctgccttaatatccttaccgacatccacaccggttttaaacacgatgccttctgcctccatgaccttgatcttacggtctacgatatgcttctccagcttcatattggggattccgtacatcaaaagtccaccaaccctgtcagaacgctcatacaccgttacgctgtggcctcttttattcagctgatcggcaacagcaagtccggaagggccgcttcctacaactgctaccgtctttcctgtccggaccttgggaggcttcggatcggcatagcccttttcataggcattctcaataatcgcatattcattttccttcgtggcaaccggatccccgatcagattgcaggtgcaggctgcttcacagagcgccgggcacacacgggaggtaaactccggaaagctgttcgtctttttcagacggttataggcctgctgccagtttccggtataaacaagatcattccattccggcaccagattgtgcagggggcagccgcttgtcattccgcagatgttcattcctgcctggcagaagggcacaccgcagtccatacatcttgctccctgaagctgctgcttttctctcgggaggtgctcatggaactcattaaaattcttaatcctgtccttaggctttacgtcctttgatacttctcttttataatccataaatcctgttggttttcccat

SEQ ID NO: 230 - DNA, 8701 bp, unidentified
  source 1..8701: mol_type = unassigned DNA
  misc_difference 2021: note = a, c, g, or t
  misc_difference 2022: note = a, c, g, or t
  misc_difference 2023: note = a, c, g, or t
  misc_difference 2024: note = a, c, g, or t
  misc_difference 2025: note = a, c, g, or t
  misc_difference 2026: note = a, c, g, or t
  misc_difference 2027: note = a, c, g, or t
  misc_difference 2028: note = a, c, g, or t
  misc_difference 2029: note = a, c, g, or t
  misc_difference 2030: note = a, c, g, or t
ggtatagcagagatccacatcattgaaggctactgcaagaccctcgtagaagccgccaagctcttcaaacctcttcctctgaagcatcaggcaggctccggtcacccccatcatattgtggacataccggttccttccataatagtggtcatccttatcatccagaagctgcagcttatgcgccggtcccacatgcagattggtaatcccggcatgctggatcacagtagaatcaggatacaggagcttagcacctactgctcccacccgcttcagcgatgccttttctgccagcttcacaagccagtctccctgaatgatctccatgtcatcattcaggaaaaggagcagatctccttttgccatggacgctcccagattacacatccgcgagaaattaaaggccatggactcataatgatagcagatttctctgcacaaaggataatttttctgctgtagtgcttctatattttgtttaatcaggattttattttcttctctgcttccattatctacgagaatgatctcgtaagggatcccccctttggtacgctcggtcaacgagctgatacagtggaacagcacctccggattatccttggaagggatgataactgataccagatggtctttcccatcttccggctgccagctgtcctgtctttcatacccgaatgcacagtccgcgggcagccgcatttccttcacggctccatacccttcctccgccgtatgatacagcacctcatctatatgtctgacacagcctttccctgtcagactgatttcctgaccgattccccggttgatcacccgataacacagctcatagactgcatttttccgggtcagagcctcctttgctgacaatccttccacaagctgcttattctgatcaaggcactcgcacacggctctcgccggaagtgccaccagacttcccatatagaaatacgaaaggaaggtatccggagaccagtccggcttaaaccagggtttctctcttccctgttctgccatcacatcttcatctccatataccaggaccggcatttcttcattccatgtcttaaacagcatcggcagcgcaagatctgacagcatcccctcagccatggcaaataaaatagcatttgtatttttttcttcgccaaatgctctgatctccgggatccaggcctcttctccctttccatcctgccagaccggcaggcaaaggaatttcactgtattttccgtaccttcttctttttttcgtacttcataccagacaggtgtccggatcatttttgaatgtattccttcatttttgtatccggagccgtcctgtgtctgtttttttgcttcatttttcagacatttctcatgtactgatataatgatcttatcaattcgcagtttttcttcctgttgcctgatccatccatcataggtcattttcagcccattcagttttttttcgtaactcctgaactgttttttcatcaggatattttttgcaaaccgtttcagatctgtcacgttcattatcctttccggaacagatgcttacacccgttcataacatcaaaagccatatccatcgccactggggacagcttcatccgcaggtgcaaggtattttcaccggtaaccggcatctccagtacagaaaaggtcattcccggatccatggttgcaaatacccatgtctgatcctttaccttcctgccattggtggcaaaattcttatcacttaactgtactctgcttccgttcagcagaacctcttccatccttacgatacagcttctgtctgcagggtctacccgcagcgcccgtacattgccgtcaaaaggaatatccacttctatggtatcctcatctgcatatacatccggcagatactctgagttctgctcactgaagccttctccaaaatcacggtacacctggatcctatcatccagtatcttctgcagatgcccctttgccagcttcttcacatcaatacaataggtaccgatcccggcccggannnnnnnnnntttccctacacgacgctcttccgatctcccatggacttatgctttccggtcacctttttctggaacgcctcttccctagcccggtattcctctgcctcctgctgcgtgatatgaagcctattcatgatccggtcaagatccagtttatttcttctttcttcttccagaatatagcagtagattgcccggaaggcgatctcctttgtactgatcttttcttccatcgtccactcataatcgatcacagtgaaccggtcatcctttacaaggatattggcaaagatcagatcgtaatctgtcacaccgctgtcttcgccataggaaataagctgcagataccgttcaaacagccgttcaaattcctctgtatcatcctgaaaaagtgccttatccatcaattcttccagcgtcacaccctcttcaaagtcaaagccggcatagctgccatccgccggaagggtacattcattaatcctaaggtcacttcccgcataacgttcttttaacaatttgcaggagtgctccatttcccgtacatggccttttgcctgctctgtcagcggatatttccggatttccctgccctctgctgtctccagaagtgctgtgcaaagctgatagctttctgcccggtcattgctgtatttcacataggccgcctgtggcatttcccccgtgatcaccataaaggaattggagaaatccgggaagcttccatcctcgatcagtccgtcatatacatatttttcattaaaggtaatcagtctgtccctgtcaaagttccggatattatctgtcagctctcctaccactggcagtctcctgtcagagtagatcactgtcgggaatttataatccgggtagggataatagaaggaataatcagatactccacagctttcaaggatcctgcagagtccctttctgctgaaggttctggcactgccgccatccggatatccttcaagaccggaaaaccacgttcccaggtgatcctccttgcatccggcaaagtacttaagtcccagcttattttcaattgcgatcaccagatgaccgctctttttcacatgacgcagcatgatcttcagaaaatcttcatagggtgttttcgaggggatataggatgccccatattcaaacacaccgatcagacatacgaaatcatagtctgccggaagctccggctcgatatccttaaagtttcccacatggatcgtgatattgtcctgatcctggtttctccaggcattgatatggcttcttctggctgacagatccacacaggtcacttctcctgccttctgcgccagcttgtccgtgatcgcaccacatccggatccaatctcaagcaccttatgctccttcgtaatgggaagccattccacaatattggcgcgtaagggagataaatgatacaggatcggccagctgtttttttcctcgatcagctcctgatattccactttggaagcatttttcacgataccaagcagttcatcctcgatcgctccatcactatacagatcttttcccggataatggctgtaatccagtctgacactgccgattctttctggcaggctgctgatcagctcctcctgctgcagacggatcggctttcttactccatcctgattcatgggcttactccttttcctgctgtgaaagctccttcacaacgactctggaattcatatcatagtatccaacagtatccttatcagagatcaccgtcatgtttatcacatcatacagtctgtgatatacctgaaactcttccttttcaaaaccagtcacaccaaacgaaagaagatactctcctccctgcaggtcgatcttctgggtaaaggtgatctccatgtcgctgcctgccctcaccggagaaagaaatgccttttccaccatggtattggttcctgtgatctccacacccttgatattcttgatcgtaaaggcaaaaataggagcttctatatcatgctcaaaatgcacctgcatggtgatcgtacattcctttcccttcagcaatgcactggtctctcttcccatatcatctgttattttatatccggtgatcatggcgtccttcgttccgtattccagcagctccggattcacttcacccttcactgtgccagccgccgctgccgctgctgcggtgatctccttatcagaaaggaggctatgatcgtccgcagccggtacgtactgacctaccagcacctgtttataagcatcgatcatttccttgggggagccttctccaagcttcacgccctggttcagcagtacaaccctgtcacagtatttactgatgctgcttaagtcatggctgacaaaaacgatggtctttcccatctccttgaactcctcaaacttgtgatagcactttgcctgaaagaaaacatctcctaccgacagcgcttcatccacaatcaggatctccggttcaatattgatggctacagcaaaagccagccgtacaaacataccgctggaataggttttgactggctgatgtacataatccccaatatctgcaaaatttaaaatatcatccatctttgcatcgatctccttcttggagaagccgatcatcgtaccgttcagatatatattttcaatcccgttatattccatattaaagccggcacccagctccagcagtgcggagatccttccattcacatggacagatcctcctgttggattcagaacacccgttattattttcaggatcgtagacttgccggagccattggttccgataattcccaccgtctctccctgatagatcgtcatatccacgccctttaaggcatagtgctccttgtagcgcttctttctgccaaatccaagagcctccttcagacgatctgaaggcttatcatacagcttataggccttttccagtccttttacctgtattgcgacctttttttcatccattttcccagttcctttctctgtcctgtaaagtatgccacagtctccctacagaacatctgcaaagtgaaccttcaaccgtttaaagatcagtgatcccacacagaacagtgtcacagtaaagatccagaaatacgtggaggaataaaaatgttcaaagaaccattcatctccataaatcgcattgcgatatccattgacaatataaacaaggggattgagcttcaccagcgtcaccagtctgtcatccccgatctggccgatgttccagaggatcggtgttgcccacatcccaacctgcaggccgatattaataatctgggaaagatccctgaaaaagacggtaatcgcacaggtacagtagctcattgccagcatcagtacaaacagacagaagctgtaatacacgatctggatcgtatagatggtcgggtagtatccgtagattccggctacaacaagcagtactcccgcaaaaaatacatggataaaggtagctgctaccagcttaatgatcggcaggatactgatgttaaataccacctttttcaccagatagctgtactccagaagagcattggtgccgctggtgatcccctctgaaaaataaaaccagggaacaagacctgctgtcaggaaaagcacatacggtacctccactccgctggccaccatttcacttctggtattaaagatcacatcaaaaaccacataatacatggccaccgttacaaccggctgtaccagtgcccacagaaatccaagataagaaccggcataacgctttttaaagtcatttttggcaagcttccagatcagctccctgctctggaaaagctccctcggaatgataaacatcctgtcataatacacactgaagatcacacatgccagcaaaagaagtgcacaggcacagaatttcttcagattttccgtgtggatatctggtgccagcggattattatggctgactaccataatccccaccagaatacagatcccccagaaaatgccaattcccaccggctttggaacagatttcagcacagatgccagtgatttcttttctttactgttcatgctgtccttttctccattcggtgtaagctttaagtccgccccacttctgatccttgtctgacatcacaagctcagttcccggtgcaaagggccattccacgccgatatcaggatcatcgaacttaagaccgccctcatcacccggatgataaaaatctgtacatttataagcaaactccgcatagtcggaaaggacaaggaagccatgtgcaaaattcttgggaataaaaaactgcttcttattttctgcagaaaggacaacaccatgccattttccgtaggttgcagaaccgggacgcagatccacagccacgtcaaatacctccccgctcaccacacggaccagcttgtcctgtggatattcaatctggaaatgcagtcctctcagcacattcttcacagaggctgactgattatcctgcacaaagatctggtcaattcctgctgccttataatcattataattgtaggtttccataaaataccctctggcatctccatataccgccggggtaatgatcttcagtccttcaatctcacatgtctcaactgttatttttcccatttctgtccgggaacgtctctacagaccttccgcaacctcctttaaatattggccataattggtcttcatcagtggctccgccagctttaaaagctgttccttatcaataaagcctctcttataggcaatctcttcaatacaggagatatagagcccctgtctcttctggaatgctgccacgaaatctgccgcatccagcagggaatcatgatttccggtatcaagccacgcaaagcctcttccaagggtttccacccgcagggttcctcttcgcagatattcattgttgatactggtaatctcaatctctccgcgtgcggagggtttcacattggctgcgatctccacaacatcattgtcatagaaataaagtccaggtaccgcataattgctctttggatgctcaggcttttcttcaatggaaagagcctttccgttttcatcaaattctacgacaccatactctctcggatctctgacataatagccgaaaatggtcgctccgctttctctggctgcaacctcccgaagtacctttgaaaagctctgtccataaaaaatattatccccaagcacaagtgccacagaatcatctccgataaaatctgcgccgatgataaaggcatcagccagtcctcttggctgctcctgtaccgcataggaaaacttcatgccaagctggcttccatcagaaagcagctcctcaaatacgtggatatcacgtggtgtagatatgatcaaaacctcccgtatcccggccagcatcagtgtggataacggatagtagatcatgggcttgtcataaaccggcatgatctgcttgctgatggccttggtgagaggatataatctggttcccgaacctcctgccagaacgattcctttcattgcataaccctccattccatgcattgcataatctatatcagtataccacaaaatgggagtgattgtaaatcactcccattttatctgcgttttcatgctctgtattttattttgtatggtacatatcttcgtaatacttctgataatcaccgcttgtcacattcttcatccattcctcatgctcaaagaaccatgcgatagtctttttaatgccatccttaaaacaggtttccggctcccagccgatctctgccttaatcttgtccggtgcgatcgcatagcgtctgtcatgtcccttacgatcctctacataggtgatcagatcttcactgaccagtgcctttctcggatcatcatcaggaagcatttcctgcagagtgtcaagaataatatgaataatctcgatattctgcttttcattgtgtccacctacattataggtttcaaacaggcgtcccttttcctgtaccatatcaatggccttggcatgatcttccacatacagccagtcacggacattccttccatctccataaaccggaagcttcttgccctgcagtgcattgttgatgatcagcgggatcagcttctccgggaactgataaggtccgtagttgttggagcaattggtaatattagccgggaaatgatacgtatccatatacgcctttaccagcatatctgaccctgccttgcttgcagaataaggactgtgtggtgcataaggggttgtctcatagaaataaccgccatcctcacttaaggaaccatatacttcatcggtagatacatgcagaaacttcttatctgctttaaaactgccatccggaagctcccaggctgccttggcacagttcagcataacagcggttcccagcacattggtctgtacaaaaacctcagggtgtttaatactgcggtctacatggctctctgctgcgaagtggactactctgtcaatatcgttctcagcaaacaccctgctgatggcttccttatcacagatatctgcttttacaaaggtataattgtctcttttctcaatatccttcagattctccagattgcccgcataggtcagggcatccacattgatgatcctgatctccttatcatatttcttaaacatataatgaatataatttgagccaataaaaccggctcctcctgttaccagataggttctcat

SEQ ID NO: 231 - DNA, 6601 bp, unidentified
  source 1..6601: mol_type = unassigned DNA
atcagaatcttccatacctgctacatgctggattgctccggaaataccgattgcaaagtaaatctgaggacgaactgtctttcctgtctgacctacctgtaagtcaactggaagccatccattctctacaactgcacgggagcagcttactgttccaccaagaacttctgctaagtcctctaacagtttgaagttttctttagaaccaactccacgaccaccggatactaagatcttagcgtccatgatgtttgctgtattcttaacttcttttacgatatccatgatttcaacatatctgttgtttggtgtaaatcctggattgaactcgataacttctgcttttgcacctttgattggagcaattttctgcataacgcctggacgtacagtagccatctgaggacggttatccggacaagcgattgttgcgatggtatttccaccgaatgcaggacgggtcatcagtaactgattgtgtttctgctcctggtttccaaccggattgattgggaaatcaccaatctcaagaacagtacagtcagctgtcagacctgttgcaactcttgcagatacagtaggaccaaggtcacgaccgattgctgttgcaccaactaacataacttctggtttgaattcgttgattacagatgctaatgcatgtgcatatggctctgttctgtagttcttcagttccggatcatctactacgataactttatcagcgccgtactcagcaagctgatctgcaagacctttcacatcagaaccaattaatactgcagttacttctgtatttaaatcttttgcaagttctttgccctttccaagtaactcaaaagcaacaccatttaatgtgttgtctacctgctgtgcaaagacaaatactcctttatactcttctaaacccattttattcaccacttttccttatttttattagatgatatgtttctctttgaatttgccaattaagtaagatactgcttcgtcggtatcgagagcaaccttctcgcctgcacctttacgaactttgtcagatgcttttgcgattttggtcggtgaacctttcagaccaaggttagaatcatctacgtctttaaggtcagctctgccccatacagttacttctttgtcaaatgcatcgaagattccgcctggagtcatgtaacgcggctcgtttaattcagataatgctgtaaccaagcaaggcatttttgcttttaatacatgatatccatcttcaaactgacgctcaacgattacgctgtcaccttctactttgatatcctgtgcataggaaataaccggaagtccaagatgctctgcgatctgaggaccaacctgtgcggtatctccatcgatagcctgacgacctgtgataattaaatcatagtcaaggtttcttaatgcaccagcgattgtagtagaagtagcccaggtatctgcaccacctaatacacggtctgttacaaggattcccttgtcagcgcccattgccattgcttcacgaagaacttcatcagcctttggaagtcccatggtaagtacagtaacttctgcaccgtactgatcttttaatcttaatgctgcttccagacctgctttgtcatctgggttcatgatagtgagcattgcagctctatccaaagtaccatccggattaaattttactccgccttttgtatctggtacctgttttacacatacaactattttcacggtatattcactccttatatttttaatttgtgtgcgccatgatttttcgtttaaaatccttttgcgccgatctgtcagaaactattttaataatgcgccagaaataaccattctctgaacttcgcttgttccttcgtagatctctgtaatcttagcatcacgcatcatacgctctacatcgtattctctgatgtatccgtatccaccgaataactgaactacttctgtagtaactgccattgcggtttctgctgcgaataattttgcttttgctgcttctacagaatataccttctgtgttgctttagccatagcagctttgtaaaccagcatctgagctgcttcaattctggttgccatatcagcaagcttgaactgggtattctgctgctgagcgatagaacgaccaaactgttttctttctttggtgtatgcaactgctctgtctaatgcaccttctgcaataccaagtgcctgagctgcgataccgatacgtccgccatccagagtatgcatagcgattgggaatccttttccttccggtcctaacagattttcctttggaattctgcagtcttcgaagattaactcgtatgtagatgatccacggatacccattttcttttcttttgttccgaaggagaatccaggagctcccttgtccacgatgaatgcagagaagttcttcttctttcttcctctcttatcttcggtaacacttgtgattgcgattacgatataaacgtctgcaactttaccgtttgtaataaagcatttagatccgtttaatacccactcatcaccatctaatacagccttggtctgtgctccctgggcatctgtaccagcaccaggctctgttaatgcaaatgcaccaagcttctcacctgttgcaagtggctttacatatttctgtttctgctcttctgtaccgtaagtcataattgggtcgatacaaagagaagtatgtgcagatacgataacacctgttgtaccacaaactttagataactcttctacacacataacataggttaatgggtcacatccctgtccgccgtactcctttggtaccggaattcccatgaaaccaaattttgccattttatcaactgttccctgtgggaatacttctgtctcatcaacttcctgagccagaggttttacttcgttttctgcgaaatctctgaacagagttctcgccatttcatgtttcttatctaaactgaaatccatgttttgaaatcctccataaattttattttactgagcgtcaaccggggtctttgtacggtcagcgttgtatacatagaatccttttccgctcttagcgccgaggttaccaccacgaaccattttacggattaatggacatgcacgatatttgctgtcgcctgtttcgtggtaaagtacatccatgattgcaaggcagatgtcaagaccaatgaagtcacctaactcaagaggtcccattggatgatttgcaccaagcttcatagctgcgtcgatacctgcgatatcagatacaccttccattttgataaatgcagcttcgttaatcattgggattaagatacggtttactacgaaacctgcagcttcatttacctgtaccggagtttttccgatttctacagagattttcttaatagcttctactgtttcagcaggagtatttacaccagcgataacttcgattaatttcattctgtctgccgggttgaagaaatgcatacctaccattggacgggtaagaccatttccgatttctgtaatagaaagactggatgtattagaagcaaagatacattctggtttagcaatcttatcaagctcctggaatgttgtcttcttaacgcccatatcttcgaatgctgcttctacgattaaatcgcagtctgcgcaaagattctcttttaaacctggtgtaattttagcaaggattccgtcaacagtttcctgtgtcatttttcctttttctaccagtcttgcatatccttttgcgattttctcttttccgccatcagcccattcctgcttgatgtcgcaaagagctacttcatatccttctacctgagcaaatgcttttgcaatgccctgtcccatggtacctgcaccaataacgccaactttcatgttagtcctccttaaaaattatgtattatatttacccgaaaacgaaagccttctgggttataacttgcaacgcaagacccgagaagcgttttgcacttcccgggtatatttacttattcagaaagagtgaattagtctctctcaacgattgttgagcagcccattccaccaccgatacacagagtagcaagacctttcttagcgtctctcttctgcatctcatgaagcaatgtaactaagatacggcatccagatgctccaacaggatgtccaagtgcgattgcaccaccgtttacgtttaccttagacatatcaaatccaagatctcttgcaactgcgattgactgagcagcgaatgcttcgtttgcctcgattaagtcgaaatcatcgatagacattccggttcttgcaagaactttctttgtagaagcaacaggtccaacacccatgatttctggctcaactccgccaagtgctcctgcaacccatgtagccattggtttaacaccaagctcttttgctttttcttcgctcataacaacgattgctgctgcaccatcgttgataccggaagcattacctgctgtaacaagtccaccctctttaccagagcagcatcttaatttgcttaatgactcagcagttgtgcctggacgtggtccctcatctttgtcaaacataacagtttctttcttaaccttaacaggtacaggaacgatttcgtctttgaatctgccttcagcaattgccttttcacatttctgctggctgtttgctgagaactcgtctaactcttcacgggtaattccgtatttgtcacatacgttctctgctgtaatcatcatatgataatgattaaatgcgtctgttaatgcatcatttaccatggtatcgataattgttgcattgttcatacgatatccaaaacgagcttttgtcatagcgtaaggtgccatagacatgttctccataccacctgcaacaacgatgtctgcctgaccagccataatcatgtttgcagcttcgtttacacatttcaaaccagaaccacaaactacgtttaatgtaaatgcaggaacctcgattggtaaacctgctttgatagaagcctgacgtgcaacgttctgtccctgtgctgcctggattacacatcccatcattacttcatcaacctgttctggtttaacaccagctctgtttaatgcttctttgattacgattgcgcctaaatctgcggctggagtattgcttaaagctcctcccattttaccgattgcggtacgacatgcgcctgctaaaactactttctgtgccattttctcgtctccttctgaattaaatttgccttttactattgttatttttttaacaatcttttgtaaaaaaaataaaagaaagcctttccggctctttcccgacaatctgatgttatcatagaaaggggatttttgcaagtgaaacttgctttattgagccggattttcagctttccctaataaaatacatggtttccgattacagttccattaatcagtccgttgtttctgcggaaatataagcagtttaaggttcttgtgcctgctaatacttctgtggcagcctgcacacaggacgcatctgctccggatgaaagcactactgcgaaacgaccgctggctaccggtgagaactgcccgctctgatagatgacacctaccacggtatccgggaaataactgctgtccacacggttcatgaccacgcttccaacggcaagcttcccttcatagctttcgccgcctgcttcgcactggatcagtgctgccagcatggcaacatcactggcattcactgtcccgccaccggaagcatcacttcctgtggtattatccccggtggatgtcccatccggatttgcattattatctgaagcagctggctgctgactgttaataagttcctcttcctgacgcttaatctcctcctgacgggcagcatcttctttcgccttctgtgcctctaattcttcctcataggctttctgtcttgcgatttccgcatctgtgtctgctatttccgtctctgcatctgctacatccgactttgctgcgcttattttttcctgctgggctgccaccagactgtctgccttgctcttctgctcctgcttcgtctgttctgccgcaagcagttcttcttttgccttctctaaatcttccttctgctgttttaattcagccagtgtatcctgataatcagaaagctcctgcctgtcataatcataaatggatttggcatattccatccggtttaaaaaatccgaaaaggagcttgctccaagcagcagctccaggtaagactgattgccattttcgtacatatattgtactcttttcttcatggcttcgtactggctctcagaacgtgttgtcagctctgcaatccggctttctgctgcttcaatctccacatttttcgccgcaatttcatcctgggtatccgccagttcgttgctgatttcctgcaatccattatttaattccgtcagttcatcggaaagatttatctgatattctttcaaggaatcaagctgcgactgctgttcctctctctgacgttccagctcttccacgctgcttccggtgtccttagatgccagatccactctttccttggtgccggtgtctgcctgcaccgtcatctgtatcatcagaaacagtatcagcaatgcggaaaacatacgtcgtttactgtttttcttcat

SEQ ID NO: 232 - DNA, 39858 bp, unidentified
  source 1..39858: mol_type = unassigned DNA
cctcatcaagttcatctgaattaagcgttatcgacttttcgcacaaaacatgttttcctgacgcaagagccttgcgaagatattttatatgcgtgttgtgcggtgtggaaatgtaaattatgtcaacattttcgtctttaaacagctcgtcaatatcgttgtaaaccttttcaatgccgtacttttcggcaaacgcaaccgccttttcatgggtacggtttgcaacggaataaagtttctgtcctctgcttttgagtgcggctgcaagctcatttgcgataactccgcaaccgagtgttgcccagttgtagtttttcataaaaacacctccgtatatttttcgagaaaagtttaacacacggaaatgtgtctgtcaacggttttagatagcttttctcgtatctgctccgtactttttcataatcttgcgaagttcgttattttcgctttttgaaagactaaaatacataaatccgtgcttaactgtttcatcaccgtcacacgcaggcatatatgtattacagcctattcttattgatgcattttcggaaaaaccacaagacggtgaatcaaaatatgcggatttgccctcaaacattttcttcacggtttcggcatcttcggcagacatctttgtgtcaaccttgtcgcagtactcaacatcaaaatacacggtaggctcacacgcatagaaactgattttcggcacggcaaatactgcggcggcaacgcataaaacaattgcaaccacaattacagcaatctttttcttcataacattcactccttttcgcttatccctttaaaaatatattatattaagcttgtatcataattgtatcattataatttaataggcatatacaacaattttaaaatcatttatttgtaggttaaaaaatttttcgtcaatgcttacaagagagcaattttacttttgttgaaaaggcacaaattgcatacaaattcaaagccttgcttattgagaaaaatcggtctgaaaatatgcagaaaagcagtttttaccatattataaaggcataaaaagaagaattttgacgaggtagttattgtaactaaaattgtgagcaaagtaaactttatgtttataaggtattttgcttgtttatttcgggcaacaggattacaataattgtggaaaacggaaaaggatagtatcgtttacaacggttatgtgattgaagaggttagaaattaatggagaaagtcaaaaaaatgctctcacttgcgtttgcaagtctgtttagaagaaacaaaggtcagaataccgtaaaagaaaagcgacagcgctcacaccagataaatatgctggaaggtccgctcggaaaaaaaattcttcttttcacacttccgcttgcaggatccagtattcttcaacagcttttcaactcaaccgatgttgcggtggtcggcagattttcaagcagtcaggcacttgccgcagtcggaagcaacgctccgctcatcaatatgcttgtgctgttattcacgggactttcggtcggcgcaaatgttttgattgcacgatatatcggtcaaaatgaccgtaaaaaagtttcggaagctgttcacacggtaataacactttcacttatatgcggatttcttcttctgatactcggtcagattatcgcagcaccgctgttaaggctgatgaacacaccggatgatgtaattgaccttgcggcaacatacctgagaatttactttatgggcatgccgtttgtaatgctctacaactttggttcggcaattttgagaagtgtcggcgacacaagccgtccgctctactgtcttgtaatttcaggtattgtaaatgttcttttgaacctcttctttgtaatcgtctgcgatatgagcgttgcaggagtcggcattgcaacagtaattgccgacggcataagcgccggacttgttatgatgttcctcatcagaaacgaggacgaatcaatcagagtcaatccaaaaaaactttcattcaagaaagaacatctcattatgattttgaaaatcggtgctcctgcaggtattcagggtatggttttctcaatttcaaatgtattcattcagacagccataaacggcttcggttcacaggcggttgcaggctcatcggctgaactcaactttgagtacattacatactatatagtatgtgcgttcagccagacagccgttacattcacaagtcagaactacggtgcacttcaatttgacagatgcaaaaaggtgtttagactttgtatgcttttcagctgtattttcacaggctgtgtgagcgttatattcatgctcggaagcggatttttcatcaccttcttcacaaccgaccccaccgttatcaagtacgcaatcatcagaatggcgattgttatgctccttgagcttatgacaggttcatacgaaatcagtggcggtgcgctcagaggaatcggacattcactcctccctgcaattctcacaatcttcggttctgttgtgttcagaatcatctggctcttcacagtattcaaggcattccacacctatgatatgctccttatggtttaccccgtttcatggcttatcacaggcacatccgttttgattgcctacttcatcatcagaaaaagagaattcaaaaaggtaagcgccgcttttgaaatttaaaatcaaataggtttttatggctgacatcggcattggtgtcagctgtttttgtttagaagaggctctaaaattaaaaaaataataaaaagcaattatttcgtactttttgttctgaataattgtttttttgctgtgttttatgttataatccaattataaacacacggaggtgcgacaatgactaaacggactgttgccaacaattttttatactacattttttgcggattcagcggtgcggttacttcgctgatagtatggctgtttctaaaacttatgggtttgggaatcggtcttgtgtgggatacaattccgtcaaattttggtttcaaattttatccgattatcgtctgtacggcaggcggaattattctcggaatatggcaaaagctgacaaatgccgttcccgatgaacttgacgaggttatgaaaaaggtaaaaaaagataaattttacccgtataacaaggtgcttttgctctgcatttcggcacttttgccccttgttttcggcggaagtcttggccccgaggcaggtttgacaggcgttatcgtcggactttgctactgggcaggaagtcatatgaaagacgctaaaagtaaaattcccgaactaatgcaaatcggcataagcgcaaccctgagtgcggtattctacgcaccgcttttcggtcttgcatcggtcaatgaagaaaggcttgacagcgaagaaaagcctaccgatatccgttcaacaaagcttatttcaaacatcattgccgtactttttgcggcgggaactctgtttttgcttaactccgttttcggcggaagtatgggacttccacgactcgggggttataacattacaaattttgagcgtttgtggggaattcctctcgcacttttgggcgctgtatgcggttttctgtttatcatatcttcaaagattttcggaaaatttttcgcactcattcagggcaagctcggcattattatcagcacaactctcggtggaattatcctcggtgttatgggtacatacctccccctcacaatgttttcgggcgaagaaagcattaccgttgtcaaggaaagctttgccgaatttgcaccgtggattctcattatcagcggtgtgcttaaacttgttctcacaaacatctgcataaagtcgggttggaaaggcggtcacttcttccctgtcatcttctgcggagtgagcatcggctacggtgttgcaatgctcggcggacttgacacggcattttgtgcggcagtcataacggcaggacttctcggtgtcacaatgaaaaaaccgcttgccgtaacaatgcttcttttgctctgctttgacgcaagagttattccgtggattttactcgccgcattcctcggaagcattattccgactaaaattttcggcaataataaaaagaaagctaagtgagcatataaaaaactgctttgcgaaccaccgttttctttggaacgcattgaagaaatgaccgctcttatgggcggcgaggttttatgcgtgaagaatttaacagcagatactcgtttataaaatcgtcaatttgtcagggacttgtttggtgtttttggcacacacttttgtggatagttgattcagaatttactgatttgagggctattccctacatcatttcaaacattgtcgttatcacatcaatcaccgttctgatgaacatttttcttgaaagacacaacaatctgatttactctgtgcttttgcattttgggtttaacataatttatgtattccccaatgctgatataatgttctttgtgatactgacaatcctctatttaatcattactccgcttgccgtgttgttcagaaataagactaaaatccgcaaccaacgctaacatttcggttaaattcagttgatagacacgatcaaatttttaatgtaaaatttgtaggaaattattttttaatatggtgaaaattagtttttcacttcaaaatagtaaaagaaaataatatatacaacttattttaggaggataaatatgcttacacatatcggaacagacactatagaaacagaaagattgatactccgcaaatttaaaatttcagacgacgaggctatgttaaaatattggattgccgatgaaaaaattcaatctctgtattccgaacctgtttacaccacaaaagcagaagttgatgaacttctcgaaaaatatatcaattcgtatcaaaaaaatgattactaccgttgggcaatcatagaaaaaaattcaggtgaatgtataggtcagatagcatattttcttgttgacagcaaaaataattttgccgaaatagaatattgcataggctctgattttcaatgcaaaggatatgctaccgaagcaacgaaagcagttatacaatatggatttgataaaattaatctgcacaaggtacagatttgtacaaagacaataaataaaccttcaaagcgtgtcatagaaaaatgcggttttacatatgaaggaacattgcgtgattacttttatatggacggagaatatgtaggtcgattgtatttttccatgttaaaaagtgaatttgaatcaaaacaaaattaaacaggaacatttatctacacaaaaacctccctgcaatcgaattttgccttgcagggaggttgtattattcttatatggaattttattttacttgcggataattattgctttgccgttgcaatgaatctttccgtttgaaaccgcaactgtttcacctctgatttcgttcttatagtcgccgtcggggaggtcaacttttacatctgccgactttgatttaaggctgaaaatgccgacttttttgctcttgttgttgtcacgctcaagaattgcaatatcgttttcatcgtctgcatcggccttgaaataatcgtcatcatcaagaacggttttcttgattgtatcaagctttgcaaaaaggttgcttaaatcaatgcctgtgttgcgtgggaaaacatccttgtcaaaaaggcttggagtttcgtcacaaccaaactcctgaccggcatagatgagagttgaacccttcaagaaatacagaaaagctgtgtaattttcaaggtcgctcttttccttaacatagtggcaaattcgtggctgatcgtgattttcaaggcaacgcattttatcgtaattctgcggataaattgcctcctgataattgaacatatccatataatttgaaagtgtggtttcgccctttaaatatttgtcgaaaacctcacggatatcgtagtcatattccatatcaaaagcatcaaaaagctcatagtcgcttgcggcataaattccgctcttgcgagagaacacattgaaagagctgtgtacgctttcggcaagccaaatgcagtcgggatttacctttgcaacagcctctctcgcctgtttccaaaattcaacgggaacgaatgatgcaacatcacaacggaagccgtcaacaatcttcgcccacataacgagtgaatcaatctgataccgccataattctttgttagaataatcaaggtcgattatgtcgctccaatcaccgactttgttgccaaaattgccgtccggctttctgtagaaaaattcgggatgttcaaccgaaagatttgagtcaggcgaagtgtggttatagacaacatcaatgatgcacttcatgccctttgcgtgaattttttcaacaaggctcttgaaatcgtccattgtgccgtattcgggatttgttgtgcgatagtccttgtttgcataaggacagccgagagagccttttttattcttgacgccaatcggatgaatcggcataaaccaaatgatgtccgtgccgagtgattttattcggtcaagatcctctgcaacggcattaaatgtgccgtcatttgtgtgattacggacataaatcgaataaataaccttgtttctcaagctgatttcagtattttttgccatttaaaacatctccttatgtatttttccacggtctgtttttaccgttccaacctcgttctgcccagtaatttttatcggcttcattccagccgcttttctgaatcattctcataataaagaaaaagccttttgtttttaaacctgccttaactttgccgttatttttctttaccttgttggcaattgaggtagtctttttgtcaattttctttttgagttcatcggtgacgcctgaataatttgttgcacgaacattgacaccgtaacgataagtttttggaacgccccaaaagaacatactgtcggcgatatccttgttggcagattttgtacccgaacctgcggctgtcgaaattacaaccgcctgctttgtgaacattttctgttcgggacggtgaaccatccaacgataaccgtaatgatcaaggaatgctttcattgagcctgtgcaatgataaacatacacgggcgttgtgaagatgagtacatcagcctcgtccatagcctcggtaatctttttcagtcgctcataatgcggacaaagtgtttcggattttagaaaacactgcgtacaacctacgcaaaaatcgccgaaatctctcggaagaaaaaactccgtaacctcgccgcctaatttatcggcaacctgcttgccaatatgataggttgagcctttatggttctgaccgtttattactgcaattttcattttatgtcaccaaattcatcaatttcaagtcaattttagcacaacaaagcaatattgtccatatgatttttatgccttttaaatgctttttaatgcggattttttattaaaaaaacagctccccgaaaacggagagctgtggtaagtacaaatagatttgtcaaacaaatcagaagtcgatttctgtatcgtagtagcaagccttgagaagtttttccatttcttcctgatttggctggcgtgggttagaacctgtgcaagcatcggcaattgcgttcttggcaacttctgggagcttttcgaggaattctttttcgtcgataatgctctcgtcagccttaacgccgcccggaccgtagttcttaatgccctgcggaatattgagctgatcgttcattgaacggagttcagcgatgagtgcgtcaacaagttcttctgttgtttcgcccttgaggttgatgaacttagcaatcttagcataacgctcagctgcaacaggatcttttgagttatacttgataaccttaggaagatacatagcgtttgcacagccgtgaataatgtgaccgcctgtgaaagccgcacctgtcttgtgagccattgagtgaacgataccgagcagagcatttgagaatgccatacctgcaaggcactgtgcatcgtgcattttgtcacggcaagccatgtcgccctcataagacttcttgaggttgtcgtgaataagctcaattgcatggagtgcaagcggatctgtatactcacagttgagagttgaaacataagcttcaattgcgtgagtcatagcgtccatacctgtgtgagcagtaagtttagccggcattgtttcggcaagtgcaggatcaacgatagcaacatcaggtgtgatattaaagtcagcaagcggatatttgataccctttgcatagtctgtgataactgagaaagccgtaacttctgttgcagtacccgatgttgacgggatagcgcagaatttagcctttgtacgaagtgtcgggaaactgaacggagtgatgatttcctcaaaggttgtgttgggatactcatagaatacccacatagcctttgctgcatcaatcggagaaccgccgcccattgcaacaatccagtcgggttcaaattcacgcataacagcggcacccttcataactgtttcaacagatgggtcaggctctacgccctcgataagcttaacctccatacctgcttctttaagatagtcaacagccttgtcaagaaaaccgaaacgcttcattgaaccgccgccgacaactacaacagcctttttgccggataaatttttaagacttgagagagcatccttaccatgatagagatctctcggcaaagtaaatctgtacattttaattacctcctgaaaggatattttgtcaacttctccttgactaccgtaattataacaccgaagatttataaagtaaataccttttttgaaaataatgtgtgtttattttgtgaaattttcactatagttctttattggaatttatgttgagaaatatgctcagttacagcccgtaaatgttgtcatcgcccttggcatatttcttaacagcctccataaaaagctttgcagcaggatttgaaatattctttccccatgccataacataggctatgcttgtgtccgcatcatcaataaggtatgaatcggtgtattcgtcagaagtatatgcggcgaccgaggttggtatgacagacacgccgattcccgatgacgatgacacatatatggaaacaagatcgtcaaatgaattactgattttaggagtaatgtgaaatgtgcggaacaagtccataatttccatatatacaatcggtgcaaccgattccgaaagtaccagaatactttcgtcagccaattcggaaagcttaacgctttttcttccgctgaattttgaatttttcgctgttacaacggacaaagtttcattatgtgtaatgattgattcaatacctgagctttcgggaaccatatctctcggcataaagcagaagtcgtattcaccgcctgtgattgcaagcgtgcggtcagcctcgtcaagctgtcgcacatcaattgtgattcccggatatttttccgcaaagtcggcaatacattttgtcgggaacgaaagcgaggtaacatcgcagccgagcgtaattttaccctgacctccgtcatgcatctgcttgataacggtttttgctttctttaaagtttcaacaatttcaatcgcatagggcaaaagtgccttgccctcgcttgttatgataacatcacggtgagagcgtgtaaaaagctgaaccccaaactccttttcaaggtcgcttacatatctgctgacggttgactgagaaacatagttccgccttgccgcctctgaaaagttgagcgtctgagccacagttataaagcaattgagctgatttatatccataataacctccgttttgacaatttcccgcagtattttgtcggtttttttcaatattatgcaaaactgtaaatttaagactgccaaatcgtcatttttgcataatcaacggtattgaataatttttccatatttggtacaattcaagtatagcataataatatgcaaaatgtaaataacttattttaaaacaaggagcttaacgaatgaagaaaatagttgtaaccggtatgggtgcggtaacacctgtcggcatcggtgttgaaaactactggaataatatcacggcaggtgcatcgggcattgacacaattaagacttttgatccgtctgaactcgctgttcagattgccggcgaagtaaagaactttaatccgtccgactatcttccaaaggatttaatcagaaaaacagatccgtttatgcaatacgcttatattgcggctgaggaagccatgaaacagagcggaatcaagattgaacccgaaagaacgggtattgttatgggtactgcaatggcaggtattgcaacaatcgcatatactcaggaggcactcacaggcgcatcacacaaaaaggtaggtcctcgttttattcccaaaattctcggaaacattgccgccgcaaatatcgcaatcgactacaatattcagggaccgagctttacggtaagcacagcttgttcgtcaggcggtgacgcaatcaacacagcttgtatgtgtatgcagagcggcaaggctgatattatgctcgcagtaggagcagagtccgttctctgtcctcttgtaatttattcgcttgccaacgcaaaagctctttcaagaagaaacgattcgccaagcactgcaagccgtccgtttgatgttacccgtgacggttttgtaataggtgaaggcggcggtgcgctcgttcttgaaacagaggaacacgctcttgcaagaggtgcaaagatttatgcagaaatcagaggttgcggcaacacggatgacgcttaccatgtaactgctccgcatcccgaaggacgaggtgcaatcgcttgtatgaaacaggcaattgcagaggcaggaatcaatccttccgacatcggctacatcaatgcccacggtactgcaacaaacaagggtgacacagttgaaacatcttcaatcaagaaggttttcggcagcactctcccctatgtaagctcaacaaagggcgcaacaggtcatatgatgggcgcaggcggtattacagaaacaattacctgtgtcaaggctattgaaacaggcacagttccgcctacaatcaatctcaacgaggttgaccccgaatgtgccggcattgactttgttgcaaataccgcaaagaaagccgaaatcaactttgccatgtcaaacgcattcggattcggcggtcagaactcaagtattatcgtaggtaaatacggcaaataatctgccgacaaaacaacatacaagcaacacacatatgtgtgtataaaataatgtacatccatacataataggacaggaggatattatgaatttaacatatgattcacagatgttcagagaaacatttgaaagtgaatttacatggcttaacggctttatgagaaatgtaagacgcttttcggataaacctgctgcaattgatcctcagagcggcagaacatggagctacaaagaacttaatgccgatgcaaacagatttgcaaacgctatgaaaaaagacggcgtcaagaaaaacgacatcgtgtttatgcagctttacaactcaccgcagtttttgttcggttacattgcgccgcagaaactcggtgcaatctcaaatcccgctaactttaacctatcaccgggcgaaaccgcagaaattatgggacacaacaagcctgttgtttatgtttatgatgcagacattatgcaaacagccgtacaggctcttgaaatctgcgagcataagccaaaattgattctctgcgttaataattccaaaaaggaagtaactcttcccgaaggacacattttctttgacgattacatcaaggacagcagttacgaaaatccgcctgttgactatgcaccgcatatttatgacgaggttttaagacttcagacctcgggtacaacaggcactccaaagggcgttccgcttaacgcaatcaacgaagttctttcggctcacgatgtaattatgcactttccgctctcacccgttgacattacgatgaatatgacaccgtggtttcaccgtggcggtattcattcgggcggtcctacacctaccctttatgcaggtgcgtgtcttgtgattatgagaacattcaacccgagaagctgcatggactttatcgaaaaatacggcattacattcatcacaggtgttccgtcaactcttgagatgcttgcaaaccgtcaggaaaaacatcagaaaaacctttcttcgctcaagggcattattaccatgggcagtccgcttgaaaaagccgcttgcattcgctatcaggaacttctctcccccaacatttttaacggctacggcacaacggaatctttctggaatacatttcttcgtccgtatgaccttcctgaaatggcaggttcggcaggcagatcatgcacagatgatgaggtaagacttgtaaatgtttatgacgacagaaaagcagagcccgatgacacagtcccctgcgataacaaaacagagggagaaatcatcatcaaatgtccgaacaaaactacctactgctatgtaaataacgaaaaggctacaaaagacaagttctacaagggttggatgtacacaggcgacatcggcacttggaacagcgagcagtttgttacaattgcaggcagaaaagatgatatgattatcagcaagggcgaaaatatttatcctgcaagaattgaggaaattctcaactcacacccgaaggttcaggaatgtatcgtaacaggtgttcccgattcaacaagaggcgagtgcgttgcggcatatgtaatcaaggccgacgaaagtcttacggttgcagagcttatcaatttctgcgacggctcaccgaatatttcaaaatatcaggctccgagatattaccgctttgtcaatgaacttccgcagactgcaacaggcaagaaacagcattttgtaataaaaaaacaggcagcagaggaccttaaaaacggtttgttgcttaaaaaataattacggattttccgtatatatgtaatggagaaaatatgaccgagaaattatacaaagcaaaggtttcatactatgaaacagactgtatgaacattgttcatcactcaaattatatcagatattttgaagatgcaagaattcagtatatgcacgacatcggttgtgatgttgccgaaatgcagtcaaaaggattgtatatcccaaatgttgacgcatatgcccgttacaaaaagccgcttaaattcggcgatgagttttccgttgaagtaagccttgtattttttacgggttcaagaatgatttttgactataaaatcttcaacaataaaaacggagaactttctgcaacaggcagaacaacacactgttttgcaactcccgagctaaaaccgataagcataaagcattcaaatcccgattattacaatcgacttcgtgacaacattgtcgatacggaagatattacaataagaagataaacaattttacaagcaaaaagtgcgtaccaaattttggtacgcacttttttgatataggaaaatatcagtcatcaaagttgggagtctgaattgcatcgtagcctgtttctcccgtacggattttaaccgcctgtttaagatagtaggtaaatattttaccgtcacccgggttgcccgtaaaggctgtttttctgattgcctcaattgtttttctctcccattcttcggaagaaacaacaatttcaaacttgattttcggcaagacctgaacatcaaccttctgtcctcttacatactccgacatacctcgctgaattccgcagcctacaacctgatacgctgtaattccgtttacgccgatatccgtgagagcctttttgacatctacaaacatttcttcacgaacaacggcctctatttttataagctgaatatcgttattgttttccatactttaaaacctccgttagttgtcaagaccgttaaatgacggataagcagattcaccgtgctgtgaaacatcaagtcccataagctcatctctgaggtcaaccctgattttgcctgtaagaagtcttgtgatgccgtagcagatgagtgttccgacaaccgcaattataattgtgatgccgatacctgccgcctgagcaccaaactgtgcaaactcaccgtacacaagaccgttacctgcactgctgttgattgccgtgcatgagaacacacctgtgagaagtccgccccagataccgcctgtaccgtgacagctgaatgcgtcaagcgcatcgtcaaagccgaattttttcttgccgtatgaaatcataatatagcaaacggggcttgttgtcaaaccgataataactgccgcccacatcggaacaaagccggcaccgggcgtgatacctacaagacctgcaaccatacccgtgcttgcgccgataagcgtaggctttttgttcttgataatatcacagagcatccacgagagcattgcggctgcggctgaaacacccgttgtcataaatgcgtgagccgcaagaccgtcggcggcaagtgcagaacccgcattaaagccgaaccaaccgaacataaggagcgacgcaccgagtacaacggtcgggatattgtgaatcctgtaaattgaatgttcataatcgtgacgcttgccgaggagtatgcagagtacaagtgccgaaacacccgaactgatatgtacaacatcgccgcctgcaaagtcgagagcaccgataccgtctacacctaaaagtcctccctgtccccacaccatgtgagcgagcggataataaacgataagcgaccagaaaattgtgaaaacgaaaattgacttaaacttcattctgcctgcaaccgcacccgtgataagagcaggggtgattacggcaaacatcatctggaacgcagagaataccatattcggaattgacgcatcatccgtgtaaccctccgtgagtgaaacaccctcaagaccgagccaacggaaatcaccgataaaagcatttcccgaaggagcaaacgaaagcgaataaccgaaaagcacccacataacaattccgataccgataataaaaattgatgtcatcattgtatttacaacatttttctttcgtacaagaccgccgtagaacattgcaagacccggagtcattacaaatacgaaagccgcacaaagcagcacaaagcctatatttcctgaatccatttttaacctccacataaaccgtttttgccgaagcaaaaaaataaagctcacaatgtttttatctgattttgcaagtttttaaaaatttgttgcaaaatcagaagaaaccaaagtgaacttccttgtcctttttatattcagttttccgaaaacttcgtaagacctttgccttactgtcttgaattataaagccttatcaaccgattgtcaatacttttttgaatattttttaaagttttttgctgttttttaaattacagtttacaataacaggtcaaaaatctaagctacggcacaaatttaatttttgcaagtttctttaattttcttgcaaattattttttgattacagcatattctttgtagcgtttgtagcggcgaacctcgttcgccaatcggtttggttacaaaaccaaaccgacttaatataaattatttgtttaagataattatgatataaaaatacaattgcgatttattcatttcgtgtttgcacacgaaatgattggcgaacacagttcgccgctacattaaattgtgcaaacagctactatactacgctcgggcataatatgttttttatattgcaaaccatcttcccgaccgcaattttccattttcaattttcaatttttcatttaatgaacctatctacacgaatcaggtacggcggctcgccgtaccggcggataatatcgtccctacaaaataaaaactacggtcaacatagtcctgtcaaccgtagttaaaatcaagatattttattttattttgcaaaatcggacgctctgctttcacggataatattaaccttaatctgtccgggatattcaagctcttcttcgatttttttacagatatctcttgcaagcggaatcatacgctcatcatttacaatttcaggcttaaccataactctaacctcacggcctgcctgaattgcaaaggtacgctcaacaccgtcaaaagaagacgcaacctcttcaagcttctggagtcgcttaatgtagttttcaacattttctcttcttgcacccggtcttgcggctgaaatagcgtctgccgcctgtacaagacaggcaacaattgttctcgcctcaacatcaccgtggtgagcgtgaatagcgtgaataacagcgtcgctttccttatactttttggcaagatcgacaccaatctgaatatgtgttccctcaacctcatggtcaatggatttaccgatatcgtgcaaaagacccgcacgcttagcaattgtaggatcaagaccaagctcactcgccatcatacctgcaatgtatgaaacctcaagagagtgatcaagtacattctgaccgtagcttgtacggtaacgaagtctgccgagaagcttgacaagctccggatgaatgttatgaacacctgcgtcaagcacggctctctcacctgtacgcttgatttcggattcaacctctcttcttgccttttcaaccatctcctcaattcttgcgggatggattctgccgtctgcaataagcttttcaagtgcaattcttgcaatttctcttcttacaggctcaaagcatgagagcgtgatagcctccggcgtatcatcaataataagatcaacacccgtaagagtttcgatggctctgatgttacggccttccctaccgatgattctgcccttcatctcgtcattgggcagaggaacaaccgaaattgttgcctctgaaacctgatcagctgcaagtcgctgaattgcaagcgaaataatgtttcttgccttgtcgtctgcttcctctttgagctgttcggtatattccataatcttaaccgacttctcgtgagcaagctcattttcaagctgtgaaagcaaatagcttttagcttgttctgccgtgtagcccgaaattttttcaagcatttcaaactggctctttttcagagtttcaacttcttcgagttttgcatctgcatcacgaagctttttgttgaccttttcttccttgcgttccatattgtcaagctttttgtcaagagtttcttccttttgctggattcttctctcctgacgctgaacttccttgcgtcgatcggaaatttctttctcgctctcgtttctgaaacgatgaacctcgtctttaccctcaaggactacttcttttttccttgcttcggctgttttgattgcatcagccacaatcttctttgcctcctcctcagcacttccgatttctttctcggctgtgtttttgcggatggcaattccaaggaaaatacctgcaccggcaccgataacaactgcggcgacaatgcagataatacttatccacaatggcaatctggacacctccttagtttgattttttaatatttcacagttcccaatcaattagactttaaaggtgccgttaaaaagatattcaattttcatttttactttgtaaatatttttaatacattatatatacatacgcaaccgcaaaacaccgtacaggttgcacagagcgtttcaaaaggcgaaacgccataaaaattacaaaaaatatctatatataacggctcttttaaagagtctgattaaaaaagtcgcaaaagtcaaaaactgtacttttgccaaaatccgcatcagcggacgatataattttataataaaataaccaaattgtcaagaataagcacgggaattttgcagataattattacggaaataaaaaagattacagctttttgacggttacagcttaaatttgccttaaaaaagcaaaatgtgaccgtgttttttaccgtatttgtaaaaagctcaaaaatttttcgttaaatttttgtcaagctattgaagaaatgaaaaaaatgtaatataatagaagcaccttagaattttaggaggaatttttttatgtcagtaaaagttgcaattaacggtttcggccgtatcggtcgtcttgctttcagacagatgttcggtgctgagggttacgaagtagtagctatcaacgatcttacagatcctgctatgctcgcaaaccttctcaagtacgatacagcacagggcggctactgcggtaagatcggtgaaaaccttcacacagttgaggccggcgaaggctcaatcatcgttgacggcaaagagatcacaatctacgctaagccaaacgctgctgagcttccttggggcgaactcggtgttgatgtagttctcgagtgcacaggtttctatacatcaaaggcaaagagccaggctcacattgatgccggcgctaagaaggttgttatttctgctcctgcaggcaacgacctcaagacaatcgtttacagcgtaaacgaaaagactcttacagctgacgatacaatcatttcagctgcttcatgtacaacaaactgcctcgctcctatggctgacacacttaacaagtatgcagaaatccagagcggtatcatgtcaacaatccacgcttacacaggcgatcagatgattcttgacggtcctcacagaaagggcgacaagagaagagcaagagcaggtgctgctaacatcgttcctaactcaacaggtgctgcaaaggctatcggtcttgtaattcctgagctcaacggtaagctcatcggttctgcacagcgtgttcctgttccgacaggttcaacaacaattcttacagctgttgttaagggttctgatgtaacagttgaaggtatcaacgctgctatgaaggctgctgcttctgagtcattcggttacaacgaagatccgatcgtttcttcagatgtaatcggtatgaaattcggttcactcttcgattctacacagacaatggtatcaaagattgctgatgatctttatgaggttcaggttgtttcttggtacgacaacgagaactcatacacaagccagatggtaagaacaattaagtatttcgctgagcttggctaatctgaatttacagattattctttgggctgtcctttttggacagccctttttgttttccttttcgtaagatatttatccttatttttctttattcgtaaaattatgctttaaaatgtaacatttagtcgcagtttataaaatatacacgaaaaattagttttaaattttttgaatttgcttgaaattgacatataattttggtattatataagtgtgagcaaacaatcaacaaacaacagatattaaacaaggagcaattcttatgaattacagctttaacgaggcaagaccggctcttgaagtttttcacaccggcgattcagtgcgtgcatatgattttttgggcgcacacctcgtgtaccgtaacgacaaaaacggagtagtgttccgtgtgtgggcaccaaccgcaaggagcgtttcggttgcaggcgattttaataattggaacaacgaggcaaactatatgtataacatcggttacggtgtgtgggaagtgtttgtcgagggtgtaaaagagttttgtacatacaaatactgcattgaaagcgaatacggcgacaggcttatgaaagctgatccgtatgcttttcatgctcaaacccgcccaggtcaggcctctgttgtatatgatatagaaagctattcgtggaatgacagcgaatggtttaataaacgcaaagaaaacaacatttcatcgtcaccgatgaatatttatgaaatacatgcaggctcatggagaaaatatcctgacggcaacttttttaactatcaaaagcttgccgatgagcttatcccctacctaaaggagatgcactacacccatgttcagcttatgccgattatggagtatccctatgacggcagctggggttttcagacaaccggctactatgccccgacttcacgctatggcacaccgtctgattttatggcttttgttgacaagcttcacggtgaaggcattggtgtgattcttgactgggttccgtcaaattttccgacggacgatttcggacttgcaaggtttgacggttcgcctctttatgaaagcaacgatccaaaaacaagcaagcgtgactcatggggaacctgccttttcaactacgcaagattcgaggttacaagttttcttgtttcatgcgcaatgttctggctcgacaaatatcatattgacggcttgagaatcggcgcactctcctctatgctctacctcgattacggtaaaaccgagggtgaatggaaaccgaacaaattcggcggaaaagaaaatcttgacgctgttgattttataaaaagactcaacacggctgtccatatgtaccaccccgatgttatgatgtttgccgaggaaaacacatcgtggccaaagcttactcataaaatagaggacggcggtcttggttttgacttcaagtggaacatgggctggatgaacgatatgctgcactatatgtcactcaattcgatgtggcggccgttcaatcatgacagtcttactttcagcttttattatgctttttcagaaaaattccttctgccaatttcacacgacgaggtttctcacggcaaaggctcactcataaagcagatgcccggaaagtatgacgagcagtttgcaggcgtgagagcattcataacatatatgtacgctcatccgggcaagaaactcgtgttcatgggaactgaaatcggacagtttgacgagtggaatcacgaagagacaattcaatgggatttgcttgaatttgaaaagcataaaaagctcaaaacattttttaaggagctcaacaaattttatcttgactgcaagccgctctacgaacttgacacggtctggaaaggctttgactggattcaccatgacgattacacaaacagtgttattgcattcaagcgcaccgacaaaaacggtgatgaaattgtttcggtatgtaattttcagcccatcaggcgtgacgaatactgcattggtgttcctaaatacggtctttatgacgaggttttcaactctgatgaagagcgtttcggcggaagcggtgttgtgaacggtaataatatcaaaaccgaggtaatgaaaattcacggttttgatcagggactttcactcactctcccccctctcagcgtaatctatctgaggtgtacaaaagaacttgaacccgatgaaactcagaaagaaaattgatattttcagtcacaagactgtaattaataagtttaataaagataatataataaatatcggaggtattttaagatgtttccaaaaaaggaagtagtggctatgctgcttgccggcggtcaaggctctcgtcttggcgtgcttaccaaaaagcttgcaaagcctgccgtaccgtttggcggcaaatatcgtattattgatttcccgttatctaactgtgtaaattcaggcattgacgctgtaggtattctcacacagtatcagcctcttgttcttaacgaatacataggaaacggacagccgtgggatcttgacagtatgcactcgggtgtaaactgtctcagcccttatcaggctgttgacggtgcagactggtattctggaacagccaatgcaatttatcagaatatcaactacattgagcgttataatcctgaatatgtggtaatcctttcgggcgaccatatctacaaaatggattacaacaagatgcttgaatatcacaaggaaaagaatgccgcttgtacaattgcagtaattgatgtttcgcttgaagaagcctcaagattcggtattctcaacacaaatgaggacggctcaatctacgaatttgaagaaaagcctgctcatccaaaaagcactaacgcttcaatgggcatctatattttcagctggaaggaacttaaaaagtatcttacggaggatgaattcaaagagggttcaagccacgatttcggtaaggatgtcctccctgccatgcttgacgcaggtgagcgtatgtttgcatatccttttgaaggctattggaaggatgtgggaacaatcgacagcctttgggaggctaatatggatcttctcgatccaaaggttactttagacctcaaggatatctactcaagaaacccgatgatgcctccgcactatgtttcaaacgaggcgtcaatccaaaattcactcgttgccgacggatgcaatgtttacggcaaccttgagttctcaattctctttgcaggtgttacaatcggtaaaaatgctacgattaattcttcaatcatcatgcccggtgcggtaattgaggacggtgccgaggttcagtttgctatcattgccgaaaacaccgttgtaggcaaaaatgcaaaagtcggacaaaaccccgaagaaacggaaaatattgacgactggggaattactgttgtcggtgcaaataccgttatcaaagaaaacaccgttatcaaagcaaaaaccatgatagacagcgacacggaggtggacggcaatgagaagtaataatgtactcggtttcatctttgcggcaacacttgacgacaaaatccccgagcttgcatcttcaagaacaactgcaagcgttccgatcggcggaaaatacagaattatcgactttgacctttcaaatatgtcaaactcaggtatcagcaatgtaggcatagttgcaaaaagcaactttcagtcacttatggatcatgtgggttcgggcagtgcatatgacctttcaaagagaaggagcaatctttcaattctcccaccatatgacggcaaggctttttcaagctttgttgaaacaatctacaatatgcacggctacattgagcattgccgtgaggagtatgtgcttatttcacagggcaatgtaattactaacattgattacacagatgtttttgacttccactcaaagaagaaggcagacattacacttatatataagaatcatgcaattccgcagggctatgacagaccgattacccttgatgtagacaatgacggcaaggtaaatcagatttttgtaaagcccggtgttgttgacaaagaggtattcaaccacgcatacggctctattctcatcaagaaagacattcttatgagtgaaatccgaaacgccatcagcgttaatcagcttgatgtaaagcgacttcttcagagcagtctgggcaaatacagtatttatgcttatgaaaataagggttactgtgcggcaatcagctcaatcaacgattactttgagttcaatatggatcttatgaaaaaagaagtaagggatgagcttttcaatccgcaaagacctatctatacaaaggtaagagatgacgctccgtcacgctacggacttacaagcaatgtgaaaaattcaatcattgcacagggttgtgttatcaacggtgaggttgagaactgcgttatttcaaagggtgtttatgtcggcgaaggcgcaaagctttctaactgtattgtaatgcaggacacaaaaataggttgcaataccaacctcaactatgttatcatagataaggatgttaccatcaaggatggtcgatcacttatgggatatgattcgtaccccatttatattgctaaaaaatctgttgtataaagttgtttaaacaggaggtaatcttacaatgagaattttatactgtgcttcagaggctaatcctttctgcggcagtggcggacttgctgatgtagcaggaagtcttccgcacacactttgcagaaaaggtcaggattgcagaattgttgttccgctttacggcacaattccgcaggaacttaaaaactcaatgaacttcatcacaaactttaccgtgccggttgcatggcgtcatcagtattgcggtttgttctgggcaagatggaatgactgtacatactattttattgataacgaatattatttcaagagaggcactctctacggtcattatgacgacgctgaaagattcgctttcttctcccgtgcaattcttgaaatgcttccttacattgatttccatcccgacatcattcattgtaatgactggcagacggctcttgttcctgtttactactatctgttctattcacacagaccatggtactataacattaagagtctgttcactattcacaacattcagtatcagggtgaatacggctgggaagttaacacagagtgcgttggcattcctgcatccgaaacaaagattcttgaaatgaacggcaagctcaatatgatgaagggtgctattgaaacagctacccgtgtttcaactgtttctccaagctatgcggctgaaattaaagacccgtggttcagttggggacttcatgacgaactcaatcttcgtcattacaagctttgcggtatcaagaacggtattgacacagaaagctacaatcccgaaacagactatcagctttatcgcaactattcaaaggacgatatgagcggcaagggcgaatgtaagcgtgctttgcaggagcgtttgtgtcttgaacagcgctgggatgttccgctggtcggtatggtaacaagacttgttgcacacaagggacttgaccttgtaagaatgggtcttgaggagcttatggacacagaaaatatgcagtttgtaattctcggttcaggtgacaaggagtacgaggactacttcaactatatgcaggctaagtatccgggcagactttgcttctgtcacggctttgttcccgagcttgcaagaaagatttactcaggcgcagatattttccttatgccgtctgctcaggagccttgcggtcttgcacagatgattgcactccgttacggcacaattcctgttgttcgtgaggttggcggtcttaaagactctgttttcgacagtgccgacaactacggtaatggattcacattcaaaaactatgaatgtgcagatatgcagcttgccgtaagacgagcattgtggggcattcaggacgaccagggttggcatcagcttatgtggcgtgctatgatgagcgacaacagttgggagcgttcggctcaggactacatcaatctctacaacgataccctcaaatgggcttaatcgtgcagtcaaattttataacaaaaattcagtcggaaagcagatttcaaatttgctttccgacttttattttatttgtagaggcgaacacggttcgcctctacagtttaacaatgacattgttgtatttataaagcaagttgaattacaaatattgtaccgttactatccgccgctgcacaaacaaaaaaggttggaaactactgcggggagcagtcgatttccaaccttaaaattttgcattagtttttcatcaggttctctttattgcgtgcggaacacgaattttacctgcaagcttaccaagagcaaacacaagaataatctcgggaatgcacttaacggcaacactgatgaatcttgctgtaagataaactgtgtacggtgttgaaccgccgccgtagagtgtgtaaagccaaaaagccgtaaggaatgtttcaacgcagagcatatttgtaaaccatgcaagaacaactctgagcggagttacattgttcttataaagaaacataccgtagataaaacctgtaataaagccgttgattgtaaagccgggaaaatatgcgcctgtcggggcaatgataaatgaaagaatatctcccaaagcaccgacaattgcggcaggaatcggtccgaacattacgcctgttacggctatgggaaggaacgctgcgctgagctttacattgtttccgaaaaacggaagtgtgctgtttgcaaaaaatccaagaacaatacggagtgcaagcagcattgcaattgccgcaagagcgtagatactcttcatttcaagcaaagagctttgaatttttttgagttgtgacatattttttacctcctgaatctctgttgttgcttcaggaagaaaaaagcggacagattgctctgcccgctgaattatatgtcccaaagtaacagcgggatgcgaaatctgtaccgcaggataaacctttcgttcttgcggcaactccccgtccgcaaaacacttcacgcacaaatttctactctgtgatagatgcctttcgacaccgtatgttattatacgcctgaatttgttgtttgtcaaccaaaaaattaatttcgggtttactgaaccgttgcttttttcttctttgtaagaagggcatcgaggctgttgataagtcttgaaagcggcttgtagattatgaaaacaactaccgaaatgatgagtcccttaatgatattgaatggacctacgcagtacaggcagaatgtaaatgtgccgtcaattgcagggaaaattgcctgtcccattttgataatttctgtaagcggcataaatgacgagtagagcggaacaagcacgaatgtgttgagaaccacaccgattgccgccattgcaaccgtacctgtaagcattccgacaatcgcaccgactcttgtttttttgtacttgtagatgaaacctgccggcagaataaacgagcagccgatgagaaagtttgcaagctcccctactccgcctgtacttgtgcctttaataagaaacttaacgagaatttttacaaattcaattactgcaccggcaatcggacccatgctgaatgttccgacaagaacgggaacttcggaaaaatcgaactcatagaatgaaggtgcgatgaatccgagaggaaattcaaagaacataagaactgccgaaagtgccgcaagcattgcggttacggcaagctttgttgtctttgccgtgttgtctgaattaattgtttttgcttttgattttgtcattacgaccactcctgaaaaattatttcgagttgtcgggaaaagaaaaatcccgctacaaatgtaacgggattgcgtaccaaaataaaacagacaaaccgcctgttttgccgcatcttctcgtatccggactatgaccgtcggtgtctgaatttcacagactcggcaggctttcacctgttcgtggactttaaccaccggtggagaatttcactccgccccgaagacaactgttgattatattatatgccgattttcggatttgtcaatatctcttcaatgttttgagatattttttcgtttcatcgtcaattctgaaactttcaacgcatttccgaatcattttattaaaggttgcattatcaagcgaatttgactttatgtaccgcatagtctgttttctgcactttgcaagtgctgttgcaacaagccatgcccttgccatactcacataataatgcggatttttcgcattgtcgcaacattcaagcaccgtgtctatgtactcatcttcaagataatagtcaagcatcagcacaagacctgcacgaattatccacggattgtcgcttttggtgtattcacaaacatgagggaaaaattctgatttatactttttggtttctttgagatttgcacaaaagccgtcgcaaaccgcccagctgtctatacgctgtacaaaatcatcgctgtacatcaaaaattcttcatagctttcggttttgagcaaaccgattacaatacctcgcattgttttttcttcataagaattatcggttgtctgctctaaaaaactgcgtccgttgcccttagaaatatccttgccgagctttcgcataacaggcattcttactccgataaaaaagtccttgtcattgtcgggaatcaatgaggaatgaaagcttctgtacttttcatcggcatatgaacgaagttcccctacaaaatcatcatagtcatttttagtccaattatctcttataagctccataatacaccgttatttttgcttattctttcttttgctgtcataaatttcacacggtgagttcaggtcaagatatgcaatatcgtggtgtggcactctgtcctcaaccggcggaagctgcatataatcaccgaaaaccattctgagatactcgtcatagccagacatacacggcatttttatgccctcaaatgtgacataatcaacacccgaataaatgtgtttcggatactcaattttcatccaatgagggcctgaacaaagctccgttacacacttgtttttatcaagcctgtacttaatcatatgcttttcggcagttttccaaatcttttcacggagctttttccctctgaaaattgaaagcaaagccttactgcctgcccccacaattccgccgtgcttttcgggaacaacctgagccaaaaacagcgaataaagcattgtccacacatactgcattttgcgtgcaaaacggctgtcgggacaaacatcaagcggaaatacatcaagcacaagtccgtgcggaatatcaacctcggtctgatttgtcttgaccatagtgtaatttgtgtcggttacggtcataaaaatattgcccgtgaacatatcgctgtcggttttgagaagtcggaatcttccgtctgcgccctgttcatgccaaagcttgtacagcttttcgtagtcctcccgtggcagcataacatcaacatcatcatcccacggaacgaatccgccgtttctgagcgcaccgattaacgcaccgccgatgagatagaatgtgagattgttcttttcgcaaaagtccctgaaatacacgagcatatcaagctgtttaagctgtaactcacgcaaaagttcgggggtaagttctactttttcagtcataagtatctccgtaaatatcaaatacgggcggagattatccgcccaaaaattatttgtatgaatgaccgggaagtgtgttttccctgatttttctttttaccttttcaatgtgttctttcgcaccgctgtttttgattttcttccgccatgacggaatctgaatcaaaccaacaatcgtacctattccgtaggcaacatggagcaacgggaaaatgaacggcaaaaacacaaactgaggctgaacatttttcattgtgcaacatccgacagcgtttacaatatcaaacattccgtagattatcaaaagaatgtacaaaaaaagcggaagtccgagaaatgcaagcacggaacagccgagaagtgccattacaaaaagaaacggtgcaaagtgaaagtatgaaagacaaccgggacactccgagagtgtaagtcctatccaccgtccgtttgaatacttctgccttatcattccgtgaaggtcatttcgtgaatgctgatacgaaataatatcggggcaacagcacatcttgtagcccgccattctaatgcggtagtgaaattcattatcctcggttctgccgagattttcgttaaatccgccgaccttggcaataacctctctgcggtaagccgcatgaaaaagactgtcaagatattccttttgcgcaagcggccgtctgtacgaagcaaccgaactgccgaacagagaatcctcagccgcaagcaaggtaagcttccagcttgaaacatttgaagtgatattcggtctgccgccgcctacaacattttcgccctgctttatgttataaacatttcgtgaaacaaagtttctcggaattcttgcgtgagcgtcaactcttatgataacatcgccctttgcggtcatcagagcggcattccatgaggttgcctgattacgctttacgcattgaacaacggacacattccaaaagccgtagtcggtatcacggaatttttccattttctctttagtatcatcggttgacatactgtcaacaaataccacctcaattttatcatgcggatagtcctgaagtgcaatatccctgaaaagtccgctcaaagcattcgattcgttataggctatcatacaaagtgaaactaacatataatatctctgctcccttcaagctcgaacaaccattttgcagacattgcagaggttgtcagaaaataaggtacggcataaaatgccggaacaacaaaaaagcacaaagccgcccagccgataaaaccgataaacagctttattgtggagatgaagttctttattgaaaaagccatcattctcggaagataaactccgagcggcagatgttcgttaaaaccgtaagccaaaaatgtataatgaacaaaaataatgtaacacaccacaacaaccgcagtgctgacgataaacgccaaaacaagcaatacagccacaaccgccgtgagtgagggtgaattttcaattattttatccgaaaccgcactaagataattgaacacattgagcagaccgcttatgataaaaaacaagccgactgaaattacatcaagaataacagacttaaaaaataatttcggctttttataatagtaaaaaacatcaagaggactgcactctctgcccctgactacattacacacacttctgtaaactccgtttatgagcggcagacacacaacaacaaaagcaaaaaatacaagcccaaaaatcattgtaagcatctgctgagtctgattcggattttttacatcataaagtcctgccacagacattgcaaggctgaacgcaaacagccctgtcaaaaatgcaagcacagtgaccattacctctgagataattaccgaccgattcccctcaagaaccttttttgcctgttttctaacagttttttccgtattcattagcattcccttttcatctgaatttgttcataacgaaacgcattattctccgtcagtaaacattctgtacattgcctcaaggcaaatctgagcgtgtttaaaaaagttctccttatccatactttcgtctgcattgtgcatacgaacatcgtcatttttgaatgcaggaccgaatgcaacaccgtgacctccgagcattcttgcgtatgttccgccgcctgttgaataaagctcagccttttcacctgttacgctttcataagcgtcagagagaagctttacaagcttgctgtccttatcggcataaagcggttcttcgtgattgagaacagtaaccttgaggtcgctgatttttgcaacctttttgaactgtttgagaactctgtttccgctcacggtaacggggtaacggatatcaaacacagcctttgcggtctgtccctcaatattcacgctgctgaggtttacggtgagcgagcccgaaacagcgtcgctcattttaagaccgagtgatctgccgtttgtttccttgttaattgcgtagtcaataaatgaacagattgaacctgtttcctttgttgtgtaaacatttgagataaggtcaacaagtgccgctgcggcattgtagcccttgtccggttcacacgcatgagccgctttgccacggctgattatcataagaccgtcaatagtgtaattaaattcaaaatcaccgtcacttgcgtctgcaaggcgcatgagagtctgctcgtcatagtctgatgaatcaagcattacatacgctctgtcgggaactgcattaactgctctgcctgcatggaactggctgagtgttgttgcattatttaaaagtgtgctgacttcaagctgaagaatacccttttcggcaaagcaaatgccgtagtcgctgtcgggagtgaatgccatgtcgggaagtggatttttcttgaaataattttccatatcctccatacccgtttcttcacccgtgccgtaaatagcacgcagagtgttcacgccctttacaccgctgtccttgattgctttcaaacaatagagagtaacaagagccgcacccttgtcgtctgcaattcctctgccgtaaagtctgccgtccttttcggtaagcgcatacggcggaacgctccagctgtttcccgcaggaacaacatcaaggtgagtaagcacaccgcaaagctttccgctgttgccaagggttatatgaccgctcttgtcggttgttctctcccctgtcagtccgaaatcttctgctcttttaagaataaaattcaaggcattatcgcactcgtcattcttttcaccgtcaaccgattcaaaagaaagaagtgtgttaagatcctttaaaagttcgtctttgaagtcaagtattttgtttccaaacataataaatacctccgtacttaaatgctgattgtatctttatcagttcttattttttctttttttaactgttttaacggtcacaataaccgcacagtagattaaaaatgctccgaatgcgcaaaggctgattttgacacctgttgaaaatccgggtgtttcgtaggtgaacacaatgtcacacttttccccctttggaatcttaacagccataaagccgtagtcaaccttttcaacatctgccgccttgccgtttacagttgcggtaaaaccatcgctgtaaggaacgctgaaaaacaacaggttatcgtcaccctttttattattgtaaacagccttaaagccgttatctgtatattcaaatgaagtacaactgttcaaggctctgagattacaaacctttttgtaatctgaattactgtaatcaaacttttccgtaatgctgtcgtaatcctccggatgtttgccgtacaaaagcttgtacttttcatcgctgtagcccgtaatatcggaatacttcctcataaggtcacggggaagaaccattgcgtagagcaaagcctcggacttgtgtgcgttcgtcacaaggtcaaattcttcttcggcaatgaacttatcaaatgtgtatcccataggaatgtagtattcgttgcggtaaatatcaaaacggttctgcgttctgagatatttccaacccagcattcttgtgttgccgttttcgtcaacgaatgaattcagacttcccgattttccgtcgccacggtaatcaaaaagatacttacaactcagaaacgggcgaagtccgtatacatcaaggtcaggtcttgaagcaacatcccttgtaattccgagtgcatcgtaaaactgcattatggatgttgaaacagaactctgaaagcagttaatgctctgaatctgccagaacattgccgtattgtcaacacattcgtaaaaatcactgcgaacattgtcaatatcggcaattgtgataccgtcacgcctgtttatgatatcttctttgatggcatttgtactgctgcttgaaaaatagcctgtggcgattataaaatatgaggtgaaaagcgaaacgctcaggataccaacagtgagcataaccgtaaatctctttttgtttcgtctgaattttttgatgatgagaacgaacgcaagcaaacttaacaaagccataagaacatagagccaatagcgttcaaatgttgcctgagtgccgataaccgtatttcgaatatcgccgctctcctcatccgtatagctcacaggcataagacctataagcagagttgcgcctaccgtaattcccgccgaccaacgaatcgccctgttccaatcggtttttctgttttcaaacgccttgattgttgcaagaacaagcataagcacgcccatatagaaccatcttgcgtagtaaattgagctgttcataagctggaacatactgttcaaaacaggcacacacgcaaacacagcaagcacggcaagaagctttttgagccagctttttcggcaaacctgaaaatatgcgataactcccgtcattccgacaagcggcaaccatgccgcaacagatgcccatctgcaatttgagccgggtgtgaacacagggaacgcaggcatatctgcggggaaaaacaggcttaaaattatcagccagtatttttgcggttgactgtagacaagcgaatcccagccgttcggaagctcggcaagccttgggtttcccattaatccgagcactgacggcagcagtatgaatgccgttgcaaggaatcctatgataacctcaagcgcaagcaagagaaaatttttaactttaaatttgtaggttttggtaagcgtaatcataagaaagtagatgattacgaacagaacctgtcccacaaagaagtagtagttcacaacacaggcggagaataccgcaagtgtgaacactattctttttccgtcatagatgaatgcgtcaagtgccgcaagcaacagcggaaacattatcatcggttcatgaaaatggaaaaagaacacattgtagattgaaaatcccgaaaatgcatacagcaatccgcctacaagagcgaaattcctgtcagccacatatcttttcaaatagagatatgcggaaagtgacgcacagccgaattttaaaatcagcaacggtccgataagatacggtacagcctcactcgggaacggaattgtcagccaaaagaacggactgccaagaagataaaagctgaagcttgagagcatatccgttccgaggtcaacattgtgcatccaacccgtatcaccgtttcttacggcgtcatgcacaagctgataaaacggaatttcctgaacattgaaatcaccgtaataatagaaaacaccgctccccattatgataaacggtagaaaaagtgctgttgcagttataattgatataagaaacacacgcaaaccgaatagtttttgtgttggatatttttgcaaaattctgctcggcataaaaccctccacggagcaaaaagtctgaaaaaatctttttttcgataatttctttacttttaaattatgaatagtataatcagtaatataaatgtccttcaccgtcatttattcaaaagacacctacatattcattcggagcaacgctctgctttgcttgcagagaacagaagacactcgcatttagattacattataacataaagcgatacaaattgcactaatttttagcaaaaaacaggagaaactacctatgaatatttcacatttttacgcaatgctttcaagaatgaggtacatcaaccgttggggacttatgaacaacacacgctgtgaaaacctcagtgaacacagtcttgatgttgcaatgattgcacattgccttgttttgattcacaacaagcgtttcggcggtaatctcaatgccgaaagagccgcattgctcgcactttttcacgatgcaaccgaaatcataacaggcgatatgccgactcccgtaaaatacttcaaccccgaaatcaaaaatgcctacaaggagattgaaacaacggcaggcaacaggcttgtgtcgatgcttccggatgattttaaggacgatatggataaaatcatcaaaatgaacggtgcagatgacgatgaacttaaaaaatatgtaaaagcggcggacaagttttccgcactcataaaatgtattgaagaaataaaaatgggcaacagcgagttttcaaaggcaaaagaggcaaccgaaaaatcaattcacaacatgaatatgcccgaaaacgaggtgtttgaaaaagagttccttccgtccttctatttgtcacttgatgaacaggattgacagttaccgacaaaaaaatcaatattttcagtcagatttttcgctaaaactttacgaaaaggcagattttaattctaatttagcattaaaagaaattctcatatggtataataaactatacttgtgtattgtgtgctttttacccgattggaggagtaatatgccaaattacgaaaaaaacagtcagaaaagcaattttattgacataagctcaaataagcaggtcaaaaaattatacaacaaaaaaggcagactcaaaagaatcctttgtcttgtgttttcaataatcttcctgttgggcggcggcggaatgctctactactattcatttcttgacactctcaacttcaaagagcttgatgacacaaacaacaacacagcagcaaccaactcatcggttgcaccgcttgagagtgacgcaacaaacctttcgctttcagagggtgaacttctgcagaactccaaggagcttaatgttatgctttttggcgaagacaattcaaaaggcgataaacacggcagaagtgatacaatgatcatgataaccattgataacaatcacaaaaagcttaaactgacatcattccagcgtgacacatatgtttatatccccggttacggatatgacaagctcaacgcatcttataactacggcggagcaaagctttcaattcagacaattgaggcaaacttcggcatcaaggttgaccgttatgcggttgttgactttgacagctttaagaagattatcgacaccctcggcggtattgatatggaagttactcaggacgaaattgactacatcaactatcagatgtacaagaacaatcaggctgacacaagaacaactatcacagacgcacccggtactgttcatctcaacggtcaggaggctctttggtatgctcgaaacagaggtcttaaaaagggcgaggacggcaacgaaatcggtcttgacggtgacgactgggacagaacctcaagacagagaaagcttcttgaaactttgttcacaagtatgaaaagtgcagacctcggtcagattgtttcaattgtaagctctgtcggtccccttgtaacaacaaacctcaagaaggacgaaatcacagcacttgtttctcacgctctcacatatctttcctatgatgtagaacagtattatgttcctgaagaaggtctttggtactatgatgataaaaccgaaacatggaacggtgcaatcacatcaacaatcaaaatttcagaccttgaagaacagagaaagaagtttgcaagcttcgtttttgaggaattgttcacaggcggcacttcttcaaaagaaacaacctccgcatcaaattgaatattgaacaaaatgcagacagccaattatcggctgtctgttttactgtgacggcgagccgccgtaccctattcgtgaagacaggttaattaaatgaaaaattgaaaatgtaaaatggaaaattgcggtcgtgaagacagtttgtttaaatacaaaacatattatgcccgagcgtagcatttgcagttttttctacaaaccgagccgtaagggcggatattatccgcctgctctaatgaatttttttgttcaataaatatgttttgatatgatgaaaattccgctgtaatataacaaccgcattgcacataaaacaaaaatgcatcagaaccttacttggaatctgatgcattttatttgtttgattattattctattttcgtataataaatactcaaaaacagctgataaaattctgcctcgctgacattgaattctgcgtactttgaacccattgtaacctgaccggggactgaaaccatatcaattccgttcataccgccaagcacagcctgctgagcaagatatgacacctttgacgggttaagatttgtacatgaatacggagcggacgcattgaacaaatcgattggcgtggttaaatcttcctttgtctgctgaagaaccgtattcataaaagactgaatgtaaaccttctgtctttgcatacgcatattgtttgaatcggtcttgcttgtatcacgggttctgacaaagctttcagcctgctgtccgacaaggtgatagctttctccctcaacaaactccccgattgtttcaggtgacacaacatcaacaccgccaacgctgtcgtttagagcggaaatgccgtcaaggtcaagcgaaaagtatgtattaatcggaatgttatagaacagcctctgaactgaatttaccgtattttcacagcttgattccttaccgtcaccgtatgaatacgaaagacaaatctgctgtttttccgtgccggcatatgcaccgcctgctgaatacattgtgacatcaaccatcgaatctctcgaaatgttgaagagcgttattttaccgtttgaagtgtcgattgacacaagcataagcacatccgcctgacctccgctcgccttgactttgctgttattattttcgtcaaggttgcgcttgtcaacaccgatacacagaacattcgtcaccttttcgttgaactgatatgtttcaccgttgtatacgacatacttaccgttttcctcggtttcaatgccctgtggggcggtaacatgaatatccgtattaaacagctcgtttccgccctgataaatcaaatacgcaaccgtgcctacggtgagtataattaaaccaagtaatgtacagccgattaacaaaagcacctttttccaggttttcatctttcgatgctttgaatggtgatgatgcgactttgatctgtgctttttatagtgatttgtggtgttactcttcacgacaatgctgtcggaatcaactccgtacacatctgtatatacttttttctttttctttattaacttgctgtccttgaaaatataaccttctatatccaaccttgaaggattgcttacatgctccttgctgttcttttctcttttcgattcaagaatttccggtgtattcggatcaagcttgttttctatattttcagttgttgcctcagccgaactttcattttgtcggttcatctttcttcagcactccctgcacaagatatcttccgtcaccgctgtttaagcatgtgcttaaaacaagaattttatcatcggtagtaagctccgtatttctcttgttcacagaaacagaatgtggatttttaatcatattgagataatccgaaaatacattatcatcggaaaaatcaaacgaattcataatgtgtcggttatcatattcaaaagctgacacaatttcgtatgtaagctttctgtcgggagtgtaaacatagatgtacctgttcttgttaaagaaatcggcatcataaaagcgatggagcgttgcaaacattgagccgtttgccatattatgaccgtaaagcacagtcactctgtcggaataatcacgcttgttgcacatctgcgaatagatactgcccgaaaagctgtaattcttataaatatcgtggtcaagatataagttatcgtcaagatgactttgcaaaacaggataatttacatttgtattcggaatgtaaatccacgaataaatgtcgctgttctgctgttgaagcgacttgaaatcaatcggattttcgacctttttcacattgattgacggtgaagtcacttctgttgcagattctgttgcagaggttgtaccgttttcaatgcctgacgcatacgagcctgcgatgttatcaagactttttcgttcgttattttcatttaagtttttaacgactatgtacgcaagtgtgccgataattgcagccacaagcaaaataatcaaagctataagaaatttgtttctttttctgctcatatcaaaaactcccaatcggttatattgtatcatttttgtgtcagtatgtcaattaatcattacttgttagtaaaattttattacaatttacaaacttctgcatctgcaatacaaaacctgattattcaaacatctaatgaataaaaaagagacttccttatgagaagtctcttgatttttagttaaggttggattatttgctctttacaagcttaaatgcagccgcaccgcaagccgcaagagaaagaactaaaattgcatacggtacaacatcgcttgcgcctgtctttggtgaagttgttgaatcatctttctttgccgtagctgtagcaacaggacctgttgtgccgccgctgcttgccttacggtaataagaaatacaaacaaggtcacctgaaataataatattcatagtaggatctgtatacttgctgtcggttctgaaaggaccgcccgaaatttcccagtgatcaaaagtatagccgtcataaggaagcggctcaataaatacatgctgttcgcccttttcgtcaatacctgttgtgaacttataatcaccgtcaccgccctctgtcggaataatttcaaccttatatttgaatgtactcggttccggacttgcggcagcaaatgcgggaactgccgaca

SEQ ID NO: 233 - DNA, 17606 bp, unidentified
  source 1..17606: mol_type = unassigned DNA
ttatacaaccgtcacaacacctatttcaacttgattattgattctggggatgaatacggtgttgctcagacctgcgcagacaatcatttttgtgccgtcaaggtcaaattcgcctttgtcatatttcggaaaaagtccctgattcggagcgattactccgccgatgaacggcaattgaatctgtcctccgtgggtgtgaccgcagacgattaagtctatgtcggttttctttgcgtcctcggcaatgtattcgggctggtggtgcagaagaattgtgaaattgttctttgctttttcggcaaattcttcccacagcgttcttgacggaacatcgtcatcgggagtgtagaactcataataagggtagtcgctcattccgcctataagcacactcttgccgtttttggtgaattttatgtattcattatcgagcaatacagcgcctgttgaatctgtttcgcttttaaaatccgttccgaatttggcggcattgtcacgctcatggttgccgagacagcagtatgtgggtgcaatttttgaaagcttttcaagcacatctttcatcttcgttgtgtcgggatcgccacggttgaccatatctccgcaaactgcaataaaatcgggattttgttcctttacaagctctgcaaggtctgcgttcttttctccgtattccttgttgtgcaaatccgtgatgacaacaaatttcagctttgcgtcgttcttagtattgtttacacagtaatttgtgattgcaattgtgttgtcacagtaaacgccccatattacgagagtcacaaacagcgcaagtattattgctccgaggattatcgaaaaatttttcattcaatttaccgcccatattaagtatggtattattttaggctcgttttgtgcggttgtcaacaaatgtgtgtcgaacaagtctgattattactgttccttgtgctttgattgtcggattttgagttgatttaggaattgctttgtttgacattccttttgcactgttgtataataaatcataattgtatttatatgttactcgggaaatttacacaaagttaaacagaagaggtatgggttatgaagaagattaatttgcgtaagatgttgctggctctcgcagatgtgtttattatcgttgtcagcggtattcttgcaaattatattctcttgcttgtcggctacataggtgctgcttcaagcaaaggcttgttgagctatattgttattgatcttgtcatgtgtctgtttacgctttatataagcggaacatattcaaaattgtggcgatactttaacgcaaaggactatatggtgtgcggaattgccgtcttttcggggtttacgctcggctttgtaatctcgttgtttttgcagattccgcagagaaagattttttgtatagtacatttcgcaatagcccttgtcggaattcttgcattccgttttgttttcagaagggcttttcttgaccttaccgaggcaggaagggcagagggcggagagcgcacccttattgtgggcgcaggcaatgccggcagaatgattgttcgtgaaattcacaatgcgaaagagcagggtgatgttaataatccttcaaaaagcatcattccggtatgctttgtcgatgatgatttgaaaaagctgaatcagaagatcgaaggaatccccgttgtcggaacctgtcccgaaattgttaaaatatgtgatgaataccgcatagacaatattattgttgcacttccgtcatgtgaggaagatgagaagaggaagattcttgactactgttccgcaacagagtgcaaaatcaagattatcccttatctcggcgagcttttgtttgatgacgggcatacacagcttatttcacaggcaaaggaaatcaagattgaggatcttctcggcagaaaacccattgagtttgaccgaaaggagattcatgaccttatcaacggaaaggtttgtcttgttacaggcggcggcggttcaatcggcagtgagcttgtaagacagattgcaaagaatgatccgaaacaaatcatcattgttgatatctacgaaaacaacgcatatgacattcagcaggagcttgtgcttgaatacggcacaaagcttaaccttgtaacgcttatttcatcggttcgtgattacgacaaaatggagcttatcttcaagacatatcgccccgaactcgtattccacgctgccgctcacaagcatgttccgcttatggaaaccgttcccgaggaggctgtaaagaacaacatcttcggcacattcaatgttgcaacccttgcagaaaagtacaaggcaaagaagtttgttatgatttcaaccgacaaggctgttaatccgacaaatgttatgggcgcaacaaagcgtgcgtgcgagatgattattcagtacaaggcgcagcacagcaccgataccgaatttgtaacaacaagattcggtaatgttctcggctcaaacggctcggttattccgctgtttcgccgtcagattgaaaacggtgcgcccgttaccgtaacacatcccgatattatcagatattttatgactattcccgaggctgtttcgcttgttcttgaggcaggtgcaatggcaaagggcggtgagatttttgttcttgatatgggtgctcccgtcaagattacaacccttgccgagaaccttatcagaatgtacggtaaggttccgtacaaagatgttccgattatcttcacgggacttcgtccgggtgaaaagctttttgaggagcttcttatggacgaagaaggtcttaagtcaacacagaacaagaaaattttcataggaaatcaaattaaaatagacgaaacagatatgctgtcaaagcttgaggttcttaaaaagaccgcagaaaacaatgacagtgaaaagacagttgaacttttggcagaacttgtacctactttttgccacaaggtcaatgattaacctaaaaggagaaattttatgtgcggtattgtaggttatgtaggacctaaggattgcagtgaggtgcttgttaacgctctcacaaagcttgaatacagaggctatgactcggcaggtattgcggtttttgataacggagaaatcaagaccgtaaagaccaagggtaagcttcaggacttaaaggataagcttgcagaggtcggcactccgaaaggtcatgtcggcataggtcacacccgttgggcaacccacggcgagccttcggatgtaaactcacatccacacagcggtgcaagggttacaatcgttcacaacggtattattgaaaactatatggagcttaaagatttcctcatctcaaagggaagaacttttttaagcgacacagatacagaggttgttgctcagctcctcgactataaatacaacggaaatcctcttgaaacaattgacagtgtaatggctgagcttaagggttcgtttgcactcggaattatgttcaaggatttccccgacagagtttttgcggttcgccgtgaaagtcctcttatcgtaggcgttgcagagggtgagtgctttattgcgtccgatgttcctgcaattcttcagtacacaagggattattatcttcttgaccatgatgaaatcgtaacactttcacctgacggtgtttcattcgttgacgaacaccttgatccgattgaaaaggaacttcagacagccgactgggatatggaggctgccgaaaagggcggttatccgcactttatgattaaggaaatcaacgaacagcccgaggctatcagaacaacgattatgccgagaatcaaagagggacttccgttccttgaggagtgcggcatcacaacggaaacaatcaagaatttcaaaaatatcacaatcgttgcctgcggtactgctatgcacgcaggtatggtcggcaagtatgttattgaggatctcgcaagagttcccgtaaatgttgacattgcgtccgagttccgttacagaaatccgattgtaggcgagggcgaccttgtaatcatcatttcacagtcgggcgaaacagccgacagccttgccgcaatgcgtctcgcaaagcagaagggtgcaaaaactcttgcagtcgtaaacgcaaagggcagttcaattgcccgtgaggcggatatgctcatctacacactcgcaggtcccgaaatttccgttccgtcaacaaaggcatacatcacacagctttccgttatgtatctctttgcctttgagcttgctcttgcaaaggaaacaatcagcacagccgagtgcaagcgacttgtttcggctcttacaaaaatgcctgaggcagttcagtatgtaatcgacaactgcgaggatatctgcaagttcgttgccacaaagcttgttgcaaccgacagcttgctttacataggcagaggtcttgactatgccctttcaatggagggttcactcaagctcaaagaggtttcgtacattcactcagaaagctacgccgcaggcgagttaaagcacggcacaatttcgcttattgacgaggatgttcccgttatagccgttgcaactcagacaggtattatccccaagacaatcagcaatgttgttgaggttaagtcaagaggagcgaaggttattcttgtttgtacagacgcctgtgcaagagaactcaaggacggtgttgcggattatgttatcgaaattccgcatacagacgagcttcttatgccgattacagcggttgttccgctccagattcttgcttattacacatcaatcaacagaggtattgatcccgataagccaaagaaccttgctaagtcggttactgtagaataaacggcggtcttgtattcaattgaaaattgaaaattgaaaatgtaaaattatggtcgggaaggcagtttgcaaaatgcaaatcattgtcgcccgaccattttttatttatatgaaagtatatgcttaattgtatgagcgtccaatgaacgcttctacataacttactcttgttttcaaatttcaacggtaaaaaccttgtatttttttgacagattatgtataattaattagatatacattctaaaaagcagtattgatgaatctaatttagtttcgggggaatatacggacatgatgaaaactgtttttaaaagagctgtaacgcttgcaatttgtgccgtaacggtattttgcggtatttttgcctgttcaggcgcaacaaaagattacgagattccgcagattgacgatatgacgctttcaatgcctgacggtatgagcgctgttacaagggacagtaaaagcacagataaatatttttccgttttcggtcttgattatgacacaacaatgaaaacctttcagaacggaaatatctatcttcagggtatggataatatgtcatcggttattctgaccgtgacaatgacaaaaaatgagagcagcgagaatgtcggcaactatgctcagctttcttcaagcgagctttcaaatatacgcaacaattttcttaattccgacgagtatctgagctgtactcccgaccaaaaagaaaaagctgtgtggcttgtgtttgacgcaactgctcagagcagtaagggcgatgtgaaaacctttattgccaacacggtttatgacggtatgaacattaatatcacaatgcagagaacagagggtgatgttacaaccgttgactacgatactttttccaaaattgtatcttcggtaaaattcagcgacctgccgttttcaaagggatttattccgtacataatcatcggcggcggtgttgttatccttattttgattgtactcatcataatttttgccgtgagaatcagaaagcataaaaaggctaagaagaataacgctattcttgaggagcttgcagtcaagtataaactcggtgaaaagggtacggactacgacattgacaattttgacgattctcccgaaaagcccgataaacgctcaaagaaaaagcagaaatatgcggaagaggttgaagaagaaccggctttgccgggcagaagatatgctcccgagccgataatcgaaaatatggaagaaccggaagaaattacaagtgagtattcaaactttggttatgacacggatgatgccaaggaaaaagaaattgacgagataatcaactccgcaaaggcttacaagagtgagcttgagcgtgaggcatataaaaacaactacggttacgaggaaaacagcacggaggacgaaaaaaaaaaggagcctaccgcagcagatacctcagagactgaacccgaaaaaattgacgaaaacgaaaaagataacgcagaaacacctgaaaaacacgaggacataagctcttcgtcgggtcctacactcgttatccccgagcccgaacacgatctttttgaaacaagcgagcctgacgatatcgaccgtgaggacgatgccgatgttgaagaaaccgaggaggtttccgaacaaaagcatccgcttgaaaaaaaggttgacaagtacgcaaacatcattttcggcagtgacgatcccgaggagaaaaccggggaagaggttgatgacgaggagcttgtaagggcaaaggctaagaaaaacaagtttgacagcggttatgacttttttgacgaagctcccaaaaagtcaatgggggttatcaaaagctcagacctcagagatgccgaggacgttgatgttatcggcgaggttgaaagaaaagcagaaaccgtaaagcagaacgctcttgaaaaagagaataataaagaaaccgagggtgaaccgaatgataaacggtcaacggaagaggttcttgccaatgtaggcaaaaacatcggtaacgctctcaggggctttgcaggcggagttaagaattttggcattcactgcggatatttctgcaagaatgtttcaataatgatcaagcgtaagcgtgcgattgccaaacgcaaaaaggcagaggaagagagaagagagagagaaagacaaaaggcagagcgtgcaagaaagcgtgccgaaagaggcgaaagtgacggacttgttcaggttcacagcagaaccgaccgccgcccccagcagaatcgccaccctgcaaacagaaacaagagaagataatttcttttcttaacggaggaaaaacatggaaatgctaattaaaaacgcagtggttgtttcccctgccgacaagcttaacgaaaaaacagatattctcataaaggacggtgtgattgccgaaatcggcagcggcattacatcagacggagagattattgacgcagacggtctttgtgccgttccgggatttgttgatatgcatgtgcatcttcgtgatcccggtcagactcacaaagaggatattatcacgggatgcaaggcggctgccgcaggcggtgttacaagcctgcttgcaatgccgaacaccaacccgacaaccgacagccccgaaattgtaaagtatattcttgacaaagctaaagacgccgacagccgtgtttatgttgcggcaagcgttaccaagggacttaaaagcgaagaacccacagacattgacgctgtgaaaagtgcaggtgcaattgcactcaccgatgacggcagacctgttgaaaacacaaagtatttgagtgacgcaatgaaaaaagctccaaagctcggcatgacaattgtcgcacattgcgaggacttgtttcttgccaacggcggtaaaattaacgagggcgaggtttcggaaaagctcggtgtcaagggaatccctgccggtgccgaggactgcggaactgcaagagaaattgcacttgccgccgctcttaacgagcctattcatatctgccatgtcagcaccaaaacaagcgttgcacttatccgtgatgccaaaaggagaggtgttaaggtgaccgccgaaaccgctccgcattatgtttcgctcacggacagggagcttttaagaggtgacgctgattacagaatgaatccgcctctcagaactcaggctgatgttgacgagattatcaacgggctttgtgacggcacacttgatgccatagcaaccgaccacgcaccgcacacacccgaggaaaaggctgattttgtaaaagcccccaacggttcaatcggcatggaaacctcgtttgcggtctgcaacacatacctggttaagacaggcaaaatgacgctttcacagcttgttgagaagatgagtgttaatcctgcaaggattttgaaaatcaacgcaggcactctttcagtcggtgcaaatgccgatgttgttcttataaatcccgatgaagaatggacagttgatgttgataaacttcacggcaaaagcaaaaacaccccgtttaaaggcagaactctcacaggtaaagtcaaaaagacaatcctcggcggtaaggtagtttttgaagattgagtttgttttaattgtagatgttgatactattaaaattgtgcaaacggtagctgtactacgctcgggcataaatgttttttatttgtcaaactgtctgcacgaattggggacggcggctcgccgtgttcgctcaccaaataaatttaatttaatataaactttaacataaaggagtaaaattatggcacagaagggtgacctcctgtcggtaagacaggatatcagagtagtagacgcaacaatccgtgacggcggtctttgtaacgatttcagatttgacgacaaattcatcaaggatctttacaatgcaaatgttaaagccggtgttgattatatggaattcggctacaaggcatcaaaggaaatctttaacgaagaagatttcggtaagtggaaattctgtaacgatgcagatatcagaaaaattgtaggcgacaacaagacttctcttaaaatcgctgttatggctgatgtcggcagaacagattttaagaaggatattatcgcaaagaaggacagcccgattgacctcatcagagttgcaacatacatcaacgcaattcctgcggctgttgaaatgattgaggacgctgcaaagaagggctacgaaacaacaatcaatattatggctgtttcaaaggcaagaaccgaggatattacagcggctcttgaaactctcggcaaaactcccgtaaacgctttctacattgttgacagctacggcgcactctatcccgaggagtcaagacgacttgcagacctttactgctcaattgccgacaagtacggcaagtcggttggtattcacgctcacaacaaccagcagcttgcttttgccaacacaattgaggctatgactcagggcgtcagctaccttgacgcaaccgttgacggcatgggcagaggcgcaggcaactgtgcgcttgaacttctcctcggttttctcaagaacccgaagtatcaggttgctcctattctcaaaatcattgaggagtacacccacaagtttaaggctgagggcgttaagtggggttacgatattccgtaccttctcacaggtcagtacaacacacatccccgtcctgcaattcagttcgtaaaagaggacagacaggattattacaagttttcaaatgaactttatgatattatcaacagctaattaaatttgtagcggcgttcattgaacgccaatcgaaccgattgcaaaatcggttcgaccatacaaacgatttgaattaaagtaattaaccacgatataacaatacatttgttgtttattcgttttggtttcacaaccaaaacgattggcggtcattgaccgccgctacggttaagcaatgacattgtttaaatcaaaatatgaacgaacaaattgtttttacattacaaaaaatgaggagaatcactatggcatttgacagacttatcgaaaatattgtaaaaatgcagaatcctacggttgcaggtcttgacccaaagcttgactatgttcccgaatcaatcaaaacaaaatgctttgaaaagtatggcaagacgcttgagggtgcggctgctgcactttttgaattcaacaaggcgcttattgacgcactttatgatattgttcctgccgtaaagccacaggctgcatattatgaaatgtacggctggcagggtgttaaggctctttgtgacacaatcgcttatgcaaagtcaaagggtatgttcgttatcacagacggcaagcgtaacgatatcggcacaactatggaggcatatgctacggcacacctcggtcatacagatgttgcaggcgaaagtattgacgcattcggtgcagacgcactcacggtaaacggctacctcggaacagacggtatcaagccgcttgcaaaaatttgcgattcggacgacaagggcatttttgttcttgtaaaaacttcaaacccaagctcgggcgaacttcaggatatgaagcttgaaacaaatgagagcgtttatgagcatatgggcaagatgtgcgaaggctggggcgaagaccttatgggtaagcacggctattcggcagtaggtgcagttgtgggtgcaacatatcccgaacagctcggtgaaatgagagcaaaacttccgcacacattcttccttgttcccggttacggtgctcagggcggcggtgccgatgatgttaaaaacgcatttgacgaaaacggtcttggtgcaatcatcaactcaagccgcggcattatgtgcgcatggaaaaagcaggggcttacagaagatgattttgccgttgccgctcgtaaagaggctgagcgtatgagagatgaaatcgttggttgcatcggcaaaattaagcttggctgattaatttgcacaacagaatcacgaaatttttcgttttttatgctttagtgctatgaatttattgactttagcgtgctaaaagcgtataattaaaacgtatttatttttacaactatatttttaaattttttttaaaaagggagatatcagaaatggcaagagtatataatttttcggcaggtccttcaatgctgcctgagtctgtgcttaaaaaagcagcggcagaaatgctcgattatgagggcagcggtcagagcgttatggaaatgtcacaccgctcaaaaatttacggtacaatcattgagggtgccgaggctcttttgagagaggttatgaacattcctgacaactacaaggttcttttccttcagggcggtgcgtcaacacagtttgcggctatccctatgaaccttatgacaaagagcggtaaggctgattatgttatcacaggtcagtgggctaaaaaggctcatgcagaggctgcccgttacggtcaggctaatgttgttgcttcatcggctgacaagaccttcacatacattccaaagcttgatccttcaacattcacaaaggacgccgactatttctacatctgcatgaacaacacaatttacggtactgtttatcacgagcttcccgacacaggcgatgttccgctcgttgcagatatttcttcctgtattctttcaagaccgattgatgtttcaaaattcggcgttctctatgcaggcgcacagaagaacatggctccggcaggtcttacggttgttatcgttcgtgaggatcttatcggcaacgctatggatatcactcctacaatgcttaactggaaaactcacgctgacaacggttcaatgttcaacacaccgccttgctacacaatctacattgcaaagcttgttcttgagtggattaagaacgaggttggcggtcttgataagatgtatgaaatcaacaagaagaaggctgaccttctctacggtttcctcgattcttcagagcttttcaagggtactgttgttcccgaggatcgttcgcttatgaatgttccgttcgttacaggtgacgctgaccttgacgctaaattcgttaaagaggctactgaaaacggtcttgttaatatcaagggtcatcgcacagtcggcggtatgagagcttcaatttacaacgctatgccttatgagggcgttgaaaaactcgttgagtttatgaagaagttcgaggctgaaaacaagtaattattgaatattataattattgaatattatgatataacgggcgaacgctgttcgcctgttattgtaaattcttaaaataaaaaattaaaaaggattgattttgatgtataacattcttacattaaacaaaatcgccgctatcggcacaagccgtctcggtgataactataaatacggtgacgatgttcagaaccctgacgcagttcttgtaagaagtgccgcaatgcacgatatggaatttgccgataaccttcttgcaattgcaagagcaggcgcaggcacaaacaatattccgaaggataagtgcagcgagcagggcattgttgttttcaatactccgggtgctaacgcaaacgctgttaaggagcttgttatcgcaggacttcttctttcaaatcgtaaggttattgagggttatgaatgggcaaagactctcaagggcaacggtgcagctgtcggtaagatggttgaaaagggcaagagtcagttcgtcggtcccgaaatcaagggcaagaccctcggtgttatcggtcttggagcaatcggtattcttgttgcaaatgccgctgttgctctcggtatgaatgtaatcggctttgacccgtttatgtctgtgggcaacgctctcaagcttgctcctactgttaagctcatgaagagcgcagaagatgttatggtaaattgtgactacctcacaatccatgttccgcttactgacgacacaagagatatggttgatgccgatatgattgccaagatgaaagacggtgttcgtattctcaatttcagccgtgacggtcttgttaattcaacagcagttcttgaggctgttaagagcggcaaggttgccaaatatgttacagacttcggaacagacgatatcctcggtgaagagaatattatctgcctcccacacctcggtgcatcaactcccgaaagtgaagaaaattgtgctgttatggcttgtgatcaggttaaggagtatctcgagaacggtaacatcatcaactccgtaaactatcctgcaatttcacttgcaagaacaaatgctgacgatacccgtttctgcgttgctcacaagaatgttcccgagcttctcaagaaggttctttctcagataagcggaaatgttgaaaatatgctttcaaagagccgtggcgactatgcttacacaattattgatgttgcaggcgccggtgcagatgaccttgcaaaaatcgcagcagttgacggcgtaatcagagttcgtgcaatctgatttcgattttaattgaactttaattgttggttgtaaaaaattatccgagcattgttttgatgctcggattttttgcgtttatttgtacaaatggttacaatgctacactctggcatgatatgctttaatatcacaaactgtctgcacgaacggggtgcggtggtacaccgaccagatggtatttttttgcattggcaattataaatgttacggaaattgcaacggcacacaattctgcaacgggcaatgccgaccatacaccgtttatgcctataaacatcggcaaaatcagcattgcggcacactcgaaaacaagcgttcttgcaactgaaattacggctgaaatcttgccgttgttgagtgcggtgaaaagtcccgatgcgaaaatattcattccgcacaacagataatttattgcaaaaattctgaatccgctgagtgcaatctgctgaattttttcgttgcctgccgagaaaattccgacaagcggttctgcaaaaaattcagatgccgtaatcattgcaaccgaaattatcagcgtgatttttatgcataatttgaacagcttttgcagtttttcgtgattttgtgcgccgtagttaaagctgatgacgggtgaaactcccgaagtgaatccaaacgaaaccgcagtgaaaataaagtgaatgtacaaaatagcacttatagccgcaacgccttttgcgcctgcaaagtgcatcatctgaatgttgaacagcgctgttgtcacggctgttgaaagatttgtcacagcctctgacgagccgtttgccatagcaaagaggatttcacttaccttgaattcaggcttgccaaagtgcagagtctgctttttgttgaaaaagagcaaaagcggaattgcacccacagccattccgatgattgtgccgagtcctgcaccgattattccaaaatcccacacagccataaaaagaatgtcaagcacaatgtttgtgcaacccgacagtatcgagaaaacaagcatgatatgtggcttgtctgctgttacaaggtacgattggttgagcatctgccagcacattacaaagccatacggaatcataacgctgccgtagtcaatgcagtaggggagaattttttcgtttgagccgaacatcatgtacataggttcggcaaaaattgtgaacagcacagcaatgataacagaaatgaccgttgccgtgattgcaacaccggacataagtcggtttgcttcctcctgtttgccttctcccattttctttgcgattatagcatttgagcctgttgaaaacattaagcccacagccataaatacgagcgtgaacggatatacaatattgattgcggacaatgcgtcacttccgacacagttcgcaacaacgattccgtcaacaaccgtgtaaagtgacataaaaaccatcataagaacggttggcaaagtgaacttcagaatcgtttttgctttgataggttttgcataaattgatgttgccataaaatttccttaccctcaaatttatatttttcacagaccatttaaacgattgtatcataactttgtcgcaattacaaccgatttgtctttttttgtaaaatatgctattatatacagacttaaaagcgaaaaaaggggcggttttatgtttaagggcgcagtttttgatatggacgggcttatgattgacagcgaaaggcttgtttattcaatctggcaggaaatgcttgatgaggacggcaaagagtttaatcttgacattttcaaaaagacaatcggacttcgcagtgaggattcctacgaatattacaagtcggtttacggcgatgattttgactatcctgcttacaaggcggagtcgagaatccgctattttaagcgtatcgaaaagaacggtgtgcctgtaaaaaaaggcttgtacgaaatttttgattatttaaaatcagtcggttgtaaaatttcgcttgcaacttcaacctcgtcacaaacggctttgaagattatgaagaaaatcaatctctatgataaatttgacgcattcgtgtgcggtgatgatgttaaaaacggcaaacccgatcccgaggtttttttgatagccgcaaagaagctcgggcttgagccggtggactgcgttgcgtttgaggacagcattaacggcataaaatctgcacatgccgcaggtatgaccacggttatggtacccgatttgtcagagccgacagacgaaattaaaccgatgattgattttttgtgtacggatttaagcgaagcgataaagcatttataaattgaaaattacggcgagccgccgttcccaaggctccccctgcgagtttatggttcttgcatattgttggctcaattatccgagaaaattacaaataattacaaatggttacaatttacaaaaatacaatttagcagggctgattattatacacattttccacatagttttcaacaattgttaaaaaagaacggcaatacctgttgagcgttgctacggttactgcggaaaagggaaaaatgaaaaataatcattgaataacagcacgataatatgttatactttggtaaacaacaattttaacggaggacaaaatgaagaaaattataaataaaaagtcactcaagggtacgcttgctgttatgttgtgtgccgttatggcattttctgtctgtgcctgtgactttgactctgacacagaaccaaccaaaacggatgcacaaattcagtttgataaatattgtgacgatttgttttcggaagaacttgaggatgacgctcttaccgcacattttgacatttcaaatccgtcggactacggtttgaaatatgacgaggaggactataccctcggtcatgtgtccgatgaagatacaaaagaatcctttgatgaactgaaagaggcaaaaacggatttggaggagtttgaccgttcgggacttacttcttctcaaaagcagacatatgacacccttgaaagctactttgaaattcagctttcatatgagggtacaacagaattgcagagtatatttgcaccgcagtcgggaattgttgcaaacctctttaccaccctgtcagaattcactttctatgaaaaggatgataccgacctttaccttgctgttttgaaggacacaaaacgctatatggacgagtgcattgagttcacaaagaaacaggctgaggacggttactttatggctgaagatattgcacagcagtcaattgacgagtgtgaaaagcatattaagaatgacaagtccgtgcttgttgacgagtttgagtcgagaataaagtcactcggtcttagcgattccgagaaaaagactgttgtcgaaaccaataaaaagtattttgaagaatactacattcctgctttgaaatcagcaaattcagcacttgaaagtctcaaaaaatcaggcaaaaacgaagaaggtctttgcggttacggcaaaatcggcaaaaagtattattcggcaattgtcaaagacaaaacaagcagcagtatgactcccgaggagcttaagtcataccttacaaacagctttacaaaggttggaatgagcatgagcaatgtttcgcaggatgacttgagcaaatttcaggactataatcccgactttaaggacgccgatgaggtgcttgaatttttgattgagaatatcgaggaggactttccgactcccgttacaacctcttacacggcagattatatgagcgattccgcaaagagcgacaatgtgggagcgtactatgttcagggacgaattgacgatacaagcgttaatatcatcaaaatcaaccccgactttgcaaataagggtatgactcagatgtacacaactcttgcccatgaaggctatcccggtcatctttatcagtttaccgcatcaaatgcaaacaaggatatcccgaatgtccgcaagattttaagctttatcggcgctaccgagggctgggcgcagtatgcctcgaaatgtacgcttgattaccttgatacaagcgatggcattaagaaacttatctacgcaaacgatatcctcggctatattctctactcaatggtcgatgtcggtgtgaactacaacggctgggattatgaaaaagtcaaggagtatatgtcaacggcactcggttcagctgacagcgagagcgttacagccgcaacaaaagaggcgtatgaccttgcccgttcaaatccgggttactttctcccctataccgtaggctacctcaagatgattgatatgcgtgaaacagccgaaagcgagcttggctcaagctttgacgcaaaggagtatcacacattcattatgaatctcggaatcacaagcattgatgtctatgaaaaagcccttgatatgtggcttgaaagcaaaaagtaa

SEQ ID NO: 234 - DNA, 29410 bp, unidentified
  source 1..29410: mol_type = unassigned DNA
tgcctcattttcaggcagcagtgccttgggctctaccagtaccggtgcatatacggtgttgaatttgtgtacgatctctctggtctgttcgatcatgggcagctggtcaccacctacgggaacggtggtcgccttgaaagcggtaatatcggaagcctggctgatgggataggtaaaaaatcccacagggatgctggcttcgaagttacgcatctgaatctcactctttacggtcgggtttctctgtaatctggctacggttaccaaatccatgtaatagaaggtcagctcgcacagttcggagatctgagactgaatgaagatcgttgccttgctgggatccagtccgcaggacatgtagtccagcgccacttcaataatattctggcgcaccttctcgggattctcgatattatccgtcagcgcctgtgcgtctgcgatcatgataaaagtcttcttatattcgccggaattctgcagctctacacgtcttctcagggagcctacataatgtcccacatgtaatcttccggtgggtctgtcacctgtcaaaataattttgtccatttcatcctctcaatctgccgtccacacggctatacatcattgtttctatcataccatctttttgcatagaagcaaatgatttttctacagaattaacgctttgtgtgcaagccccctcgcattcattctgctgttctatggctggactattgcaagcagcttatccagaattttatgtgccacctgttccttgctcatcagttccagactctcctcggaattctttgtgatcagtgtcacaatattggtgtccgtgccaaagcccgctcctgcgctcttcaaactgttggcacagatcatgtcacagtgcttgctctccagcttcttccgggaattctcctgcacattttccgtctccatggaaaatccacacaaaatctgtcccggtctcttgttttccccaagggccttcaaaatatccttcgtccgcaccagagggatcgacatgtctccgtcttttttcttaatcttattgtctgctgtcactgccggggtgtagtctgccacggctgctgccttgatgacaaaatcatagtcctgcgctctggacacgattgcatcgtacatctctgctgccgtctgtaccggcaccacatttacaaacaacggcggctccacatccgtatgggctgccaccaccgtcacttctgcgccgcggtgcattgcagctctcgccagggcataacccatttttccactggagtaattcgtgataaaacgcaccgggtcaatgggttctctggtggcacctgcggagatcagcacctttttgcccgccagatccttctcgcaggcgatctccttcaccacggcttcgaacagtacggactcctccggcattctgccgtcaccgatatcgccgttggccagcattcccgtggccggagtgatgatctcatagccgaaatgctttaatttttcgatattatcctgcacgatggggttgtgatacatattatgattcatggcaggggacacaatcttcttgcagggacatgccatgaccgtagtggtcaacatatcatctgcgatgccgtttgcaatcttgccgatcacattggcagaagccggtgccaccagaaccacatccgcccgctttgccagtgccacatgttccacactgtactggaaattgcggtcaaaggtgtccaccagacatttatgtcccgtcagactttcaaaagtaatggggttgatgaactgcgtggcattctgtgtcatcagcacttccacatcacagtgctgttttaacagcatccgcgctacattggccattttatatgcagcaatacttcccgagattgccagaactacggtctttcccttcagcatagtcgtctccttttgcctgatttatcaaaaatacttcaaaactgtactcctaaaataccataagtgcatattttatgcaaatatcacttttctttttgtccgggatatgatataaacagtaggagtgtcccgaatcaccgggacaacttgtattgtatctcccagagggagaatggtaacaaggaggaaaatttcatatgaacaaacaaagtaagacaatgcgactcacgttgatgggattgtttgctgcggtacttttgctgatggcttataccccgctcgggtacctgaacatcggccccctggcaatcaccttcaatgtcatccccgttgcactggctgcaatcactcttggccctgtaggcggagccgccatgggagcagtattcggattgaccagctttttgcaatgcatcggcgtgggaggcaccagcgccatgggagcaatgctttttggcatcaaccctgtgttggccttcatccagcgtttcatccccagacttctggacggatttctgctgggatatgtcttccgttacagccgcaaagccgtaggagacagaatcgcctgcatgatcaccggattttgcagcgcatttttcaacaccgcatttttcatgtcccttttagtactgctgttcggcaatacttcctatgtgcagggactgatgggtggtaaaaacgcgattttattcatctgctcttttgtaggtgtgaatgcggtcttcgagatgtgtgcatccacgttcctgaccggagcggtagggctggcactgatcaaggcaaaagtcattcctgtatatcagaaagcagggtctgcagcataacaggagtatacccgtggtactgacaatcgacatcggaaatactacgatcggcatcgggggatttcagggaaataagctgctctttattgagaagatatcgtcccgtcgtcccctgtctgatgctggatatattgaaaaactgaatatgatcttgaacaaacacggcctgtctgccgaggcctttgagggatctatgatttcctcggttgtgccttcggtgacagccgttttttcctctgctctggaaacttttctgggacggaaacctctgattctttcccataagctggatctgggctacgagatctgtacggaattcccggaaaaggtgggctgtgaccgactggcagatattgcaggagccatttcccgctattccctgcctttcgtcaccatcgacctgggcaccgccacgacttttaacgtgttggatgagaaccgtcgctttttaggtggcctgatccttcccggtgttggaaccgcccacagggcacttttaggcaagaccgcccagctcccgaaaggggacattcatatgcccgcccacaccatcggtgcgaatacgcaggaatgcatcaccgggggaatgctcttgggcaacgcctgtgccatcgacggactgatccgccgtatccagacagagttagggcaaaaagcaacggtcgttgccaccggagggtacgcaacgaccgtcattccacattgtgaaacgaagatccatatcgatcagaatcttcttatgaaaggtctgagatccatctacgagaataatacctctactggatcaccagattagagtagcccatcaggctctcatccacagcatgtgcggcttctctgccttcacggatcgcccacaccaccagggactgtcctctgtgcatatcaccggtgacgaatacattttccacactggtctggtatttgccgggggcagtttttacgttggtgcgttcatttaattccaccccgaaagcatcggtaatatatttctgacttcccaaaaatcctgctgcgatcagtacgatctccgcatccaggatctgctcacttccggcgatctcctgcatcttcatgcgtccggtagccggatccttttcccaggacagcttcacgatcttcacggctttcaggttgccgttcttatccttgataaattccttgaccgtagattcatagattctcggatcatgtccgtagactgcaatggcttcttcctgaccgtaatcggtcttgcagaccttcggccattcgggccagggattgttctctgctctcttgtccggagccttgggcatcatctcgatctgggtcacagacttggcaccgtgacggatggaagttcccacacagtcattaccggtatcaccaccgccgatgatgaccacgttcttacccttggtctccacatattttttatcttcaaagttcgaatccagcaggctcttggtattggctttcagaaaatccaccgcaaaatagattcctctggcatctctgccgggagcattgatgtctctaggattggaagcaccacaggccagtacgacacggtcaaaatcatgtaacagcttggatgccttgatgtccttaccgatatccgtaccggtgacaaaggtgacgccctctttcttcatgatggctatcttacggtcaatgatctgtttctccagcttcatgttggggatgccgtacattaacagtcctcctacacggtcggagcgctcaaatactgtgacctgatgtcctctctggttcagcagatccgccgctgccagtccggaaggaccgctgccgatgactgctacctttttgccggtacgcaccacagggggcttggctgccgcataaccctcgctgtaggcgttttcaataattgcatattcgttctccttggtggagaccggatccccgttcaacccgcaggtacatgccgcttcacacaaggcagggcatactctggaagtgaactcggggaaattgttggtcttcttcaggcggttgtaagcctgctgccagttgccggtatataccaggtcgttccactccggcaccagattgtgcagggggcatccgctggccataccgcagatcatcatgcccgactgacagaacggcacaccgcattccatacatctggcaccctgtaaacgctgcttttccttcggcagatgctcatggaattcattaaaatgctgtattctcttcttcggatcctcagccacgctgacttcccttttatattccataaatcccgttggttttcccatgactctctccattctgcagacgcttcggcgtcggaagaatcgcgaactaaatttcatatttagttctgcgataaactaatttgtggcgcccgcggcacaaattagtcgtgtgaaaagcaatctatcaagattacttttcacactggcctcctactttctggtgttggcatagaatgcttcgatctgtgcctgctctgcgctcagtcctttttcctccatctggacgatggtctttaagactctctcataatcatgagggatgatcttcttgaacttgggcagatactctccaaagttgtccagcacttccttacccttggcggaattggtcagtgccacatgctcctggatcatggatttcaactccagcacatcatatttggatgtgatctcgctggaggataccatttccttattcagacgcttgtacagatcgttgccttcatccagtacataagcgataccgccgctcataccggctgcaaagttttttccggtgggtcctaagactaccacacgtccgccggtcatgtattcacaaccatgatcacctacaccttcgacaactgcgatggcacctgagttacgtacgcagaaacgttcgcctgccacaccgttaatgaatgctttaccggaggttgcaccgtacagtgccacattaccgatgatgatattttcctcagccttgaacttgctgccctgaggaggatataccaccagcttaccgccggataagcccttaccgaagtagtcattgctgtcgcctaccagttccagggtcagacccttgggaatgaaggctccgaaggactgtccgccggcacccttgcacagtacatggtaggtatcctcttccacatcatcgcccaattttctggtgatctcacttccgaggatcgtaccgaaagcacgatcggtgttgctgacgtctacttcgatgctgcgcttctgtcctgcgtcgatggcttttcctaactgctttaacagcaccttctcatccagtgtcttctctaactggaagtcatagacctgcctgggatcaaaggtcaccttctgcttgctgccctcgtaaggattgcttaagatctgggtcagatccacttcctcctgacgatcggtcagatgctcttttctcttcagcagatcagttctgcccaccagttcatctacggtacgcacgcccagtgctgccatgtattcccgcagctcctgtgcgataaatttcataaagttttccacatattccggcttaccgcggaagtttttccgcagctccgggttctgggtagccacgcctaccgggcaggtatccagattacatactctcatcatgacacagcccatggtcacaaggggtgcggtggcaaaaccgaactcctcggcacctaaaatggctgcgatggctacgtctctgccgctcatcagcttaccgtcggtctcgatgcggactttattacgcaggccgttcatgatcagggtctgatgggtctctgccagtcccagttcccagggaagtccggcattgtggatggagtttctcggtgccgcaccggtaccgccgtcatagccggataccaggatgacctgggctcccgccttggctacaccggctgcgaccgttcccacaccggcttcggataccagttttacagagattcttgcctgggtgttggcatttttcagatcatagatcagctgcgccagatcctcaatggaataaatgtcgtgatgagggggcggagagatcagggacacaccgggcgtggagtgtctggtcttggcgatccagggatatacctttcctccgggcagatgtccgccctcaccgggttttgctccctgtgccatcttgatctgaatctcctgtgcacttaccaggtaacggctggtaacaccaaaacgtccactggctacctgcttgatggcggaacaacggttcagtccgtccggtccgacggtcagacgatccaggtcctcaccgccttcaccggaattgctcttgccgtgcagatggttcatggcgatggccatggtctcatgggcttctttggaaatggaaccgtaggacatggcaccggtcttgaatctggtcacaatggactctaccggctctacttcctcaataggcacaccctttttcggataattgaagtccatcagtcctctgagattcttgatggaatcttcgtcgtttaccatggcagtgtactgtttgaacatctggtaatcaccgcgtctggtggattcctgtaacatatggatggtagcgggattgtacagatgctcgtcaccgccgctgcgcatcttgtgatgtccggggctgtttaaggtcagatcgtttttcagtcccagaggatcaaatgcctgagagtgcaggtcgtctacctgctgctcaatatcttttaaggtaatacctcccacacgacatacggtgttggagaaatacttactgatcacttccggtgcaataccgatagcctcgaagatctgggaaccctgataggactggatggtgctgatacccatcttggatgcgatcttgacgatgccgtggaggacagcattgttgtaatcatccactgctgcatagtaatccttatccagcatattgctctcgatcagttccttgatggtatcctgtgccagataagggttgatggcgcaggcaccgtaacctagcagcgtagcaaaatggtgtacctctctgggttcgccggattccaggatcagtgcgactctggttctcttcttggtgcgtaccagatactggttcagggcggatacggccagcagggaaggaatgggcacatggttctcatccacgcctctgtcggacaggatcaggatgttcacgccgtctctgtaagctctgtccacttccacgaacagtctgtcaatggcacgctctaagctggtgttcttgtaatatacgataggtacgacttctactttgaatccgtctaccttcatgttcttgatcttcaacagatccgtgttggtcaggatcgggttgttgaccttcagaacattacagttcttcggggtctcctccagaatgttgccctcggtaccgatgtatacggtggtggaagtcacgatctcctcacggatcgcatcgatgggcgggttggttacctgtgcaaacagctgcttgaaataatgaaacagcgggtggttcgtcttgcttaagacgggaagcggcgtatccacacccatggcggcaatcgcttcactgccgttctttgccataggcagaatgctctgtttcatctcatcgtaggtataaccgaaagctttctgcatccgctgacgctcttcgtaggtgtactcagggacacgctggttcgggatgtgaatactcttcaattctgtcaggttgttgtccagccattcaccgtagggctgtctggaagcatatttttccttgatctcctcatcgtcaatgactctgccctgtacggtatcgaccaagagcatcttgccgggacgaagtctttcctttaacttgatcttcgtgggatcaacaggaaggacacctacctcggaagacaggatcagggtatcatcgtcagtgatcagataacgggaaggacgcaggccgtttctgtccagtaccgcacccatgatatctccgtcggagaacaggatggatgcggggccgtcccagggctccatcatggtagcgtaatactggtagaaatctctcttggtctgggacatggccttgttgttcgcccagggctcggggatagcgatcatgaccgcaagaggcagttccatgccgctcattaccaggaattccagcgtgttgtccagcatagcggagtcggaaccggtcttgctgatagcaggcagtactttgtgcagctggcctttcagatgctcggattccatgttctcctccctggccagcatcttgtcggcattgccgcggatagtgttaatctcaccgttgtgtaccatcagacggttcggatgggcacgttcccagctgggattggtattggtggagaaacgggagtgtaccatggcaatggcggattcgtaatcttcactctgcaaatctgcgaagaaggtacgcagctggcctaccaggaacattcctttatatacgatcgttctgctggaaagagaaactacataggtatcatcggaagactgctcgaagacacgtcttgcaatataaagtcttcggtcaaagggaagtcctttttccacatcggcaggctttttcacgaatccctgcatgatatagggcatgcactctacggccttatgtcccagcacattggggaaggtaggcacttcacgccagccgaggaattccattccttctttttccacaatgatctcgaacatcttcttggcttgattgcggcgcagctcttcctgcgggaagaagaacatgccgacaccgtattctctctctccgccgatgtccatgcccagagccctggtcactctggcaaaaaatttgtggggaatctgggtcagaataccgacaccgtcaccggtcttgccttccgcatccttaccggctctgtgctccagattctctacgatcttcagcgcattctctacggtcgcgcggctcttctctccgtgaatattgacacaggctccgataccgcagttatcatgctcaaattcttcccgatataacggtgccttgggcagctcctgttttacatcaaacatatagttctcctttccggttttctatttctctcatcttaatctgtctgttcctattcagaacctcattcgcaagactgtgctttcagcactttcctgcaactaaaaaaggtcgcaatgagactctttcgagcgcctcattgcgaccttttctgtactatacacctatttttctcatttgtaaatatagatttttccttgaattgtcagataatttgtcaattcagttgttcacacggctgttgtctgttaattgtgttaattttcttttttaagccatgcttttagcacaactctttggggatttccctatttttcctgtctccgaccatacactttgcttgtcagtccctgatagattgcagagaaatgtctgctttctgccattgcggtccggagaggtgccagggtcagtgccatcacagcgcggtagcggaacagttctacgggtttcatgtattttgccgtgatctccttatgctctgcggcactgcgtttcaggttctcctttgtctcggagtagccgccgccttcgtaggaagatacggtaagccccagatactgcatgggagccttcgcccggtaatagcaccacagaaaatgttcataatctgcgcggatcttgtattttggttcgtagggcttctgtcggcacaggtctgcggcatagaagcaggactgatggcagggaatgttgcggtaacagacaaagccggtgattcggggcggggatgatatcttcgtgtccgttttcgcgctgtaggtatctccgtagtagatgccttgcagtttcatagggtgctgttccatgaattgtgcggtgtgtgccagaacttccttgtcatagaagaggtcaccgcagtttaagaacagaatgtaatctccggtcacatgagagaccgcctggttcatagcctcgtagatgctgtgatccggttcctggtagagatggatccgcccgtcagtgcgcatggactctatggatccgtcacggctgccaccgtccttgacgatgacttcgaagtctggacaggtctgggccaggatactgtcaagggtctgattcagtttggtgccggggttcaggcatactacgataatgctgaatttcatatgttgctccttttaagatgtaatatctccgcagtcgagaacagggcaaggaacgcggcacgttcgcactctgtcgcagagcgtagcggcacataagtgaccaaagtacggtcactaagtgccgacgtctgcttacggcctgcttatccttaccctgttttcggctgctgggttatgaagtccagttcaatacagtttatgaatgcggtcagaactggtaactaatgtgttttgttatctcattaaaatatatttttctgtttgtgcaaagtgatcaaggatacaactgccactgccaggaaaatcacgcatacaggccagctgacgaagccggtgacggcgatggcggtataggagaggcagtaggcgaggacattggatgccacatggacaaagactgccattttgaactctccaaagtattcgtaagcatatgccatcaggcagccgatgaggaagccgtatacgccctggacgtaattcatgtgataaacgccgaaaatcagggcagacagggctatggcgagtttgatatccatgaatctgcggagatatccgtagataactccgcggaacagaagctcctctgctatgggggagatgaagccgaatacaaggattcctacgataaagtgtgcggaatattgctgggctgcaacttcggtataggcttcggatttgttggtcactcccaggagttcaaacaggaggttgcatccgataacggcaccaatagtggttgccaccagcagggcatattttgccttaccttcttttttcagatggcttaaatgcatatcctctttgttcttcgtgatcagaagctttgccgtggaccataccgccagtgctccgccgatgaagcccagtgccgctatgatactggacacatctccggaatagccgttatatgcaccggtctcatccctcaggatcagcagatctaccagtccaccggaagcaccggactgtgccagctgatacaacagtgccagcagcgcatactgcaccgcattgcgcaccaggataaacatcaggaacgaatacaccatggtccagattctctggtacatgggatttttctttttattgtcgggattgctgttcaccagttcctcgctgccgcgaagcagaaatttttccagttcttccacggattgtacgatgtagtccgcttttgcttcctttaactcttccttgcttccgtagccataagtcacgcccacgctctccacgcccaacgctctggctccttccacatcgaactttctgtcaccgatcatgtagacctgatccggctctatgggattctccttgaacagctgatgcagggtctcctgcaccacctgatccttcgtctctcttctgccgtccagctcactgcctaccaccacggcaaaatattttttcagatcaaaatgctccagtatgcgttctacatagatctggggtttgctggaagccagtgccagaaaatagcccttggattgcaggttcttcagcatctccggtatgccggcatacacttcattttcaaagatgccggtatcctgaaaccgctctctgtattttgctacggctttttctgcctgttcgggcgtaaaaccgtaaaattccataaaactgtcccgaagcggcggtccgatgaatggctccagcttgtccagatccggttcctcaataccgaaggagtgcagcgcatactgcacgcaggtcgtaattccaattttgggatctgtcagtgtaccgtccagatcaaacagcagatattttttcattcttataattcctttttttgtatctgttccaagccctgtaactatcgcaaaatattcattgaataccgggatccgcaagaatattctgtaattgttatgaggctctgaatagttaccctttctttctatagcttgtggggtccgcaaagcattagaagctgcggatcttgtccccgtcatcctcagtgtttttcagtgccttgatctctacgtcatagcccacattggcattgacctgcacatggaccatatcgcctacttttttaccaagcagtgccttgcccagaggagattcgttgctgatcaggccttccagggaattaccgcgaacggtggtcacgatcttgtaatcctcctgggtgccgtcgtcgatgaattccacggtaacagtgttgttgatgcccacctcatccacggcggagttctcggagatcacctttgcggtcttgatcattctctccagataacggatccggctctcgttctgattcttgtattttttcgctgcataatattcaaaattctcactgagatctccgtgggctctggcttccttcacgtcctccagtgccttgggacgcaccaccagcttacgatactcgatctcatcttccattttcctgatatcactgggtgttaattcatcgtacataatttctccattcctatctgttcaattacttatatcatttattgacagtttttctcccggctcggcacatgctgattttctaccaacagccgtccttctttttcttcggcgaccgaccttcttttccttcagcagacgcctttcttttcttctgacggccgacctttttccttccggcagccaaccttcttttcttgcagaggatgaccggtcgcagtctctatgctgtcccggtgtgtccagcattctacaactgcattgcgtagattaccgccagagacagaatgatctgaataatggcaaaacggaatacggtctgtgtattggaccagtcccacaccttacgcacatgatcatgcaagggagtacgcacatttttcaaaatatgaatcttcaggaagcggagcagggaaaccttaagcagtcccaaacctccgtccagaatcagcaccagagccaacggaataaacaaaaacggacagccgctctttaaaatagcgatgctgatgaacagtcccatggcccgggaacccgcatctcccatcatcagcttactgggtgttgcattgtaccacagataacccagaatgcatacggcaaacagcaggatcaggaaagaataggtctcattgacgtccttcatacggtccacgatatagatggacatgatcgtaatgatcgacagggttccggagagtccgtccacaccatcggagcaattggtcacgttcacggaggtccataccaggatcaccgtgaggattgcgaatactacgggaggcagcgtgaactttacatggaacagtgccagttccaccacgttggagttgtatttcaggaaggtgatggctaccagtgccgccacgcacagatccagaaacccttttttgtattcaccccagggagtcttggaggcgtcatccagaaaaccggtcatcatgcataccacgatcagcagcagatagatcaccagctctgcacttaagggtgcaaacagtaaaacagatgccacaaatgccagcacaaaaatgattccggcgcctcttggctttcccgcggacaattttccatcatgggcaaattctcttccggcgtccttcggcagatacgggcttaattttgccgtcgccagtactgtcgctccgaaagcaaaaaggattccaaaaaaagcaaggagagaactgcttccctccggcaagatcatctgtaacatactatccctcgtttccacatgagatactcacttttgtactctcatgctgtattttctgataaattccgtgactgttcacaggggcattcgagaaatgaacacctcagaacagtcacaaaatattttaacacaaatatcccggaatctcaaataatttccacaacagttcagttctgaacatatctgggagcagaaatcatgcttgcatgattttgcgggcaaatatgtgcaagcgctaagcgccaatctatgagcaaaggtagtcacgaagtgacataaaagcgtgttaatgcgactcccgtgaacggcgcggctgaactgttacgtttgacagtttccccacggtggactactatattcttatgaacactttctgaaaaatagccataaaaggagaaatactctatgatgatccataagatcgaaccgcataaatattacccggaattccgaagccaggatcctaaaccttccgattatctgctgttatttgacggagaaaaggtctatctgccctcccatacagaaaacagtgatgtaacggatacttccgctggtgccggcatctctgagcatcctcaagtatatcttcctacttttgaagaagtccatggactcttgggaatccgtcagcctatggaacgtttttttctggactgtgaatatctcttttccattgatgaccgagcattcttccgcaagacgacggaggatgccggtgctctcatgctcccggaagaagacctctacgcttccggtgtgttccgtaattttgagccggaatatctggcatttgctggaatcactgccacccagatcaatcgtttccgtctggaccggaaattctgcggccgctgcggacatcccacaattcacagcaccacagagcgggcctgcatctgcccggagtgcggtcagatcgaatatcccaagatctctccagccgtcattatcgccatcgtggataccgaacaggacaagatcctgctgacccgctacgccggcggttcctatcgtcactgggcactggtggccggcttcgtggaagtcggtgagaccttcaagggtgctgcccgccgggaaatcatggaagaagtcggtttaaaggtcagcgatctggtctattacaaatcccagccctggtccttcagcgattccgccatgatcggcttcttcgcgaagctggagggggatccttctattactttgcaggaatcggagcttggcgaggctgcctggttctccagagaggatgtcccggatctgccctccactatcagtgtcggtcaagaaatgatcacattattcaagaatggtggggatccgttctgccagagataattgatacatttgaaagtttttcacttctattccatgatataccttgactttgtgcccccgtggtttcatgccccgggggcttatttagtttcttttcctctctgcgccccgctctctcgatcttcccggggcttaatcagcttcttttcctctctgcgccccgctctctcgatctccccggggcttaaccagcttctttggttctctgcgccccgctctctcgatctccccggggcttatttagtttcttttcctccctgcgccccgctctctcgatctccccggggcttatttagtttcttttcctctctgtgccccgctctctcgatctccccggggcttaatcagcatgctccttatatctacgccccatgtacgcaaaaatctgccttcgacaataacattgtcatgaggcagactcctttctgtacttattctcttcactgtttcttcacctagagcatcgtagctgtcatcgcttctcattatctcaataagcggcacttcttcgctaccttcactaacagatatcccttcgggaagctgcgaagctcctgctccgtgatgccccgcatcaatatcagcatgacaaaatagactacagcagcaattacgatcgcaggaatgacagagatccgcatggacttcgtcaccatatacagcccctcgtagattgcccaggctgccgctcccataaacgcggaggcgaacgccggaatgacgaaagtctttacgatctcctgccggtagcctaccgctcttcttaccgcccactggttcagcacacacatcataccggaatacagcgtattagcgatggcaatgctgtacagatccagtcttgtgaacatcagaagcagcactgctgccaccgtctgcaccaccagcgagatccccgcattgatgatcggggtattgactttgccaagtccctgcaaaatcgaactgttcagagtcgacagcgcataaaagataaccgacagtgacaatgtcattaaaagagctgccgccagattcaattcctctgccgtcttattcgtgaacagcagactgatcaccggcttcgccagtacaaaaagtcccacagcgcagggaatcgagatcaccatggtagtcttcactgccagtccgatcttctctctggctcccttcacatcccgggctgccatcagctgtgccacagaagggatcatggccgaagccatggccgaggcaaaggcaatgggaatattggacattgtcagggactgtccggagaaaataccatatttttcataaatagataccgtatccagattgcgaagggacggataccatttggtgtagatactgttgttgaccgtactgcttaagttatatacagccgtactcaaaataaacggtgtcaccaccagtgtgatcgtcttgaatatctgtccgtaggaatccacatgttcatgcctgtcacgctgcactctgcgcaggatcattccacgattcagagcatagactcccgccataaaaagcagcgccactaatacgccgacaccggtacccagtgcacttcccactgcaccgtaggttgctctcatcacctgccctgcctgatccgccggaacctccatcgttcccataaacatttggatcagaagatatgccgcgcctacgctgactaccgcattggcgatctgctccaggatctgcgatacggaggtctgcgccatgctcttatgtgcctgaaaataccctcgtaaaactcccaggataccatagacgaagatcgtcggtgcaaaggtgcgcagtactgtgaccgctgctccggacacgaataatcccgctccgaaaaacagaaaaaggctggctataccgccaaccaccagtacatagatcatggctccatggaacaatctatgggcattgcggtattccttctctcccagcttctgtgcaatcgccttggaaatcgccgagggaatactgtaggaggagatcagcagaatgattgtataatagttatacgcagactggtaataccccagtcccagattcccaatgacactctgtaaagggcccctgtaaaggagccctatgattctgctgatgattccggctgccgccagaatacctgcctgcatgataaaattgttcttggaactgttcttatctgccatatgtaatcttaccttatttcagttctttatccgatcagccagtcatacatctcctggtattttccggcggatactttccaggaataatctgtggccatggcacgatccacgatcttattccactctctcttcctgtcatagtaaatatgctccgcatagcggatcgtattcagcatctcatgtgcattgtaattcgtaaaactgaagcctgtaccggtgctctcatactcattatagggctgtacggtatccttcagtccaccggtctctctgacgatgggtacggtaccgtaacgcagtgcgatcaactgactcaggccgcagggctcgaacagagacggcatcaggtaagcgtcacaagccgcatagattttatgggacagtgcatctgaataataaatattggcagacaccttgtctccatacttccagtcgaaatgacggaacatattttcgtaacgttcctcaccggtgcccagtaccacgaactggatatcgtcctggcacagttcatccatgacataagcgatcagatccagacccttctggtctgtcagtctggataccagaccgatcatcattttcttatcatctacgcgaagtccaagctcttcctgcagggctcgcttattcttcaccttttccttgcggaaattcactgcattataggcttttacgatatttttgtccgtctccggattgaactctccatagtcgatgccgttgacaatacctcgcagatcatgacttctcgcacgcagcaatccgtccaggccctcaccgtaaaacggagtcttgatctcctccgcataggtatcacttacggtggtcactgcatccgcgaatacaataccgccctttaacagatttgcatccttataagcctccagcttgtcagaggtaaaataatactccggcaatccggtaatgctctgtaccgtcttcacatcccattttccctggaacttcagattatgtatggtgatcacagacttcatgttgcggtagaaatctccgccatggaaacgctccttcaggtataccgggatcagaccggtctgccagtcatggcaatggatcagatccggctggaaattcaaaagcggtaatgccgacagcactgccttgcagaaatatgcatacttttcgatctcatatctgggatcatccccataaggcttgaaaccaccgaaataactctcattatcaatgaaataataatgcaccccggcttcctctgcctccagaacacctacatacacattctgccagttgaaatccatgtagaaatgtgtcacatacctgagcttatccttcatctcctgcttcatacaggtatacttcgggataaacactcttacatcaaaatactccttgtcaatatacttcggcaaagatcctacgacatccgcaagtcctccggtcttgataaaaggtacgccttccgatgcggcaaaaagaatttttttcatgtaaaccctccacatatgctacggcttgtattcaaaatatagattgattataccatgtttacgattcatagaaaagagggcatcgataatttacaaatcttttagagtctgccggttccacctcagcttctgtaggaaagccggatcctgtcagcgatcagtgcgataaattccgaattggtaggtttgcctttgcccgtgtcgatcgtgtaaccgaacatggcatccagggtctccatgcgccctctgctccaggcaacctcaatggcatggcggatagcgcgctccacgcggctgggtgtggtctggaaacgcttggcgatggtcggatacaggatctttgtgatagaactgatcattgccggatcctctaccgacatcatgatagcttcccgcagatactgataccctttgatatgtgccggcactccgatctcatggatcatatccgtgacatctttttccaggtcatggatgacttcccgggtctgttcctttttttctgtcgcttttacagtgctgtctttggcgtttttcgtagaaggaaccgtgatcataatttggaattccttgttggcattcatcagatcccccaggattttgtatactttttcattatcctttgtagttgtaatgtttaatttttccattaaactacctccatgactacaaaactacttttttcacgtaccgttctattataaatagatatgcgtcatggcttcaagcagaacccatcgcaagatttttccaaatttcgcagaataaaaaaggtaaaaaaggcgcccggaatgacccggacgccaataagagggaaaatgtataagtagaaaaactacgagtaaagcaaattaaattaatgatgctctgccagggtgtgaagtgcttccttgatggctgccttcacggtctcatcctgttctgcattcagtctgtgcagtagataggtcttggcatattcggtgccgatgcttcctaacgcttttgctgcttcgacacggatcttcgtatccggattgtcgatcatgtgggcaatgctgttgacactgtcttcatccttgatccggctcaacgcttccagtgcggctaccaccaccgtgtcatcggaagaactcagatatttgatgatcttgtcggattttcctttctcctgtaatttttgaatcttacttaaatcatgttgttccataaacacgcgcctctttctttctgccagcgcgggggcggtaaaatcgtctccgggccatcactatatgtcgcctgtggtgattggcttctcttgataatgttatgataacaccttatctgtcagaaaacaattatagcaaaatgaaggatttctaaaaattctataacctggttccacttgtcccatcacgttttttatactatactgatatcatcaaatcgaaagaaggtactctcatgacaaaacaggaaatcagcgagatcaaaaagctgttcaccccgaaaaactgctccatcacccggatctgcggatgctatgtggatggagaaaaaaataaaaagacagaattaaagcaggcctttctggcactgccggaggaggaaatgttcaagtatttcgagattctgcgtaagagtctgtccggcaccatcggcaagaatctgctgaatctggaattcccgttaaagagtgaaacggagggcggcactcaggaatttctcctgcgtctgcgggacagccgtctgaaggatgatgcattgcttgagcagttctatgaccgcatcatcgaatcctatgaatatgtaggaaattatctgattctgctgatccatgacgcctacgatgtaccgggtcgtaccagagacggcatcgaaatggaggatgcttccgacgaagtctatgactacatcctcacctgcatctgccccgtggatctgtccaagccgggattgagctataacgctgtggaaaataccttccagaaccgtatccgcgactgggtggtaggtatgccggatgcagccttcctgttccccgcattcaatgaccgcagcacggacctgcacagcactctgtattattccaaggatgcggaagaattaaaggagaacttcgtagacctgatgctcggttgtccgcttcctctgtccgccggtggtcagaaggagaccttccagacactggtagaggagacactgggcaatacctgcgatatcgaaacggtgaagaacattcacgagaaaatgaatgagattgcccaggaacataaggaagatcccgaacccgtggttctggataaaaatgaagtaaagaccattttcgccaacagcggcgtggccaatgaccgcatggaggtcttcgaccagtgctttgatgcgacggccggagaagatacttccctgatgatgaccaatgtctacaatccccgcagctttgaagtaaagaccccggatgttgtcatcaaagtgaatcccgagcgcacagatctcgtcaacacgaagctgatcgacggcagacagtgtctcgtcattgagctggacggtaatatcgaagtcaatggcattgccgtacgggctgccggaagcggggatgctgacagcgaagaggaatagccaataaaaaaccagaaacagctttacgaatgcaagcattcgacatctgtctctggtttttattttgctctgaatagctacatcttaaaatactgcatgctctccgctagctcatccgcaatcttcttcagctgtccggcactgtcatatacctgtttaaaggtatccagaacctcctgtgtctcggtataggtctgctgcgtactatctacattgtcatgcgcaatctgcgaaagcttctccacagcctccatgacttctccacgggactcggccagtctgccggtactctctctgatctgcagaatactctgcatggaatcctcgatctcttttaagacttccgatacattggttctggtctcctgcatgctgccgctctgttccgtaataatctcctgcatccgctgcatgatctccatttcccgggcggaatcttccatcagttctctggtggtctcttcgatctcatggccggactggttggactgttctgccagctttttgatctggtctgccaccacagcgaatcctcttccgctctctcctgctcttgccgcttcgatggaagcattcagacttaacaggttcgtctcctcggcaatggaagtgataaattccattgcggaattgatcttctggatcgatacattggtgcggtcggtctgctccttgacttctccgatgatccgctccacttcctcattgatactgcacagctgtgccagcgtatctgctgtcttcttactggacttctgcatggaatccgcatgggcgttcaacgtatccacctctgtggaagtctcggtgatatgatctcccatgatccgcatgttctcggaagtactctcggaattccgggactgctcggtagaattctctacgacctgatttacagcactctgtacctcgttcatggtaccgttggtggtatccgccgcagttcccaacgccctggaagcctccagcagattctcggaattctgggagattcctttcaagatacccttcagagtatcctttaattttacagtaacccgtgacagatctccaatctcatccttccgctttaacatcttgtcatcaacccagacagtcagatcaccctctgcgaccttccccatgataccgatactcttcttgatattctggctgatggaagtggccagcttcagtcccacgcccatacacaggatcatcgccacacatacagctgcaccgatgccaaaaatcatgccgttcaccacggcatccttgtcctctttattcgcacccacgaataccatgccgatgatttccgcagagtcgttctgatagaccggcataaaatatccgtaattcatgactccgtccagagataccgcactgctgaaatactcttctccgttctgtaataccttctccacgatcctgtctcccgccggagaattcagaatccgatctccgttactatccacggcggaagtcatgatgcgacggtccccgtagaaaaaagtcacatccattccggtgttgtccctgatacgatccaccaggctctcggaacgggagatattatagctgcctttccagatgtcgccattactggattccatatagtcaccggtgttctggtcatatgctgccagcgttgccgcagccgttcccttcagtccttcttcgatttcctccatcatggaactgcgtaccgtcgtcagcataaaaaagatagataacagtcccagcaatactaccggtccgatggtcattgacagaatctttttttgtatactcatgaaaatgccccctattctaccacagatacggtcttgaaataccagttgatacctccggtgatcgttgcatcatccagcgttgttccttctttgcccacagtctctcccgtattagtctcgatcacaccgtcaaataccccgttttctccggataaaatctgcttcttggcttcttctactttctctttcgttccttccgcacagaaatccgccagatccgtgatgcccaccagattttcattcatgccgccgtaatagttgctgccgtcccaactgccgtcaatgacgctctgcactgctgccgtatagtaagcactccagttccataccacactgcacaggcaggactgcggagcatccttactcatatccgaattatatccgatactgtacacacctttttcctgtgccagcgtctggggatatacggtatcacaatgctgtgcaatcacatcacagcccatatccagtaacgtctgtgccgcagctttttctccctcgggatcgtaccagctgtttgtcacctttacgtatacctttgcgtccggattcaccgaatagatgccgagtgcaaaggcatcaataccgccggtgacctccgaattggaagaatccatagctgccacatacccgattttattggaagaagtattcattcccgccacgataccgctcaaatatctcgcctgataaattctgccgaaatagttgttgaaatttttaccgttgctcaggtagccggtgccatgggagaagtacacgtccggatattcttccgccatttccgctgtagtttccatatatccccagctggtagtgaagatgatattacagccttcatcaatacattcctgaattgcctgtctggtctcctgcgtatcactgtcattgacattaatcttgcggatgatctgatcatctgataatcccagattctgctgcattccctgaattcccagatcatgcgtatatgtataaccgctgccctccgccggatccgacagatgcagtactcctaccttgatctcctcctttggaatccctgcagtctgtgttgttgcgctgctgccgctttccgactgcaccacctgcgtagtcccattgctaccccttgcctcatatccgatgtttgtagcataatcgtccacttctccggtatttccgcagcctgtcagtaatgcacaccccagaagaattgccgctgccttccaaaagtttcctgttttacctcttcccatatacaagtacccctttctcttttgtagtctatgtatatctcttatctctaccgtctgatttctcagaatcggttgattctacaaatataaactacagccttcccttattccctgctgccatggcaggtaaaataaatcacctgatactctttcgcgatctctgtaaggaaccgcattgctcccttggtccggttctcatccagattcacaaaagggtcatccagaatcaaaaacggcttctgttcctcatacatggcttccaccaaagcaagtctcatacagataccgatcaggtcacggttgcccagactcaggtatccgatgtctctgggcatatttccttcaatcacctgtaatctggtattggcatccatctgataattttcgcattccgttcccgtgagaattctgtaacatttccggaacccctgcatgacaggttctgtatatttcgcagtgaacgaactctttgcctgttccaacagattttttgtcattccaagcaattcatattgtttgaatccttcctctgtcttcttctgcaacgcttttagctcttcctgcatattctccacattatcccaggattcctgtaagtcggaaagttgtttctgatagctgtcgatagtctgaaaacattcttccatacgctctgaaaggacctgcatttcatctgccagactttccagggattcctctccctccggaaccttcagtgccagaagtgccggaatgtcctctttcacttcaaacgctcttatctcctgctcgattctcctatattcttgtaactccttctcataatcctttctatgactttccagttcagccagctgttcttccgggtgctcctccggaatcagctgcaacgacacaaaatagtcttttacctgttcttccagcgcttcgtatttctgtttttgctgtaaatatttcttttgtttttccagtaaaagctgtctctgtctgcactttcccgccagttcatgcaatgccgcaagataattttgtgtttccggtacttctccgtattctgcaaaaaactgctgcaaatctttctgcaattcggcaattctcgcagtcttttcatccgatccgtcctgcttctgccgctccaaaagtgcctcgtaatctcttctcttattctgcagttccacaagccaggaggtcagttccagtccttcccgaagtccccaacgagtgcagaaatcatcaatctgttcttcctctatgcggacctgtgcctcaagttcttccatttcctgttccaaataggaaagctctgtattttctcccgtttggactttggatctgcctgctgtaaacaacagtgccgctgccacagctgcaattcccagtacgatcaggactcctccgatcactccctgtcccaacaggatcacaacaaaaccgccaagcgataaaagaatgccaaaaagcaatagtatttttttccttttacctgcttcttcctgctcccgtaagcatctggcatcttcctgtgcctgtatggattgcagggttttccgctgtatttctttcgcctgcagaagactttttccttcattgcggttcgtccaggcattttttacactgtcgatctccgcctcctgtggcattccttccgcaaaatatccggaaagctcctctaaccgtctgctctcttcccctgacagggcattttttcttatcgtactttccaggctctcaagttcttgtgcctcagcatatttttcttccagccgggcattgtccaccatggggaaattatctttacactgcgcctgttcttccactgtcaggcaatagatttccattgccttgcggacagaaatcccctgattgcagacggctgctttttcgcgtaattcttccccttttggtatcacgccgttaaaatagctttccgcttcttttaaagtctgctgtctctgtgccatttttgcacgcagatccaggtacttctcttttttcgcctgttgatccttataaattcccagttccttttgtctctcctgcagttctgtcagttccgcagaaagcttttctctctcctcgatcgccgcctttttccgggtatcaatactttccatcgtattctgtatctcctgcccgttacggatctgcgtcttcagttccgtaatgcggtccttgctctgacggagcgatccggtcttacgagagggtgacatgctgtttaacagatcgttcaaccgcttgtccgctgtctcaaaattattgatatcgtccgtattctccgccagattcccgattttggcattgatgccgtccgtaacaaaggtctcgcagtcattctgtgagataaaaatcgttcgttcaaaggatcctgcgtcgatccggaacaactcttctcccagattttgtgtaaaatcactgcatggcagatttgttttcgtatctgtcagctgaaattcatcttctgcgcttttacttccgaaggttctgcggacagaatattgctttccttcactttcaaattgcagttctccgccgtagacccccttttgccaaggactgtatctcttcctctcattttccagtgggtccctcttcccttcattccggaatccaaacagcataacgcgtaagaatgcagccagtgtgctttttccccagccgttttcctcacagacggtgttgcagccatctgtaaaatcatatgtaaagtcacttagttttccgaaattctcaatgtgacatttgatcagtttcatgcgtccaggatctcctctccggccagtgcctgcaatccgtaatgtatcactgtcgccttgtcctcttccgacagatcttctctgcccatgacagtacggataaactctccctttaaggacttatcctttgcaaaagcagcataatccaccagatacgcagagctgtccttaatcttcacaaaataaaaaaggtggctgaactgatgtaacagaaagtcaatatccttttcactttccacatctattttcccgaccagttcatacttgatcagacttttctccgggtaacctttcccggctgtctcggctctcatccgttccaggatgtccgtcgtggattcacaaccggtaatatccaccgggatggtatagagcttccgggatgcgaaaggaataaacgtactgtcaattgtacctgtcagctcatcaatatcaagcatcacaaatccatgctctccgcattcatcaaaccctctgccctccagacagccgggataacaatagacgcctctcgcatccagacgctcttttttatagctgtggatgtgtcccagggcaagataatcaattcccttatttttcaatgccgtcagatgaatgatctccgccttatctctcgcactgtattccgattcctgcccatgcaggactacaatgttgcattgatccacatccagtgacagcgtattatatatgcttccactgttttccggtgtcagttccaccccagtaaccgcaactcccttaccggaggtattctccgtccctgaaagttcatagcttgtccagttgttcccaaatagatgaagattctccggaagttccgaaagaccggacgtaaagcttccttcgtcatgattcccctgtaagtaataaaaagctattttgggatgtccctgaattaagtcttttaccacattccgggcggtagcggatacgtttttcgtatcgaacagatctcctgcgattatgatcgccgccacgccctgctctgccccgtaggtaaccatattctgaaaagtagtcagcaattccgtcttgcgttctctcgctttttcttttgtcagatttgcactcattttggaatccagatggatatccgcacaatggatgattttcatattgctgcctcctgtattaaccctgtagcacctgtttcaaaagattggaactatgcagaacctcattcgcaaaaccgcatctgtgatgctctcgttttgcagacatattcattatatacgaatctttgttcgattacaacaaaaacgtatcggtagtgagacattcggtctcatttccgatacgttttatttactacctgtttccgtccagcttcagtaaatccgaaaagctttgcaaggggtatgttacgaaagcaaaagctgctgcctcccctaatcccgcactgtcgaatcctccggcttttgctgccagaataccggcttttgcatcttccacaaccaggcattttcccggacacagccccagatactgtgctgcacacagaaacacttccgggtccggttttgaccttgtaatattggttccgtcgctgacggcatcgaaatatccggtaagcccaagcctttttaagatcagtttggtgtttttgctggaagatcctattgccagttttcgtccgcggcttcgcagcgtatccatagtcttccgg

SEQ ID NO: 235 - DNA, 7693 bp, unidentified
  source 1..7693: mol_type = unassigned DNA
ttatatactggtgtcttcaaacttatacagctcccatcctccggctttccgacggaagtacaggatgttggagaaaccgttgccgatacctttcaacgcaagaatcttcgttgtcgagttatcgtcgtttctctgtccgtagttgatattggagaggcgttcggaaggaagttccggcttgaaggcaaaccattggtcccggtcgagcgtagtctccaaaatggagaagtcgtcatccggatcgctggtaacaaaaatcaacggttcgcgtatgcgccgactctggaaaagactgtcgacggcaaaacggccgaagaactccacaaagtcctcatcgtcgtcctgctcgataggacgcaaattgatggcttccagcatccacgctcccttgatgcgttcaaagtaatattttttcatcatccgtgtcttcacgaatatccactccacttgcacagaagtaagcgcagtatctcctactaaatccatatcttcttctttatcaaacaggagcgtatagtaatgctgcttggtaaataagtcgtcatgcttccaatggtgttcgtcgatgttcagcttcttgtctccattgtagtagggcaacggaaacttcacacgctgacgctgcaacacgtcgtcggaggcaaaattatagataaaatcgtcgaaagactcgtcggcctgtataggctgcggctcttccggcaattcttcctggtggattgaatcggttttgtaccggatggaatccacctcttttgtaatagatgcgaaggggtcaatcttagctttcttgtttccacaggaactcagtataccgagcaatatgacccctgcaattaattttttcattattttaatttctctcgtaacttttcaagcatatccaccgtcatgctttccaaatcgtaggcgggcttccacccccactcttcgcgggcacaagtgtcgtccagactgtcgggccagctatcggctatgcgctgcttcaaggggtctatgtcataaaccatctcaaactgcggcacgtgcttcttgattgcctgatatatcgtttccgggtcgaaactcatggaagcgatattgaaagcattgcggtgtatcagtcttgccggatcagcttccatcagcgtgatcgccgcgttcagcgcatccggcatatacatcatatccatcaaagtgccttgcttaatggggcacacaaacttctctcctttcactgccgaatagtaaatgtcgacagcatagtcggtcgtacctcctcccggaggggtcacattcgaaataatgcccggaaaacggacagcacgggtatcgacaccatatttattaaaatagtagtcgctcagcaactctgtcgttactttcgtgactccatacatggtacgcggacgctggatcgtgtcttgcggtgtcttggtgtgaggcgtacttgcaccaaacgagccgatagaactgggagtgaacaccgcgcatccttgttcacgcgccacttccagcacattccataatccatcaatacctatcttccaagccagcttgggtttcgactcggcaactacggacaacagggcagccaaattataaatcgtatcaatgtgatactcttttaccacagatgccaccgcctgagcatccgtcacatcggcaatcgccgaaggcccggactctttcaattctcctttaggctctgcacccggtatataacctgctacaacatttgcatttccataacgtttccgtagctccatcgttagctccgacccgatctgtccggtagctccaataatcaaaatgtgttccattttttcttctgacttagaatatcaagcttaaatagtgcgcaaagtaagcacttttttttcagattttaatcaaaaagacattgttattccaagaaaaattgtgtcctttgcaatataacttaatcacataaacaccatgtacggtaaaatgcaagaattcctcagccagacattggctgaaatcaaggaggccggactttacaaagaagaacgcctgattgagagtgcgcagcaagctgccatcactgtaaaaggtaaagaggtactgaacttctgtgccaacaattacttgggactgtccaatcacccccgattgatcaaggcttcccaagagatgatgaatagtcgcggatacggtatgtcgtccgtccgttttatctgtgggacacaggatattcataaagaactggaagcggctatttccgactatttccagacagaagacacgattctatacgctgcctgcttcgatgcgaacggcggggtattcgaaccgcttttcaccgaggaggatgcgattatctcggactcgctgaaccacgcttccatcatcgacggtgtgcgtctgtgtaaagcgaaacgctatcgttatgccaatgccgatatgaaggatttggaaagatgtctgcaagaagcgcaggcgcaacgtttccgtattgtcgtgacggacggtgtattctctatggatggcaatgtggctccgatggatcagatttgcgatctggccgagaaatatgatgcgctggtgatggtagacgagtctcactcggcaggagtggtaggcgccaccggtcacggggtcagcgaattgtataagacacacggccgcgtggatatttacaccggaacgctgggcaaagctttcggtggtgcgctgggaggatttacgacaggccgcaaagagattatcgacctgttgcgtcaacgcagccgtccgtatctgttctctaattcattggctccgggcattatcggcgccagccttgaggtgttcaaaatgctgaaagaaagcaatgcgctgcacgacaagcttgtagagaacgtgaattacttccgcgacaagatgaccgctgccggatttgatatcaaaccgacgcagagtgcgatatgcgctgttatgctgtatgatgcgaagttgtctcaggtttatgctgcacgtatgcaggaagagggtatttacgtgaccggattctattatccggtggttccgaaggaacaggcgcgtatccgtgtgcaaatctctgcaggacacgagaaggctcatctcgacaaatgtatcgctgcctttatcaaagtgggtaaagaactcggcgtattgaaataaaactttttcatatcttccattgttattattggggtgcattagaagtgccgacaagataacaatggaagattttttatttatatatggaagaactgactctcacgactcctgcccttcttttctcggcagtctcactgattttattggcttacaccaatcgtttcttatcgtacgcacagcttgtgcggcagttgcgcgaccgctatatggagaatcctacggatatcacggtagcacaaatagagaacttacggaaacgtttgaatctgacccgcaccatgcaaggactgggaattgcgagcctgtttctctgtgtggtcagtatgtttttcatttatatcggactgcaactgctgtccgcctatgtattcggagtggctctgctgttgcttatcgcttcattgggcgtgtctttccgcgaaatacagatttccacccgttcgctggagatttatctgggaacgatggagaagggaaagaataaagacaggaaatgacctgtaaacaaaaaaaagagtgtgtcgaaactctcataaactaaaaatcaccctcgccacagaaagttgtaacgagggtgatttcgataaaaggggagttttgacatatccccaacttttatttgcagcttattaactgtttgtagcttattaacgctgtcccaattgtgagtctacaaagaaaattccggtatcaccggctttcttgattttgtcaacaatgccttgcgctgtagcttcttcttctacttgttcgcgaacgaatccccacaagaaatcttgtgttgccttgtccttctcagcagcagctacgtctaccagtttgtctaccaattgagaaacatggcattcatgtttgtaaacgtgctcgaatacttccaacggactaccccaaccgttaggaacaacatctattttatcaactttagcggttcctccacgtttgataatataatctgccatagcataagcatgacccatctcttcttgagactgcttcttcatccaatgggcaaaaccactgaaaccttctttctcgaaatagaaagacattgccaaatacaggttagcagaccacatctcagcagtaatctgttcgttaattgcattctgtaatttttctgaaatcataatcgtatcttttattaagttgttaatgtagtttctttttgaactcattacaaaaataacaagatttcagtccaaattgttccatgcaccccgcatttttaaactacattcacactttgattgtggcggttcattttttacttacaacagctcgtcggaagtatatcctttcggaagctcacgacagttatagccggaagccattatttcaccgtatgcaccggcagaacgaagggctatcaggtctccacgtttgactttgttcagatcaatcgcttttccgaaaacatcggacgactcacatatcggccctactacatcgtacgcttccatcggttcttcggaagtcaggttttccatcttatggtatgcctgatacaaagccggacggatcaaatcggtcatacctgcatcgaggatggcaaatttcttcttggctccttgcttcacatacagcactttggatatcaacgtaccacactgccccacgacggcacgccccaattcaaaatgaagtgtttgataaggacgcagtttcagttgtccggcataggtggcaaaataatctttgaagttcgggatagcctgacggttgggatggccgtaatctatccccagaccaccaccgacatttatatgttctaccagaatccgacgtgcttccaacttgtcctgtaattcattgacacgattgcacaaagcgacgaaatcgcccatatcgagaatctgcgagccgatgtggaagtgaaggccgataaacttgatattcttcatttccaaagccacgtctatcactttatccatatcctgcatactgataccgaatttattttcggcaagaccggtagtgatattggcgtgagtatgcgcgcctacatccggattgatgcggaaagcgacattggctattttgttttgagcggctgccagctcgttgattacttcaagctcgggaatagattctacgttaaaacagaagattccatattctaacccgagattgatttcccagtctgctttacccactcccgcaaaaacgactttattggccgggaatcctgcacggatagcggcacggatctctccaccgctcacgcagtcggctcccattccgctttcacggatgatggcaagtaccttcggattggcattcgctttgacagcatagtgtactgaataattaggatatttggcaacctcatggttaatagccgacaatgtatcacgcagcactttggtatcgtaataatagaaaggtgtctgcaaagtgcggaatttatcgattggaaatattcccttcataactcaaaaacttgtttagttggttaaaaaaagcgcttttatcagttcggtaaaagcgctcatattattgatggaattatttgccgttgaaaagcatatcactcaacgactgtaaagccgccttcttgtcgcactcccgaatgaggaaggagatgttatagttgcttcctccgaatgaaatcattcgcaccggtatgtcgcgcatcgcatcaagcgctttggcttcaaaaccgacattttcccattccaggtcacctacaacgcagatgatacacatttctttatcaacggttaccgttccatatttcttcaggtcatccagaatttcattaagatgtttcgtgttatctatcgttacagaaacaccgacctccgaagtacagatcatatcgatggatgtctgatagctttcgaagatttcgaacaccttacgcaagaaaccgtgagccaataacatacggctggatttgatcttgatagcagtaatgttatctttggcggctactgctttgatttttcctttctctgtatcattggaaatcaatgtgccgggagcggtcggatccatcgtattcagcaaacgtacaggaatattggcatatttagccggctggatgcaggtaggatgcagaatcttcgcaccgaaataagccaattcggctgcttcttcgaaatgcagctgacgtaccggagctgtcttgtcaacgatacgcggatcgttattgtgcataccgtcaatgtctgtccagatctgaatttcggaagcattcaccgctgctccgatcagagaagccgtataatcgctaccgccacgttgcaggttgtctatctcaccataagcattgcggcagatgaaaccttgcgtgatgtagatatccatatccggataaagttcgagctgtgcctgcaacttctccttaatatatacggggtccggctccgcgttcttatcagtacgcatgaattccaaagccggaagcagtacagacttcgcaccgcattcctgcaggtagaagttcaccattgccgtagaaatcagctctccttgcgccaaaaccactttctcttcaaacaaagtgaaaaggtctttcgtataggagcggatgtagtcgaagtgagacttgatgacttcgagacctttctgtttatattcctgagttgcgaatagctcatcaacgtgctgtttatatttagcttccagcttattgataatctcgttggcaccctccggattcttcttatacagatagtccgaaatttccaccaatgtgtttgttgtacctgacatagctgaaaggacaacaatcttctgttcaccatcggtaatcaatttggctacttccttcatgcgctgagcagaacctacggaagttcctccaaactttaaaactttcattttcgttactgttttagttatctatatttaaatctatttctattgttctctgccggggcatatattcatcggtcacatcgacaatctgatggtcggcacaacgatacacccgacccggatattctttcaacaattgcagattgtgcgtggtcatcacaacggatgaaccggaactgcaaatattatgcaacaattcaacaatcgatttccccgtttccgtatccaggtttccggtcggttcatccgccaggatgatggccggagaattgagtacggcacgtgcaatcacaatgcgctgctgttcgccaccggaaagttcgttcggcagtttgtatcctttattggacattcctaccaaattgagcacttcttcaatacgttccttgatttcctgtttgttcttccagcctgtggcacgaagtacaaattccaggttattgtaaacggtacggtctgtcagcaactgaaaatcctggaatacaatgcctaacttgcggcgcaattgcgggatatgcttacgtttgatagaccgcatattataatccagtaccttagcttcaccgtcaattacatccagttcgccataaagggtcttgagcagactcgtctttcccgagcctacttttccgatcagatagacaaactctcctttgtgcaattccagatttacatcactcagcacacagagttcctgttgatggatttctacgttcttatatcgtatcaacgcctcgtcatccat

SEQ ID NO: 236 - DNA, 7263 bp, unidentified
  source 1..7263: mol_type = unassigned DNA
  misc_difference 6249: note = a, c, g, or t
  misc_difference 6250: note = a, c, g, or t
  misc_difference 6251: note = a, c, g, or t
  misc_difference 6252: note = a, c, g, or t
  misc_difference 6253: note = a, c, g, or t
  misc_difference 6254: note = a, c, g, or t
  misc_difference 6255: note = a, c, g, or t
  misc_difference 6256: note = a, c, g, or t
  misc_difference 6257: note = a, c, g, or t
  misc_difference 6258: note = a, c, g, or t
ttaattttcatccccattacgaagatcatcggcaatatcctgatgctgccgagccaactcttcctcccctatatgcagaaatgcttcggcaagatattcatgggctgcagcgtgcttcggttttaggtcgacagctttcataaagtcagaaacggcttcgtcgtaatatttcagttgaagataagattttccacgattataacgcgctttaaatgatttcgggttcagtcgcacggcttcgttcaggcaagtaaccgcctggaaaccgtcacccatatcgagaagggtcactcctttacgtacccaagcatccacaaactcaggataaagcttgagcgctttgtcgaaagagcgaatagctgcattcggatcatgcgctttcgtaatacattcattccccatcaaatagtattcgtgggcatattctttctgaatctcccgctgggcgtgtatctcctcccggagtttcttgatctgcgcccgttgagtgttcatagtttgcaatttcatacggagcaaccgttgcacttctggcttttccagctcattccgcttactgacagcagcagcgaaagcctcaaccatctctttcacattgccggatttaaaacaacgggcggcacgtgcatacaacaattccgcctcactttcacgcaaacttttttcaatcaactgccgatcattaaacatctggctgaactggacgatctctttccgcacaaagatatcatgcggagaaatccggcttttcagcaccagcccttccagagacgtacaacgacttaaagcgacatatgtctggccaccggcaaacacaccaccagtcaaatccaccacgacacggctgaacgtaagcccctggctcttatgcacggtgatcgcccaggcaagacgaatcggcaactgctcgaaagtaccgacaatttcttcttcgacctttttctccttttcgttgtatttatatttatagttgcgccaggaagtcggctcgaccagatattccctcccgtcctctaacaggacgtagacattcccattctcgtcgatccccgacaccataccgatcgtaccattgacccaacggcgttcataatcattatcgataaaaatgacctgggcctgctccttgatggataggtttaattgtgtcggtagagacgactcagggaaatcaccttcgatcttgccgtgagaaacgaactcttcaccgggcaattcccccaacttccgttcattgataaaatccacctgatcccgccgggtggcaagcgtgatgtacatatcctcgtttcgaggtataaaatcagggaaatagcgagcattcaaagtatccaactcctgtttccgggcaatattgctacggatacgatccaaaatattgataaatacaggatctgtctgccggtacactttctgcaattcaatcgggaccagatttatatctttgaagacacgggccgaaaagaaaaacggactggcatagaagagacttaatatttctttctggtcggcagggaccaccggctccaattggaagacgtcgccgacaaacagcaattgcttgcctccgaacggcaaacgcatattaccggaaaagacacgcaagatccggtcgacacaatcgatgatatctgcccgtaccatcgaaatctcgtcaataatgatcaattccacttccgaaatcaacttccgatgctctttcctgtatttgaaaaactcgaagatccgtccgttcttcagactcaaatccggatcatcgggcaacatcgggcgaaaaggtaatttaaaaaaagaatgaagcgtcaccccttccgcgttaatcgcggctatccctgtcggtgccaatacgacatatttctttttcgtatgtgcgcagatgtatttcaagaacgtggatttacccgttccggccttcccggtcaagaagacggactgacgtgtatgagtgatcagttgcagggcatcctgaaactccttattatctgtatctaactgaaattccaatcgtgtaatttttaagtagacaaagctatagaatattttatatatctactcataaaaagttcataatttatttgcatatgtccggaactttgtcttattttgtgatatcaaaataatatcaaataatgatcattatgaaaacacaggaaaagaacttcgacggcatcaaattatccggttttacggctatacttatcatgcttgctttaacagggacagccatatatctactatcgctgccacaaacaccgagtatcatcgccggtgtcatctgcgggatatgcgttgttgtcatgttacccggatttatgatcatccagccaaacaattcgcgcgtattgacttttttcggcagatatgccggaacggtcataagtaacggtttctattgggtaaacccacttttcctgaaatcaaccgtaacattacgcatcctaaacttgaacatcgacccgatcaaagtcaacgacaaagtcggaaatccgatcatgatcggagccgtggtcgtctggagaataaaagacacctacaaagccagtttcgatatatccggaaacatccgagagtttgtccaaatacaaagcgatgccgctcttcggcaagtagcaggcatgtatgcttacgacacaaacgagacgattgataaagtcacactccgttctgatgaaagcggagaaataacccaacgcctagaagacgaactcaacagccgtcttgccatcgccggaatcgaaatcgtggaagcccgtatcaactacttggcttatgcatccgaaatcgccagcgtgatgttacgccgtcagcaggcagacgccatcatttctgcccgcgaacggatcgtggaaggagctgtcagcatggttcacctggcattggaaaagttagagaaagacggtgttgtcgagctggatgaagaacggaaagcagcaatggtcagcaatctgctggtagtcctttgcgcagacgagtccgcacaacctgtagtcaatacaggtactttatatcagtaacttaatacagtaatactaaatatggccaaaaaggaaaatggaaatgcgaccaagagtttcatattgcgtgtggacgcagaaatgatggaagcgatcgaagcctgggctgccgatgaatttcggagtacaaacggccagatacaatacattttggatcaagccctacgcaaggctgggcgcctcaaaaagaaacgaatactaaaatctgaaaagaaaaataaagagtagaaaacaataataacgaaaacctgtccggacgttttttaaatatccttcagtagaaaataacttttcaactgaaggatatttctttctattcattataaatcaacggctaataaataaccacgcatccttatatttcggattggaacggagagttgccatataagattccgcagcttcgcgattatcgaacttatccgcatagatacgatacttcccgtcacaaacaaccttgctgacatgcttacattcgttacgatctacaccgacaataaattcgtccgcttgcgattctgatggaaaactggcgattacgatatgatacatttttttaggttggacaactacaggcctggacacaaacgccttcttttccggagccggaacagacacaacttttttcacttcacgcgcaatcacctcttccgatggctcttgcttcgtatctgcctccgccacagtactgtctggcaaaaccgcttcaagaagaaccggcttttgtacaaccatccccgtcggaacaaaactggctgtataagcctcttggttaacatctctaaccggagtagaaaccaacaggaacaatgccactgcagcagccgaagccatcactgtacggataagtttacggctaatcggaatataaagagtatctttcttctctttttgggatgtaagaagaaccgcttcttcgcgttccatctctagtggagcgagaactgggaaatggaaaacaggcaagccatatgagccgacactgaacagatcggtttcccccggatggaaaatcatctgtccttcttctcctatgctgaacgaacctaacacccctaacgacaactttccatattgttgcaggatgttctttatatcctccacatcttcttccagcatcagttgcgcctgacgatagctcacctcgtgcatctgcatatacgattcaggcaaaagcccgtcattatgttgcagcgtcatattgaaaccgatctcttttctcaaaggacgaaacgtatgttcctccttatgctgcatggccggaacaacctgcaaaacaaaacctccgaacttcggcacaatcacacaatcatgcactaaaagcaaacgttcaatatgtgttacaattctaagcatacaacaaaggtaaatcttttgtctggattgacaaaaaatttataggattacaattggtgaaatttgtatctttgtaaggaaaagaatcaattaatcaataaagatcatatcatgcttgcatatacatatattgaaaaaggcaaatttggtttaacagaaaaaccgaaaccgaaaattacggatgcacgggatgcgatcgtgcgtgtgaccctgggtagcatctgcaccagtgacctgcatatcaagcacggaagtgtacctcgcgcaatactcggaacaaccgtcggacatgaaatggtaggtgtcgtcgaagaagtgggaacaggcgtcacatctgtcaaacccggagacagagtaaccgtgaacgtcgagactttctgcgggaaatgcttcttttgccaacacggatatgtcaataattgtaccgaccccaacggtggatgggctttaggctgccgcatcgacggaggacaggcggaatatgtcagagtaccctatgccgatcaaggactgaatcgcattcccgacacggtcagtgacgagcaggctctgtttgtcggtgacatacttgccacaggtttttgggctactcgcatctcggaaattacggagaaagacacggtcctcatcatcggtgcagggcctaccggaatttgtactttactctgctcgatgctgaagaacccgaagcatatcattgtctgtgaaaagtctcctgaaagggttcggtttatccgtgaacattaccctgacgtcttgatcacgactcctgacaactgtaaggagtttgtactcaaaaacagtgaccacggcggagcagatgttgttctggaagtggcagggagcgaagacagtttccagatggcgtgggaatgcgctcgtccaaacgcgacagtcacgatcgtggctctttacgataaacctctacttttccctctacctgacatgtatggtaagaacctgattttcaaaactggcggagtagacggttgtgattgtgctgagattctccaactgattgaggaaggcaagatagacaccactccccttatcacccaccgctttgcattgaacgagatcgaggaggcttatcgagtttttgaaaacaaactggacagtgtaatcaagattgctatttattaaaagacttgtcaaatgcctgttatcgaaatatcttctttatctcatcccggagtcgaaatgttctgtacactcaccgaagctcagttgcgcaatcgtatcgagccagacaaaggtatttttatcgtagaaagcccaaaggttatcacgagggctctggatgtcggctacgaacctttagccattttgtgcgagcacaagcatatcagaggagatgcttccaatatcattgaacgttgtagcaacgtgcctgtctatacaggagaaagggagttgcttgcgacattgaccggctatgtcctgacacgcggtgtcctttgcgccatgcgtcgtcctgagccacgcggcatggaagatgtatgccagaaggcccgacgcatcgtcgtaatcgacggagttgtcgacacgaccaatatcggtgctattttccgttcggcggcggctcttggaattgatgccgtattactgacacgcaactcttgtgacccattgaaccgtcgcgcagtcagagtgtcaatggggacagtctttcttgtgccctggacttggatggacggttctcttggcgacttgggaaaacttggttttcgtacggcagccatggcactcacagacaattctatttccattgataatcctgtcttggcaaccgaacccagattggcaatcgtgatggggactgaaggggacggactttcgcaggaaacgattgccgcagccgactatgttgttcgcatcnnnnnnnnnncgcacggtgtcgattcactcaatgtggcagccgcagcggccgtggctttctggcaacttcgtgctccaaatccacaataattccccgattgcatatcgttcacctacaaccattgtaaatagattcaattatgattacttttgccatcctattaaaaagcgaaagatcatggcagacaactatctggaaaagaaatacgaagaatataaatcccgcaaggagggacgtacgaaccatccgtacaatggcaggaaaacaaccgttatccacaaaaccaggagagtctttgtaacaggaggtgcggaaggtataggcaaagcgatcgtaagagctttccgttccgccggacaccgcgtggcgttctgcgaccgtaacgaagcggcgggaaaagagacagcgttgcagaccggaacctcttttttccatgttgacgtaagtgaccaagaagcgctagagaactgcatgcagcagattttcaaggaatggggcgatatcgatatcataatcaacaatgcgggaatcagttgtttctcccctatcacggaaaccggtgtggaagatttcgaccggatattatccgtgaacttgcgtccggttttcatcacttcccgcagattggccattcaccgccaatcacaagaggtacccaatccgttcggacggatcgtcaatatctgttccactcgctatctgatgagcgaacccggcagcgaaggttatgcggcatccaaaggcggtatctattcgctgacgcacgcccttgcactatcacttgcccaatggcatatcacggtcaactcgatttcgccgggctggatcgagacgcgcgactacgaacagcttcgcccagaagatcacgcccaacatccgtcggggcgagtaggtaaaccggaagacatcgcccgtttgtgcctgttcatctgccaggaggaaaatgattttatgaacggcgagaacgtaacgatcgacggagggatgacaaagaaaatgatctatatcgagtga

SEQ ID NO: 237 - DNA, 12442 bp, unidentified
  source 1..12442: mol_type = unassigned DNA
atgctaaatagaatcagtaaatcactattgcttacggctatgatgacaggagtttcttattcctttgcacagcagcttccggcagtagcctataaaaatccgactttgcccgtagaaacaagagttgcggatttactatcccgtatgacattagaagagaaagtcggtcaactcctttgtcctttgggttgggagatgtatgaaatcaaaggtaacgatgtgctcccttctgataaattcaaacaactcataaaagacagaaatgccggaatgctatgggcaacctatcgtgccgatccgtggacaaagaaaacattagcaaccgggctgaatcccgcattggctgcaaaggcaggaaatgccttgcaaaaatatgtgatggagaatacccgtttggggattcccttattcctggcagaagaagcaccgcacggccacatggcgattggtacaaccgtttttcctaccggaatcgggatggctgcaacttggtcaccccaactgataaatgaggtaggtaaagcaatcggcaaagagatacgtcttcaaggcggacatatcagctatggacctgtgctcgatttggcccgtgatccccgttggtctcgcatggaagaaacttttggtgaagaccctgtattgacgggtgaaataggaaaggcgatggtggcaggattaggtggtggagatttgtcacgtccatacagcacgctggctaccctcaagcacttcctcgcttacggtatctcggaaagcggacagaacgggaatccctcttttgcaggtatgcgtgaactgcatgaaaactttctgccaccatttagacaagctatcaatgccggagcattatccgtaatgacttcgtataattcgatggacggtatcccttgtacagccaatcattatctcctgaccgaacttctacgggatgaatggaagtttaaagggtttgtcgtttccgatctatacagtatcgaaggcattcatcaaagccattttgttgcttctacaatgaaagaagcggctgtaatggccttatctgccggggtcgatattgatctggggggcgatgcctatatgaatcttatggatgcggtgaaccggaaggaaataagtaaagaaatccttgatgcagccgtgagtcgtgtacttcgattaaaattcgagatgggattgtttgaaaatccttatgtggatcccggaaaagcgaagaaagaagttcgtagcaaagaatacgttactctggcacgccaagtggcacaagtctcgatcaccttattgaaaaataaacactcgctgcttccattagacaggagtatgaaagttgcactgatcggacctaatgccgataaccgctataatatgttaggagattacaccgctccgcaggaagaagaaaatgtgaagaccgtactggatggaatcagagcaaaactttcttcctcacaggtggaatatgtgaaaggctgttccattcgtgataccgtgacgtctgatattgaacaagccgttgcagccgcccagcgttccgaagtcgttattgctgtggtaggaggctccagtgcccgtgatttcaaaaccagttataaagaaacaggtgcggccattgctgatgaaaagacaatcagcgatatggaatgtggtgaaggcttcgaccgtgcaacgctttctttattaggaaaacagcaggaattactcaaagccttgaaagctaccggaaaaccattaatagtagtttacattgaagggcgtcctttggataaaaactgggcatcagaaaatgcagatgtactgctgacggcctattacccgggacaagaaggggggaatgccattgctgatgttttattcggtgaatttaatccggcaggacgattaccattctctgtgccccgttccgtcggacaggttccggtatactataataagaaggctccccaaagccatgactatgtagaaatgtctgcttctccgctttattctttcggatatggcttgagttataccacttttgaatattcagatttacatctgtcggctctgacaccacactctttcgaagtttcatgcaaaatccggaacaccggaaagtacgatggtgaagaagttgttcaactttatttgagagatgaatatgcttcagtagtgcaaccgttgaagcaattgaaacactttgcacgcctctttttgaagtgtggagaagaacaggaagtgaagtttattttgtccgaagaggattttgcacttgtcgatcggaatttgaaaagggtggtagaaccgggaactttccaagtaatgatcggtgctgcttctgatgacatcagattacagacgaaagtggagataaaataggagatactctctattcatctatgaaacaaaaatatcaaatttagatctcacagtgatttgtacctgttttattgtcaaattgtcaatataatatctaaacggatgaatatcaatgctatagtgtctgacaatagccactgaaaacaggctgacaataaaagatatcaacttctattgtcagccttgcttttgtatcctataatatctttactacctgatatacagtacctttataagtatgtttcgaggcaattccgcacttttgaagcattcttccgaagtgatatactttgttgtcggacaatgaaatgccgcttttcttcttcaagtaattcagtatttctaccggagtaaagaattctccttcctctccctcttgtggagctctaaagtattgataaaacagttggatcatagccggtgtttgttcaaactcacggttgttctcggtcataatctgctcgtcttcactattaaaccaataacgctcaccatgagaaatttcgtgcatggcttgcgcgtaaagctgttcataatctatcggctgtgtagtgtcgatgtttcctgtcacttcaatacagataaagcgacggctccccgaagggtcggtcagcaaatccttctgattgcttgtaccgataaatgaagcataccgttgtaattcaagcaccgagcggccatgtggctttcgaaggttgaccaccgttttttggagaatatgtttcagaaacccctgttgggtcagcttaatctgatcgaactcatcaatgttgatgagcgcaaaacgattcagatacagttccgcatcccgtttctggctgaaatcaatactgtccgtatagtaagctcggagtgcaggaggaatcatttcacggcaaaaagtagatttatgagttccttgtgctcccactaatataggcgatgtactattggcatacattttatttactcccctccaatgcgaaaccatattaaggaaccagcggtgaaaaagtaattcccaatgcggattattgcagggaaccctgttggctaacgcatggatacggtcttttccatcccaatgtggcaggtgaaacagaaactcctccaacggattatagataggcacacggttggagtgcaagtaacggtctatgtccctgtcccatactccgattccttcggattgcgcatccagcataatgctgttttgtgcccgtttgtcgatgggatggaaatagaaccggaacgagaaacgctcccggtattccacctccccgatttgcgtattgtaacggaactcataacgacggttcataaattcatccatttgcaggctaaggcgttgctctttggtcagacagttgcttttcggcactcccttacattccttatatacgtttcttatcatttcacgtaccagcattggattctttcttttgttataacggatgatggtgcgtctggttgcctcctcttccggaatgcctgagtagtagcagttctcggcaagcgggactattaatatttgcaaatcatcatcccgatgccaggcttggtccatttcttcaaaggtctttcgcaatgccgcttcataaagcagtgccactgtatcctccgtatcatatcccggcagggcacgattcaatggcgatgcttctgtgctcgatttctcatgataagtcatctcgccgggcataccgataggctgtgaaagatagaaaggaacaggggtggaacgataaatcaagtccggatcatagctaagacgtgagaactgttccagtttcggctcttttagcaggatattgaaagggagttgaggctgataacatttgatggctagtcgataagcatgtgcttgaaacacttcggcttcttccgctgtttgcggcaaagtgccgtccggtcgggtgaagcaagtccatatcttgacacttttgccgcttgctcccatgaaagccagcattgtctgaggaagttcggcagccttttgcttcacaatctccacttctgtttttccggctaacggaccgacggtcagttctacaatcccattgtaggttttcatttgtctcactccgttcactcgcccgaaagctgcggcaggaatcactcgcggcaatttgcttgtgagtgaacaaggttcgtcgggtagaacaaaatgcagggcttggcgtagttcggataccgggcggagcttggtctctcttttcattttctctatcaacaggtcgatgtttaccacacttaatgcttccgtatctccattttccctgatttgtgtaattttcatttctatttatcttaaattttatagagttgtaagtgtttgtttataggtttcaaaggtacggataaggtacttgtaaaacaagctatttggcttttatcatgataaagaataagcttttggaggataagaagcggatatacttccactatcacacggatgtatttccatttgtgtgccgatatagttccgctaaggtatcggtgtctttagtttgtcacggccgtggtgagatctcaccacggctgtgatgagttcctaccacggctgtgggaagatctcaccacgaccgtgacaagttggcaatgtcggtgcattagtataaatgaataggctgacaatagaagttctagcttcttattgtcagcctattgtcagggcttattgtcagcaggtaagcggttgataatcattgcgctattcaagaaaaaacgtcagctgacaataaaaaccttcaaattaatatgtaaacctaaaacctaatgaaacctttctacttgtaatcataatctttaataatataatagtgcgttgtgcttgattttactgtggcaaagataagtcagaaagataaaatagaagtgcaattttgtttcatatatggtatacaaatgattcattgaatcagaatttatataaattggtcagtttgtatcattgttcacaaaagaaatcctccttcacttgcctaaagacagttgaaggaggattttatcgatgaatagggctctttttacctatttctcatcatttttacgaatttctacgcgacgaatcttaccgctgattgtcttcggaagttcatcgacaaattcaatcacacgcggatacttataaggagcggtcactttttttacatgattctgcaattccttaatcagttcttcaccggcacgggctttgtagtctttcgaaagaacaatcgtagcttttactacctgtccgcgaatctcgtccggtacaccggtgatagcacattcaatgactgccggatgcgtcatcaaagcgctttctacttcgaacggaccgatacgataaccggaacttttgataacatcgtccgcacggcctacaaaccagagataaccgtcttcatctttccaggcaacgtcaccggtgtagtaaataccgtcatgccaagcttcgcgagtacgttccgcatcacgatagtactctttgaagagtcctatgggtttacctttgctggtgcggattacgatttgtccttgttctccggcttcaacggaacgaccttcgtggtctatcaagtcaacgtcatattgaggattcggcagtcccatgcttcccggtttcggttccatccatggcatcgtggcgacggtcagtgttgtttcagtctgcccgaaaccttccattagtttgataccagtcaattttttgaaggtatcgaatacggccggattcaatgcttcgcctgcaatggtgcaatatttgagtgaggacaagtcgtatttcgtcaggtcttcatgaatcaggaagcggaaaatggtgggaggtgcgcaaagtgaagtgacatgatagtcgtgtatcttttgcaggatatctccgggagtaaatttctcgtggtcataaacgaagatattcgctccggcaatccattgtccgtagagctttccccaaacagcttttccccaaccggtatcggcgatggtaagatggaggctttcctcattcagattgtgccagaaactaccggttacgatatgtcccaacggataggtaaagtcatgtgctaccattttgggctcgccggtcgtgccggaagtaaaatacatcagtgagatgtcatcattggtattggcatggcgtggacgtacgaacggagcggcattctcaattccctgatggaaatcttcgaaaccttcgggaatctcaggaccgacgctgaccagcttctccacagtgggacagtcgggtatagcctccttgatatgttggagaatcactccttcgccggcagccacaatcattttgatatcggcggcgttgcaacggtagactatatctttctttgtcagcaggtgagtggcgggaatgacggtcgctcccagtttatgaagtgcgataatgctataccagaactcatagcgacgttttaaaatcagcattaccatatccccgcgtccgatacccagactttggaaataagaagccgtcatatccgtataacgtttcatgtcggcaaatgagaactgtcggctttcgcctttgtcgtttgtccaaagcagggctttcttgtcgggttgctcggcagcccaagcatccactacgtcataaccgaagttgaaattctccgggacgtttatttttaagttcttgatgaaatcctcttgtgaggcaaagttagtctttgctaaaaatctttctaccatgatattgttacataattacagccagaaaacgtaccgttttgccgtcgagcgctttcatgccatgtggaagtttggagttaaaataaatgctgtctccttgattaaggataatttctttcccttcgatgttgataagcatacggccttcgatcacaaggttgaattcttgtccgttgtgcttgttgtaatgaatcggctcgtcatcacctttcggctcaacggtcacgatgaagggatcggcggtgcggttcatgaatccggaagccaatgactggtatttgtaggctttcgtacgttctatactgacacctttgcctgcacgggttacgaaataactgctcatcttgggttcctcaccgaacatcagcgcatcaagggctatgttataagtgcgggctatcttttgcagcatactgacggagatgtcgtagtcgcctgtttctgcgagccggtattcttcggcggatatgtcactgtcgcgggcgatgtcctcagcggtcaattccaacacatcccgcaatccacggagacgttctgctatttgtttgatctggtcattcatgttatttagtgattagtttgttagtgattaatgatttgcagcagccattatttgctggccttcatggctttaatgatagcggaggtgaaaccgttatgttccagttcgttgattcctttgatggtgattcctcccggagtagtcactttgtcgatttccacgctgggatgagtgtcattattcagaatcaatgaggcggctcctttcagagattgtgccaccatagtcatggcgtctttcggacggatacccatttcgatacccgcttgcatggctgcctgaacgtatttcagaacgtatgcgataccgcaggaagccaacgctgtagcggctgttattttgtcttcggggataagcatgactgtgcccatctcgctgaatagccggaggatgaacttgtcttgttcgtcatttgtattgcgggcggcaacgagtgtcatactttccagttcgctgatggcggtgttagggatgaggcggaacatcggcatttccggtactaccacataatgtgccagctcttcaaaactgattcctgcagctacggatataagtatctgcttgcccttcagcttcaactcgcgcattaccggctgcataaaccaaggctttacggcgaggataacgatgtccgctcccgttgccgcttccgcgttattgtgagttgtagagatgttcggaaattctttcttcagctgttccagcttgccgacgctggggttggatacgataatgtccgaatcttctatcagacttccttttgccagaccacgggcgatagagccacccatgttgcctgcaccgataatagctattttcatacgacgcttgtttttaatgaattgttacagacaaaggtaacggttaattgcgaaaaaacaaaaagcagcccggataagaaataaaattctgaggtaggctgctttttatcgttggctgtttattaatcaatatgaacggttagagtacttttttgaaccggacgaggaattcgtcggcctcctccatactgagacagagagggggaagcaagcgaagtacattcgtgccgcttgcgccggtaaatacatgttcgtcataaatgagacggctacgcagctctttgatcggttcttcaaattcgagtccgatcatgagtccgcatccgcgcacttctttgatttgcgggaatttcttaagttcttgcagcaggtagttaccaaccttagccgcattctctacgagattctcctgttcgatgacgtccattacggcaagagccgcagaacaagcgaggtggtttccgccaaaagtcgttcccagttgtccgtatacaggtttgaacatcgggctgattaagacgcctgccatcgggaaaccatttccgattcctttggctacagtgatgatatccggcttgatgtcacaatattgatgggcgaagaatttaccgctacgtccgtatccgctctgaatctcgtcgagaatcagtatcgttcctgtttcgctgcaggctttgcggagttcctgcataaattcagtggtcggtatcttgataccgcctaccccctgaattccttcaatgataacagcacaggtatctccttttgacaattcttgcttcatcgcgtcgatgtcgttcagagggagataggtcacgtgaccgttattgttgataggtgcgataatcgacggattgttagtagcttctaccgccagagacgtacggccgtgaaacgccttgttgaaggaaacgattttggtacgtccgttatggaacgaagccaatttcagagcgttctcattggcttccgcgccactgttgataagaaacaggctgtagtcttcgtagccggagatttttcccaatcgttcggctacctgttgttgcagcttgttgatgacggagtttgaatagaaacccaagtttgctacttggttactgaccatttctacatagtgcggatgtgcgtgtccgatggagataacggcatgacctccataaaggtccagatattccgtgccgttttcatcccaaacgtgacaacccttccctttgactatgttgatattatataaaggatatacgtcgaataatttcataattctgttatttttaaaaagcactcggctttaaacgtaggcctacggtttcttccagattgaacatcaggttcatgttatgaacagcttgtccactggcgcctttcagcaagttgtcgatacaagagataatcaatagcttgtcgccatgcttttccagatgtatcagacatttattagtattgacgacttgtttcaagtcaatattcttgtctacgatgtgtacaaaggagtctttggcataatattcttcatacatacggacaatctcttcctgtgatactttggtctttactaccagagtggcaaagataccgcgtggaaagtcgccccggtacgggatgaaatcaatctctgcatcgaagctgttctgcaattgcttgagtgactgcttgatttccggtacgtgctggtgttcgaatgctttgtacacactcatattattgtttctccagctgaaatgactggtagctcccggttttacgccggctccggtacttcctgtaatggcatttaccatcacgtcgtctgtcaacatcagattcttggcaagcggaagcaagccaagctggatacaggttgcaaaacaaccgggattggctacgtgcttcgccgtacaggtggcgcggcggttcagttccggcagtccgtagatgaagtcatgatcgtcacttttgatgcggtaatccatggaaaggtcgataatcttcaagtcttccggtatgttatggctttccatgaatttctttgtgtcaccgtgggcagtacagaagaagagaacatcgatttcgtccaaaggcaattgatcggtgaatctcagatctgtctcaccgtacaatccttcatgtacgtcggtgattttgtttccggcattactgctgctgttgataaatacgatttcggtttccggatggttgagtagcagacggattaactcgcctgctgtatatcctgcgccaccaatgattcctgctttaatcatatctcttcgtctttatggttattatagtaaacacgcaacggagtagaagtcactttgataaagcctttggcgtcttcagccgtccagcctttctgcatctcaccgtattctccgaatttagtcttaacaaggtcatcttcggattctacgcctacggtagagaaagaaagcggacgaagttcgaggatggccgtaccgtttacgttgcgttggctttcctgcaacatcgcttcgatatcacgcatgaccggttccaaatactggctttcgtgcaggaacataccataccagttggctacctgatctttccaatattgttgccatttgctcaatgtatatttttcgaggaaacggtgagcgccgataatcaacatcggagcggcagcttcgaatcctacgcggcctttgataccgataatcgtgtcacctacgtgcatatcacggccgataccgtaagctgcgccaatctcttccactttctggatagccttgatcgggtcgtcaaacttctcgtcgttgacagccttcagttcgcctttctcgaaagtcagacggagctgttcgcttccttctttctgaacgtgtttcaagtaagccgattccggcagtccttgtgcggaatcaagaatctcgccgccacaaatggaagtaccccaaaggcctacgttataagagtatttcagtttggtgaagtctgcgctgaaaccatgcttgttcagatagtctatttcctcctggcggctcaatgccatatcacgggttaatgtgataatctccacgttcggtgccagcactaagaaagtcatgtcgaaacggatctggtcgttacctgctccggtagaaccgtgagcgatggcgtccgcaccgatttcattggcatagcgtgcaattgccaatgcctggaagatacgttcggaacttaccgagatagggtaagtgccgttgcgcagtacattaccgaaaaccatgtatttcagactcttctcgtagtattcctgagtgacgtccagcgttacatatttcacagctcccagtttgtaggcgttctcttcgttcgtctttagttgttctgcgctgaaaccgcctgtattggcacaagctgcatatacttcgtaacctttttctttggcgaggtacatgacggtgaacgatgtgtccagtccgccgctgaatgccaccactacttttttcttcttttcttccatagtgtgtatattttaaatgttatttctttcttgttctttttttatgttccgtgggtctgtcggatcatacagcatggctgtgcagatacagaacttacggttcttggcaaccaatatgtcgtggttgatacatccttcacatcctttccagaaagcttcgtcgtctgtcagctcgttgaaagtgacaggaacgtagcccagttccgtattcatcttcattacggccgcaccggaagtcagactgaatattttcgctttcggccatcggaggcgtgccagttggaaagaagcctgtttgatacgttttgccagtcccaaaccacggaaatccggatgaacgatcagaccggaagttgctacatattgcttgttcccccatgattcgatgtaggtaaatccggcaaatgtctctccacaaagtgcgataatcgcttttccttctttcatttttgtcgctacgtattcgtgggtacgttctgcgattcctgttccgcgtactgcggcagcctttctgatagtgtccaaaatagtgtcaacgtaaacctcgtgtgaggcgtcggctaccataacatctatttgctgagtgtccat

SEQ ID NO: 238 - DNA, 8623 bp, unidentified
  source 1..8623: mol_type = unassigned DNA
  misc_difference 936: note = a, c, g, or t
  misc_difference 937: note = a, c, g, or t
  misc_difference 938: note = a, c, g, or t
  misc_difference 939: note = a, c, g, or t
  misc_difference 940: note = a, c, g, or t
  misc_difference 941: note = a, c, g, or t
  misc_difference 942: note = a, c, g, or t
  misc_difference 943: note = a, c, g, or t
  misc_difference 944: note = a, c, g, or t
  misc_difference 945: note = a, c, g, or t
  misc_difference 2400: note = a, c, g, or t
  misc_difference 2401: note = a, c, g, or t
  misc_difference 2402: note = a, c, g, or t
  misc_difference 2403: note = a, c, g, or t
  misc_difference 2404: note = a, c, g, or t
  misc_difference 2405: note = a, c, g, or t
  misc_difference 2406: note = a, c, g, or t
  misc_difference 2407: note = a, c, g, or t
  misc_difference 2408: note = a, c, g, or t
  misc_difference 2409: note = a, c, g, or t
agctggccaaggcgctggcacaggctctgtttgacgatgagcgcaacatggtgcgtatcgatatgacggagtatatggagaagttcagcgtcagccgcctgatcggcgcgcctccgggatacgtgggttatgaggagggcggccagctgaccgaggctgtccgccgcaaaccctacagcgtggtgctgttcgatgaggtggaaaaggcccaccccgatgtgttcaacatcctgctgcaggtgctggacgatggccgcatcaccgacagtcagggccgtacggtggacttcaagaacactgtcattatcctgacctcgaacctcggcagcgacatcatcctgaacgaccttgagcagcgccgcgccgaaggctccaacgaactgagcgcggacgcccgcaagcagatcgacctgctgctgaagtcgaagttccgccccgagttcctgaaccgtctggacgagatcgtctactacaagagcctgaccaaggacgagatgcgcaagatcgtggatctgcagctggcagacctgcgcagccgcatggacgagggcaagcatttgaatctggacgtgaccaccgccgccaaggactacatcatcgattctgcctacgacagcgtctatggtgcccgccccatcaaacggttcatccagagccgggtggagactttgatcgccaaggcgatcattcagggccgctatgccgagggcagcaccctgaccgtggattacgacggaaatgcccttgtgctgaaatgattttccacagttttaccagttttgtacctctgtgccggccgtaatgcttgcatgggggtgcagaatatgatattataacaagtaacattgatgtgcttttcatcgcggaacagccacggtggaaagcacatttttgtatccctaggaaagaactccttccgtcatcgctgcgcgatgnnnnnnnnnnaggctccctctttgagggagctggctgcgaagcagactgagggagtccgttctttaataaaaaacagaaagttgagtgtgattttcctttattatggacgatggcagtatgacgctctgggcagcgctggtgatcctggtgggtttctccgcctttttctccgcatccgagaccgcattttcctccctgaatcagatccgcctgaaaagccgcgccgaggacggcgattcctctgccgcccgggtgctggccatggcggagcaatacgataagctgctttccaccatcctcatcggcaacaatatcgtgaacatcgccgccgcttccatcggcaccatcctgtttacccagatgctgggtgccgagcggggcgcaacgatgtctaccattgtgctgacgatcatcgtgctgatctttggcgaggtgactcccaagagcctggccaaggagatgccggaaaaggtggccacggcagtctcgcccttccttgtgctcctgatggccctgatgaccccgctgacctggctgttcacccagtggaaaaagctgctgggccactttgtccacagcggcgaggccgataccatcacagagggtgagctgatgaccatggtcagcgaggctgaaaatgacggcgaactgaccgaccgggaaagcgagctcatccgcagcgccatcgagttcgatgacgtggaggtggaggagatcctgaccccccgtgtggatgtggtggctgtggaggacgatatcccgctggaggagctggcccagacctttgcggagtccggttactcccgtctgcctgtctaccacggcaccattgataatatcattggtgtggtacatgaaaaggatttctatatcgcccgcctgaaaaaggcgaccaagatcgatgatctggtggtgcccaccctgtataccacgggttccacgcagatctcccagctgctgcgcaccctccgggagcagcaccaccacctggccgttgttgtggacgaatacggcggcaccgagggtatcatcacgctggaggatatcctggaagagctggtgggtgagatctgggatgagcacgacgaggtcactgaggacttccgcaagcagtcggacggcagctggctggtgtccggctctgccagcgtcgatgatctgtatgaggagctcgacctgccggaggaagaggatatcgattccaataccgtcaacggtctggtgcaggaaaagacctgccatctgcccaaggtaggcgaccgctttaccctgggcgagtacgatggtgttgttacccgcaccgccaagcgccgcgtgacggaggtgcgtctgacccccgccgccccggctgaggatgccgagaaggacgacgaaaaggataagcgtttctcccgccttgcacagcgcggggagagccgctgacaggaagcgtaagatagaaacagtgaaacgccgccgggtggnnnnnnnnnnagcttttggctctgcccggcggcgttttcttgattcaagtccttgcccgcggccctgcactgtgctaaactgaataaaatacagaacgcaggaggacaaggaacttgaaacggatgtcgaagtttgcgcgccggtgtgcggcgctgatgctggcggtggtgttgctctgcatggcagtgcctgccgcctttgcggcggaaggggacaccctgcccgccggtgccaccaccatgggcggtgccaacactactctgatcccggacgaggaggaaaactgcctgagctggctcttcggctccggcgataccatcaccatgccctacctgaacgtcaaggggcagggcctgcgccggaacgtgaccctggatcttgaggattgtctggtgggcatcacctacactgagctgggctccatcggcagctatgtcagtgacgcggcggcacaacaggcgtggaaagcgcaggcggtggccatccactcctatctggaataccacaagaaatacggctcttcggccaacgcgctggtgtacacccccgtggatcagatcccttcctctgcccgcagcgccatccgcagggcagtctctgaggtcaaggacgaggtgctgacctgcaacggcagcgtcatcgatgcagtgtggtcggccagcgcggggtacaacacccagaccggcgtgtacggcacctgctccggtctggatgcctggggcaccgatgtgccctatctgcagagcgtggaaagcccctacgaggagcagtatcacaacctgatgcgccggatcatcggcaaggattaccgctacatcgagtataacgacagcaagaccggccagccctacgagagcgccgacaccacccataaggatctgggcggctttgtccagtacaatacctttgtctcgaacggaaagagctaccgctacatcggccagttcgtttcctcccgttattgttttgatttcagtgcggacgagaacggaaccccctgcatgaactactatggcttcggccacggtgtgggcatgagccagtgcggcatggtgggctatgcgcaggagcagggcatgggctaccgggacatcctgcgccactactatactggcgtgtcctttggcacggtgggcagcggcagctcgaacggcggcctgttcggctggctgtggagcctgctgggactgcaataaattttgcaccggaaagcgcaggaaatgcggaaaagcgcttctcaaacggaacgaaatctggtatactattatagtttgtaaaaatgcgtctgggcggaggaatggcccagtgaagtggagaagtcggaatgcagttggagaaagcaaaggaaacaaagcaggacatggagcgctgccgcctgctggcacagcgcattgcggaggagctggccccggcaacagctgcggtgctgaacgccgagaccccggcactggaaaaggccctgcaccgggcgggcgtggatgccaacccctttacagtggctgcccggcaggcagacctgctggtggtggaggaccccgcctgggtggagatgcccgcgcagctgcccggacaggtgctgctggtgtttaccggcagcaacgtggctgagggctgggccgaggaactggcccgccggggctactaccgggatttccgctggcgcagccggggccgtgcccagcagtcggctctgtactgcacggtccagcctgccaccgccgagatgatcgcgggctatgagaaggagctggatctcctgcgtgaccggatggtgcgtgccgagcgcacctgcaacgaggaagccgccctcattgagcggctccgcagcgatctttccctgagccgcagccatgccaagaacctggaaaagaccctgaacgaggtgaccagctctaccttctggaagctgacctggcccatgcggtatgttgtcagcaagagccgccagatctggcacaccttcccgcttttcgtcctgctgggtgagctgcgccgggacggcatctcgggagtgcgggagcacgcccgcgccaggcgggagtatgccgccctcttcccggggaacctcctgcgggctgaccgctttgccccggtggagctgctggtcaggcaggcgaacgatcagcctgccggtcccaaaatcagcatcgtggtgcccctgtacaacaccccgctggatttcctggacgagatgctggattccgtggtgaaccagacctacaagaactgggagctctgctgcgtggatgccggtaaggatgaggccgtaggccagcatgtgcaggcccgtgcgaaggccgatgcacgcatccggtatcagaagctggaaaagaatgagctgatccccggcaacaccaacaagggctttgagatggccaccggtgagtatatcgccctgctggaccacgatgacctgctgcatccctgcgccctgtggtacgcggccagggccattgccgaacagaaggccgactttgtctacaccgacgaggcgacctttgaggggaagccggagcatgtggtgctctaccacttcaagcccgacttcatgctggacaacctccgctctaacaactacatctgccacctgaccgtgttcagccgcgccctgatggagcgggccggcggcggcgagcggatggagtacaacggcagccaggattacgagctgttcctccgcctgacggagcaggctgagaagatcgttcacattccccatgccctgtattactggcgctccagccccggcagcacggcggcggatatctccgccaagacctattgcatcgacgcaggcattgcggccctcaaggcccactatgcccgctgcgggatcgctgtggacgatgttgccctcatccccggcactccgggctattacaagaccgattacaccatcgagcacccgggccgggtgagcatcctcatccccacctgcgaccacatccgggatctggagctctgcgtggattccatctatgcccgcaccacctacccggattttgaactcatcctcatcgagaacaacagcaagcagcccgagaccttccgcgcctacgagcggatgcagaaggaacacccggacaacctcaaggttgtgacctgggagggcaagggcttcaattacagcgccctgaacaactttggcgagcagtatgccaccggcgaatacctgctgctgctcaacaacgataccgaggtcatcacccccaactggctggaggaaatggtcatgtacgcccagcagaagcgggtgggctgtgtgggtgcaaagctgctctaccccgatgacaccattcagcatgccggcatcggctttggcatcggcggcgtggcgggccacctgcacaagtatttcccggcggcatccgatggctacatggggcggctgaactatgtgcaggatgtttacggcgataccgccgcctgcctgctcatccgcagggagatctatgatgagatgaacggcctggacgagagctatgccgtggccttcaacgatgtggatttttgtgtccgtgtgcgggaggcgggctacaccaacgtgtttaccccctttgcccagctctaccactacgagagcaagagccgcggcaccgaggacaaccccgaaaagcagaagcgcttccagggcgaggtgctccgcttccaggcccgctggggagacctgctggccgcgggcgatccctgcaccaaccccaactttgatatccagcgtgaggacttcacgctgaagatcctgcctttggagtgaattgatgaaactatcagcctgtattgttgtatataacggctatgacgaggcgctgaaggcggcgcagacggtgctgcactgcacgcgccgctacccggtgaccctgtatctggtggacaatgccagcccggacggcagcggcaaaaagctggagcaggccgtggcggacggcctgctggcagcaggtccgggccagcaggtggtggtacactgccgcaccgagaacggcggctttggcaccggccataatatgatcctgcccgagctggacagcgatttccactttatcctcaacccggatatccagctgaccgctgataccctgagtgatctggccgactggatggccgcccacccggatgccgtgatggcccggccctcgctggtgttcccggacggcaagccccagcagctgcccctgcgtcggtgcgccctgcggcccatgctctaccgccagctgccccggctcagcttctggaaaggccagaacgaccactacctgatgctggatgaggacctgaccaggcccatcgagatcgagttctgcaccggcagcttttccggtgtgcgcaccagcaccttcaaggcggtgggcggctttgacgagagctacttcatgtatgtggaggatgcggacctcacccagaagatgcgcacccggggcaaggtgtatctggtgccccagtataccgccatccacgcctggcaccgcgctgcccaccgggatctcaagcccgccctctggcagacgggaaacctgctgaagtatttccataaatggggcttcaggtggtaagaaacgctccaccatcgcgatgtgctgccgccgtgggcggctgaacggttctgtttgacggcctgttccggaaaaaattctggaacaggccgtttttccttgcttttttttcgatttgagagtagaataaggtgtaaaactatctgatgccgccccacgcggccggaacttttaccctgtaactttgttgacagcggacgcagctccgctttgaatattacgaggtgagcgtttcaccccgtatagctgcacaactttttcaatacaaataaaggagtgcacaaattatgaaaggcattattctggccggcggtgccggcacccggctttatccgttgacgatggtcaccagtaagcagctgctgcctgtctacgataagcccatgatctactatccgctgtccaccctcatgctggcgggcattcaggatatcctgatcatctccacccccactgatacgccgcgctttgaggcgctgctgggcgatggcagccagtacggcatccatctgcaatataaggtccagccctctcccgatggtctggcacaggcctttattctgggcgaagagttcatcggcgacgactgctgcgccatgatcctgggcgacaacatcttctacggcaacggcttctccaagatcctcaagactgccgccgccaatgcagagaccaagggccgctgcaccgtgttcggctactatgtgcaggaccccgagcgtttcggcatcgtggaatttgaccagaacggcaaggtgctgagcgtggaagaaaagcccgagcacccgaagagcaattacgccatcaccggcctgtacttctacaacaaggaagtggtccagatggcaaagcaggtcaagccctctgcccgcggtgagctggagatcacgaccctgaacgatatgtacctgaagaaggacgagctggatgtccagctgctgggccgcggctttgcatggctggataccggcacgatggagagcctggtggatgccgccgactttgtccgcatggtcgagaagcgtcagggcatcaagatcagcgcccccgaagagatcgccttcaagtatggctggatcgaccgcgagaccctgctggagagcgcttcccgctatggtaagagcccctacggccagcacctcaagaacgtggccgatggaaaactgagatattgatgcaggaggggaatcacccatgaaaatcatcgtcaccggctgcaagggccagcttggcaccgagatcatcaagcagctgcgggagggccgcagcgagatcggccccatccccgaaaagctgatgaatgccaccgtgatcccggtggacctgccggagctggacatctccaactataagatggtggatgacttcatccgccgccagcgcccggatgtcatcatcaactgcgccgcctacaccaacgtggacggctgcgaggtgaaccacgacgcagccttcaaggcaaacgctctgggcccccgcaatctggcacaggccgccgaaaagaccggtgcccgcctggtgcatgtctccacggactatgtgttctccggccgtgagaacggcggcattgcacaggacgaggccaccatccccggccccatcagcgcctacggctccaccaagctcatgggcgaaaagtatgtggagcagttctgccaccgccacttcatcgt

SEQ ID NO: 239 - DNA, 6296 bp, unidentified
  source 1..6296: mol_type = unassigned DNA
ttatttcaacaagtttccagagataaccatacgctgaacttctgatgttccttcgtaaatctctgtgatcttagcatcacgcatcatacgttccacatcatattctctgatgtaaccataaccaccatgcaactgaactgcttttgttgttacttccatagcaacttcggcagcatataatttagccattgcagcttctacggagtaagaaactcttgctccatctgcaaattcctgtttcttcaatgcagctttatatacaagagatttggcagcttctacttttgtagccatatccgcaagctggaactgtgtgttctgctgtgcagcgatggaacgtccaaactgttttctctcttttacgtaagcaacggttgtctcaagagcaccttctgcaataccaagtgcctgagcagcgataccgatacgtccaccatccagagtatgcattgcaatagggaatccttttccctgtggtccaaggatattttcctttggaatacggcagtcttcgaaaatcaattcataagtagaagatccacggatacccatcttcttctcttttgttccgaaggagaatcccggagttcctttttctacgataaatgcggagaagttctttttctttcttccacgtttgtcttctgttacacttgtgatagcgattacgatgtaaacatctgctactttaccattggtaatgaagcatttgcttccgttaagtacccactcatctccatcaagaacagctttggtctgtgctccctgagcatcggtaccggcacccggctctgtcaatgcgaaagcaccaagtttttcgccattgcaaagaggtggaaggtatttctgtttctgctcttctgtaccataagtaaggattggatcacagcaaagacttgtatgtgcagatacgataacacctgttgtaccacagacttttgaaagttcctctacgcacattacataggtcaaaatgtcgcatccctgtccaccatactgctttggcaccggaattcccataaatccatatttacccattttgtctaccgtagactgtgggaaaacttctgtttcatctgtttcctgtgccaacggctttgcttcattttcagcgaaatctttgaacaatgttctcgccatttcatgtttctgatctaaagtaaaatccattattaatgaaccgcctttctgtatatttgatggatcctatatccaccgaaattatttgctgtaatcgtagaatccgataccagtttttcttccgagctttcctgcacgaaccatcttgcgaagcaatggatgaggacggtatttaggatcacctgtctcagcctgaagtacttccatgatagcaaggcagatatcaagacctaccaaatcgccaagtgcaagaggtcccattgggtggtttgcaccaagctgcattgctgtatcaataccttcaacagaagctacaccatcagcatagatgccaactgcttcgttgatcataggaatcaaaatacggtttacaacaaatccggctgcttcttttacttctaccggtgtttttccgatctctttagagattgcaacgattttctcaaccatctcggctggtgtattctcacctgcgataacttcgatcaatttcataaccggagccggattgaagaaatgcataccgataaccggacgatccagtcctgcaccgatctctgtgatagaaagggaagatgtgtttgtagcaaacatacaatctttctttacgatatcctgaagttctttgaatgtctgtttcttaacatccattacctcaagagctgcctctacgatcagatcacagtctgtacagatttcttttgtacctgttgtgatcttagcaaggatgctgtcagcagcagcctgatccatttttccttttgcaatacgcttttcaaaaccttttgcaattttgtttttaccgtttgcagcaaattcatcattaatatcacacaagcaaacttcataaccttctgtctgagcaaatgcctgagcaattccggaacccattgttccagcaccaataacgccaactttcattgatacatacctccgtttttttattctccggaccggacagatccgatccggaaagttattatttcatgctaaattatttattctggaaaggaactactttgagttttttctctttgtccttctcaaggaagttacccattcctgctttctggtcttctgtctcaaagcagtcaccgaaaagtttctcttcgatcacgattgcctgatccatatcaacctgaagtccttcattgattgctttcttgcagttacgaacagcgatcggagcctgcatagcaatacctgcagccattttctttgctgccggcataagttcttccaaaggatataccgcatttacaagaccgacgcggtatgcttcctcagctttgatgttgcgtgctgtgtagatcatctgttttgccattcctacagggattacacgagcaagacgctgtgttccgccaaatccgggagtgataccaagacctgcttccggctgaccaaatacagcattttcagaacagatacggatgtcacagctcatggagatctcgcatccaccaccaagagcaaatccgtttactgctgcaataacagggatagggaaagtttcaagtttgcggaatacatcatttccttttttaccgaaagcttctccttctgcttttgtcaatgtgctcatctctccgatatctgcaccggctacaaaagatttctctccggcaccggtaaggatcagacaacgaatcacatcaagatctacaccatccaatgtagcatctaactcatccagcacctggctgttcaaagcgttcaatgcttttggacggttaatggtaataataccaactttgtcttctacttcatacgtaatgaattccattttgggaactctcctttctgtactgttttttcagaaattagtcacgttctacgattgtagagcatcccattcctccaccgatacaaagtgttgcaagacctttctttgcatcacgtttctgcatctcatgaagaagtgttacaaggatacggcatccggaagctcctaccggatgtccaagtgcgatcgcaccaccgtttacgttcaatttactgaggtcaaatccaagttctcttcctactgctacagactgtgctgcaaatgcttcgttagcttcgataagatcaaaatcatcaatactcatgcctgtcttagcaagaactttctttgtagatgcaaccggtccgatacccatgatcttaggatccacaccgccaagagcacctgctacgaaagtagccataggtttaacaccaagttcttttgctttttcttcgctcataacaacgatagctgctgcaccatcattgattccggaagcattaccggcagtaacaaaaccgtctttgttgattggacgaagtcttgcaagtccttccattgtcgttccaggacgtggtccctcatctttattaaagataattgtctcttttttcttcttaacttcaaccggtacgatctcatcatcaaatttaccggcttcctgagcagctacagcttttgtctgacttgcaacagcaaactcatccagttcttcacgtgtcaggttccatcttggatccttacagatgttatctgctgtctggatcatatgataatcattgaatgcatcccaaagagcatcgtttaccatcgtatcgataatggtattgttgttcatacgatatccgaaacgagcctgtttcaaagcgtatggagccatggacatgttttccataccacctgctactacgatatctgcatctcctgcctgaatcatctgtgctgccatatttacacagttcaaaccggaaccacaaacaacgtttacggttactgcaggtgtctcgattggaagtcctgcattaatagaagcctgacgtgcaacgttctgtccaagacctgcctggattacacaacccatgtaaacatgatccacctgatctgccggtactcctgctctctccaaagcttctttgatcacgatagaaccaagtactggtgcgggtgttgtactaaggcttccacccattgtaccgatggcagtacgacatgcgcctgctaatactacttttttagacataatatgtatcctccttgttttttgtcattactttaattttttatattgcagccggataaaatccggtttataaaccttatattattcagaaaacctttcctgcagtttcttttcaacaatcgccggtacaaaatgcgaaacatccgaaccatacgatgccacttcccgcacgatcgtcgagctcaaaaatgcatattccaggctggtagtaaaaaacatcgtatcgatttccggattcaggctgtgattcgtttgtgcaatctgcatttccgattcaaaatccgataccgcccgaagtcctcggaccatcactttggctccgacttccttcgcaaaatctacggttaatccctgaaatgtcgcgacacggacattattaaagtttttcgtcgcctctttgagcatctctacccgctcgtccatcgaaaacaatggatttttcccactgtttaccaaaacagcaacgattacttcatccactaccttcgaagctctctcaatgatatccagatgtccataagtgaccgggtcaaaacttccggggtaaactgcttttaccataatatgctccattctgcattcaatcgtatttgaaacctgacaaaaaataactacattgttatttttttaacaatccatcttatcaagtaacaaatacataataacaccattactccctattgtcaaataattatcaatctttttttttcaaatcttcccccttgaccccccttttcataaatgttaaaataatatcaaagtctaacggttaccatgtaacttaaataattaggaggcgtctttattatggattaccaacagatgtatcaaaacaaacttacgacagcagcttctgctgcaaatgttattcaatccggtgactgggtcgattacggctggtgtgtcaacactccggttgccgtggataaagaagtagcaaaacggctgccatctcttgaaaatgtaaatttccgcggcggaatcttaatgtgggttcctgagattttccagattgaagatcctgcagctcatatgacatggaactcctggcatatgggaggtatcgaaagaaaagccgttgcacagggattttctttctactctccgatccgttattcggaactcccacgttattaccgtgatttgagctgtccttcccgtgtagcgatcttccaggtatctccgatggacgaacatggctatttcagttttggtccgagtgcttctcatctggctgcctgctgcgaacgcgccgaagtgatcatagtcgaagtaaatgaaaatatgcctcgctgtcttggcggttttgaaaatggcattcatatttctaaggttgatatggtcgtagaaggcgataacccaccaatcggtgaaatgggcggcggcgctgctgctaccgctgtcgatcaggctgttgccaaattgatcgtagaagaaattccggatggagcctgtctccagctcggtatcggcggtatgccaaatgctgtcggtacgatgatcgccgaatctgatctgaaagatcttggtgtgcatactgaaatgtacgtcgatgcctttgtcgatattgcaaaagccggaaagattaccggagcaaagaaaaacattgaccgctatcgtcaaacctatgcatttggtgccggtaccaaaaaaatgtacgattacttaaatgacaatccggaatgtatgagtgctcctgtcgattatacaaacgacatccgctcgatttccgcattggataattttatctccatcaacaatactgtggacatagatctctacggacaggtaaatgcagaaagtgccggaatcaaaaacatcagtggtgccggtggacagcttgacttcgttcttggagcttacctttccaaaggcggaaagagtttcatctgctgctcttccacattcacaaacaaacagggggaaaaagtttcccgtatccgtccaacgttagccaatggatctatcgttaccgatacacgtgcaaacatccactactttgttacagaatatggtaaagtaaatctgaaaggactttcgacctggcagaaagcagaagctattatctctgtcgctcatccggatttccgcgatgagctgatcaaagaagcggaaagcatgcacatttggagacgctctaacaaataa

SEQ ID NO: 240 - DNA, 14059 bp, unidentified
  source 1..14059: mol_type = unassigned DNA
atgaaagaagactggaaacccggaacaatgatttatccgctgcctgccgtattggtgagctgcggaagcactccggaggaatataacattctgactatcgcatggacggggacgatttgtacgaacccgcccatgtgctacatctccgtacgccccgaacgccactcctacgacatcatcaagcggaatatggaattcgtcatcaatctcaccacgaaagacatggcccgtgccacggactggtgtggcgtacgctccggaaaggactacaacaaattcgaggaaatgcatctgacaccggggaaaagcaccgtagtcagcgcgcctcttatcgaggaatcaccgctttgcatagaatgccgggtaaaggagattatggctctcggttcgcacgacatgtttatagcggatgtggtaaatgtacgtgccgatacccgtaatctgaaccctgaaaccggcaaactggaactggcggaaacgaatcccttggtctatgtgcacggtggatattatgagctgggagaaaagataggcaaattcggatggtcagtagagaaaaagaagtaataatgcgataaaggttttaagagatggagttgcgacgaatcttgatgggcttatatctgttggccttccccgccatgatgtggggacagactccggttgtgcccggtactgccgacgaagagcattccggacaccgcaaggaaactccggtcaatttcggtttcaaaggcggtttcacctcttccttgttccttgtatcccagttcagcgtcaacggagtgcccattgacgaagtgcagaacaattacaaaataggatatttcggttcccttttcatgcggataaacttcgaccgccacttcctgcaaccggaaatatcctacaacatcaaccggtgcaacatcaccttcgagaaacctctgcccgaagacgccgcatcaggagcccggccggaggaagcctccattacatcgtccatccacagtatagacatccccgtcatctacggatacaacttcatcaaggaggggccgtacagccttgccgtctttggaggacccaaagtgcgctatatatgggacaggaaaagtgacatcgacttcgagaatttcgaccaggtgaatatccgtgaaaggctgcgtccgctcaatctcagtttcaccgtcggcgtatccgtcaccatctcacgcgtctttttcgacttccgttacgacatggggctgcacaacatctccaagagcgtgacatacgatattccggccgacaacaacgctgcagacgaaaacacgaaaaacgaaatacgttttcaccgcagggacaatgtgctgagtttttctttcggagtgttcttttgacagtaaatttcttccttttctttcaatttattcatttatttcccgtaaatttgtgcgcttaataagagaacacagatttatcaaacttatctaataagcagaatgaaaagagatgatttaattttcgaacttatcgaaaaagaacaccaacgtcagctcaaaggcattgaactgattgcatcagagaactttgtaagtgaccaggttatgcaggcaatgggctcctgcctcaccaacaagtatgctgaaggataccccggcaagcgttactatggtggttgtgaggtagtggaccagagtgagcagattgccatcgaccgcttgaaacagatcttcggcgcagaatgggccaacgtacagccgcactccggtgcacaagccaatgcagccgtattcctcgccgtgctcaatccgggcgacaaattcatgggactgaaccttgcacacggcggtcacctctcccatggttcactggtcaacacttccggtattatctatactccctgcgaatacaatctgaaccaggaaaccggacgtgtggactatgaccagatggaagaagttgccctgcgcgagaaacccaaaatgattatcggcggcggttctgcttattcccgcgaatgggactacaagcgcatgcgcgaaatcgcggacaagataggtgccatcctaatgattgacatggctcatcctgccggactgattgcagccggtgaactggataaccccgtgaaatatgcccacatcgtgacctccactacccacaagactctgcgtggtcctcgcggtggcgttatcatgatgggtaaggacttccccaacccctggggcaagaaaactccgaagggagaaatcaagatgatgtcccagttgctggattcagccgtattccccggtatccaaggtggtccgctagaacatgtcatcgcagccaaagccgttgccttcggcgaaatcctgcaaccggaatggaaagaatatgccaagcaggtgaagaaaaacgccgctgtcctggcacaagccttgatagaccgtggcttcaccatcgtttccggcggtacggacaaccactccatgctggtagacctgcgcagcaaatatcccgatttgaccggtaaggttgccgagaaggcgttggtatctgccgacatcaccgtaaacaagaacatggttccgtttgacagccgctcggctttccagacttccggtatccgtctgggtactcctgccatcacaacccgtggtgccaaggaagacctgatgctcgaaattgccgagatgattgaaaccgttctgtccaacgtagacaacgaacaagtcatcgcagaggtacgtgcacgcgtcaatgcgaagatgaaagaatacccgctgtttgcttattaataagcaaacagaattaaaaattaagaattaaaaattaaaggctgcgcagttcaaagcgaacattgcgcagcctttaatttttaattctaaacgcgctccgcgcgtttagctcagcccttctatatttccgtccacaatatcaatgtgttcggcttgtggtttcttgggtaatcccggcatacggagaatttcaccggcgatggctacaatcatttccgcaccgttattgaccacaatatccttgatgtggaactcaaagttgttgactgcaccgtatatcttcgggtcggcagagaaggagtactgcgtcttggcaatacagacggggtaatggctgatacccatctgctctatcagtttgataaccttgcgggagtggagactgtaagtcactacgcttgccccgtagaggttgcaggctaccttttctattttacgttccacgcaatcgctctcttcgtaggtgaaggtcagcggttcggatggtttgttctcgatagtatctactaccagattggcaaggtcaacggctccctctcctcctttggcaaaggcgttgttcacggcaaaacctacctcaagcttttcttcgcaatggcggcggatagcttccacctcctcgtccgtatcactggcaaaacggttgaatgccacgatgacctgctggccgaatgaacgcaaattgcgtacatgcttgtccagattgccgaagccctctttcagtccttccatattgggttccttgatgcggtccagactgacaccgccatgcatcttcagtccttgtgcggtagcaacgattatcgtcagcttgggctgtaggccgctcttgcggcacttgatgttgtagaacttctccgcacccaggtcagccccgaaaccggcttccgtcactacataatcgccgaatgtcatggccatttttgtggcaagaatggagttgcaaccatgggcaatatttgcgaacggtcctccatgaataaaagcagcagagccttcggtagtctgtaccaggttggggttgatggcatctttcaacagtacggtaatggcaccggctactcctaactccttcactgtgaaaggagtaccatcgaaacggaatcccagaataatattttcaatacggcgacggaggtcgtcgaggtccgttgccagacagagaatagccataatttcggaagccggggtaatatcgaagcccgactcctcagtaatgccgttggtgctcggtcccaatccggtgacaatgctccgcaaggaacggtcattcacatcaagtacgcgccgccagatgatttctttcagtccgaagccgtctgcctgatgctggtacaagtaattgtcgagcaaagcggaaatcatgttgtgtgcggaggtaatggcgtgaaagtcgcccgtaaagtgcaggtttatcttctccatgggaagcacctgggcatatcctccaccggcagcaccgcctttcatgccgaagcaaggacccagcgagggttcgcgtaaagccacaatcgctttcttgccaatcttgttcagccccaatgccagcccgatggacacggttgttttaccgatacccgctttcgtagccgtgatagccgtcaccagtatcagattgctcttcttcactttctcttcatcaatcagatgcgtaggaatcttggctatgtaacggccatagttctctacttcgtcacgcgggatatccacactttcagccacctgctttatcttcttcagctctatgctgcgggctatttcaatgtccgatttcatacagagtcttttctttaaataacaactttaatgttttgaaagttgcaaaagtacgaaagatgtggcaaagtacaaaagaataccgtattttcacctgaccacctgcatcttctatctatttgaaccgcgacgtatccactgcctcccgttgcttctccttatatccaccgaatttataggtgaacgatacgccgaattcgcggaagcatgagtaatgattcgtcacattctgcgtcttgaaacggatgcggggagaaatctgtcccgtctcaaaaatatcgttgtaatagaggttgagaatggctttgttcttggcgaagccgtagcgcagggcaatattcacattgcccgacgtaggcaggtcgtagatgccctgaatggctttactatgcacaaatccggtcaccgtcagcttcaagtcgggtttggtggagagagtaaaagtattgttcatctgggcaatgccatagcattgctttctatcgaaaggaatatcccagaaatcaccatccttttcgcgatgccacaagccgatgagggtaagacgagaattcaaccaattcttcaccttaaacggtatagaggcttgtatacctgcttgttgctgataatcaaaattgagtgtcttgtagatttcaaccagacgttcggaagattggtagagcgtctgtacggagtagtccttggtatggttgaaccaagcgctgaagatgtatttgctcttcaaaatataggtcattttaagctcatactcttgcgccggtttcagcaacggattaccatgcagctcagagtatccgccaccgatgtaagagacggcatcctgcaccgcccagtagtcgggatagtccttgtcgctgctcaaggagagctggaggatatgtcccggtgccggcatatagttcaagttgacaatgggataccagtcccactggtcccagacgggagtcttgtaatgctccacagccagggaagcgtccaaagcaagtttgtcgccgaaactcttgctgaaacctgcatagatattccaggtctgctcgcggcggcgggacttcatattgctcaaggcatccgatgaggtcagttgtccgccggtttcggggtcataataatattggtagctgttgtcgatgctggtagtatagatggctccgtaattcaaatcccaaccttttcccagactgtgctcctgggccagaaagaatttccagcggttgatgcgctgacagtcttccgtgtagaaatcgagttcctcatcctgcatacggctatgcagtagttggttggacggagagcggtagtaggtcagttcggcaccggctttgaggccgaaaggggtacgatagtccagacggccgttgtgcagccagtcggtgctattgccatgagttgtggacacctgtgtgcccgtcacgcccttccagttgtgggaagtggaatagccaccgttatagacgagactcagctgatggttcttggcgatattatagtccgcccctacccggaagctatgggtatggctgcggccacggcccacctcatctgttgtcatggggtgaaccgagccgtctgccagagtgtgcacagcctctttgtcggtagtagagtagccccggccatggctgtgcgagtaaagaaaatctgctgagaatttatttttgctgaagagcaggctggcgcgttcctcaaagccttcgttatgcttctggcgatacttggcatagagttcgccttgccaggagccggggccgcctaccgattgtttcaaggtgatattgataagtgcgccacgcacctggtagcgtgcaggggcgttgtacatcacttccgccttctctatgcggctggcagggatgctgcgcagcaaggaatagagctgctctgtgctgagggtggttactttgccgtccaggataacggtgactccctgacctgccaactgcagccctccattcatctcgatgacgccgggaagctctttcacggcatcgtaggcattgtctacggggaggttctggataaggcggggcaggtcgtacaccagcttgccttgcgctgccttaacgatggggcgttcaccggtaatcatcacttccggcaaggtctgataaagactgtccagacgggcatcggtcgtgataaggctgtcggcgctgaggatgcggttgtcgtccgcaccggaggtggttgcagtaccgttgttctcttgtgccgaaaggctgatgctcaaagcacagcatacaatagggagtaaatagaatcgtttcatgtccttctttttatttatgtttatattcttcttctgcaaatcttcgtctgcaaagtacggcagaatcagcagaaacttgtgttatcagcggcttaccaagtgttatccagtgttatcgggagtgttatttagtcttatcggatgatagggttcacaatattaatcttacctttgtatgcataaaagtaaccggaaacaaacatgaaactgccattcaaatatattgccatacttgtcatcgtctccctggccggtatcttcgcctaccaagcctactggctgacggggctctaccataccatgcacagtgaaatggaaagggacatcaccgaagccatgcgcatgagcgactataacgaaatgatgatacgcgtggataaaatgaagcaggacgacataaaccacggtgaagtcagcgtatcagccggatacagcgatgacggaaaatcatttgtccgtagcagtaccaccatctcccgtgaagattctttggacaacaccaccctgcacgaaaccttcatgcccaaaggagacagtgtttacgtgacccacccgaacgattcaacccgcgtggaagtcagtgtcagggactcagacagctctccccaatccgcattgagtgccaaagggggactggatgtgattttgcgcgaccaaaacagtatgctggaactcgccacctacttccagcgcggactgcattcgggactggacatcatttccgaccccgacgtagtgctttatgacagcctgctgacttcattcctgcatgaccgtaacatcaatcttccccataggctgctacatcttcacaaaggcagtaaatgggactctaccattctctatatagatacattggtaaacatcggtactcccggctatgtgcctacctcaaaagctgtggaatataattattctttcgacatcaatacaagtcaaagctaccgtctcatcatggaaccggtcggcatgctggttctgcggcagatgtcgggcattctcaccacgtcattcatcatcttgattgtactcgctttctccttctggttcttgatacgcaccatcttgaaacagaagacactggaagagatgaagagcgatttcaccaacaacatcacccacgaactgaaaacccccatcgccgtagcatatgccgccaacgacgctctgctcaacttcaaccaagcggaggaaaaggcccagcgcgacaaatacctgcgtatctgccaggaacagcttcagcgcctcagtggactggttgaacagatactttccatgagtatggaacgccgcaggactttccgcctgcacccggaggagtttgcaatacgtgatattctggaaacgctcatcgaacaacacaagctgaaagcggaaagctccgtccacatatcggtggacatcgaaccggaagatttgagcgtacttgccgaccgtacgcatttcagcaacatcatcagcaacctgatagacaacgccatcaaatattcgcacggagaggccgaagtggccatccattgccgcaaggtaaccgtcgaagggcagaatgaacagaccgaaatctccgtcagcgaccacggtatcggtattgctcccgagaagcagaagcacatcttcgacaaattctaccgcgtacccacgggtaatctgcacgatgtgaaaggctatgggctgggattgttctatgtgaagaccatgatagagaagcatggtggcagcgtatcggtaaagagtgagttgggaaaaggaagtacctttacgataaggatatgataacattatttgttagggtactttacattacttgttaaggagctttacattacttgtaacaaaagcgacaattatggaaaagataaccgtacttctggttgaggacgaacagaccctcgccatgattatcaaggacacattggaagggcagaacttcatcatccacaccgcagcagacggtgaagagggattgcgcaagttcttcgacctccgtcccgacgtgctggtggcagacgtgatgatgccccgcatggacggctttgaaatggtgcaccgcatccggcagaccgacaaacagaccccggtactgttccttaccgcccgctccaccatcaacgatgtggtggaagggtttgagctgggtgccaacgactacctgaaaaagcctttcggaatgcaggaactcattatccgcataaaggccctggtaggcaaagctttctcctttacagaggaaaagcccaaagaaactaccgtttttgaaatcggtgactaccgtttcaattccgtcactcaacgacttgcttttgcaggcagcaccccgacttcacctaacgcggatacggaagtggaactctcccaccgcgagtccgagatactgaaacgtctttgcgagaaccgtaaccaggtggtcaacacccagaatgtattgctcgacctctggggagacgacagcttcttcaactcccgcagcctgcatgtgttcatcaccaaactgcggcataaactggccggagacgagcgcatccgtatcgtcaatgtgcggggaataggatataaactaatagtgaactaaactaaaactaaactactatttatgagaaagttattattcattacttttatctgttcctcactctgcgcctatgcacagagcgagattccggaagacacaataaagaaccggcctcccgtaaagaaagagcagattcccttttctccaaaagagaacaagcgtacgggccttgatgaaagccagccccaacaaagcctgcagggcgaacagcaggaagagataaatctccatctccctccctccgactatgtggagcccctgccctggacggacatgaaaaagatacacttccagaagaacatctttgaatgggacttccagcgcttcgccgatttcctgctctcgccggaagtcgtactgacgatgtacggcagccataacacctatcctgcaatgggctccatcatgcaggctggcgcaggagtcacttattacagtcccgacggacattgggaattgagcggaggggtatatgccgcccactattccatttctaccccctcctccattgccggcgcccgatatgccaaaagggatgcccctcggggtacccaatgggacgtaggttacaatgcctccgtatcctaccgcatcaatccctacatgcgcctgcatgccttcggccagtattcgggctacgggagaagcaactcctttcatggatatatgaacccgatgtatccgcaaagcggttatggcatggtactggaactgaaagtgacggactggctcgacctcaacggaggcctggaacggagctacgaccccaccaaaatgaaatgggtgacttcgcccgtcttcgcccctaccattcgtataaagaaatagaaataatacaaagatatttccggaaatagagggaaacgagtatctttgttcagtctgcccctatgcggcagacagcaactgaaattgtgaacaaagaactatgaaacgaatcttcttctgcatcatcattttacttgcaggcatgtcatccgtcagcgcacagagcgagatgcctgccgatacggtacgtactgcagtacatggcgaagcgtctcccgaaggcatgtctccgtctgaaaaggagcttctgccggacgtgaagaattacgacggcttcctgctggatatggggctgatgaatctgtctgcccccactcttcccaaattcaccttggagataccggatgccagcaaggactatagccgcatcttccagttgaacccgaacgtgacttattcacaaggcctttcgaacatattctcactcagcaactcccggtatttcagttcaaaccccttcggactgacgggcttctggggctctaccgacaacctgcaaatgggaagtttcactttgaagaacggcatgcgcatccatacgtacggcgaatatgacaaggacggctggaaagtgcccaacccttccgcactgccttgggaaaagaacaatttcaaaggggcgttcgagctgaaatcagccaacggagcctttggcatacgcatcgaggtacagcagggcagacacgtgccctattgatgcccatcacttaacaacagaatcaatgacaagaaagaaaatactggtgataggcgccaacggttttaccggcagacgcatcctggatgatttgtcccgcaacgtgtcttatcaggcaacgggctgttccctgcacgacgacatctgtcctcattcgggcgactatcgctttatccgtacggatatatgcgaccgccaggcggtggaaaagcttttccatgaagtacagccggatgttgtaatcaatacctccgccctctccgtccccgattattgcgaaacgcaccatgcagaagcggatgccgtcaacatcactgccgtagagcatctggcagaatgctgtgaggcgggaggcagccgttttatccatctttccaccgacttcgttttcggtggtgatacggaccgaccctatacggaggagaatattcccgctcccgttaattattacggctacaccaaactggaaggtgagaaacgtatcgccgccgtttgcagggattatgccatcgtgcgtgtagtggtagtgtacggtgccgccctgcccggacagcatggcaatgtgctccaactggtggcaaacagattaaggagcaatgaggaagtgttcgtcgtatccgaccaatggcgtacgcccaccttcgtgggagacgtgtcgcaaggagtggagaagctgataagtcatccgcaaaacggtatctatcatctctgtggcagcgagtgcctgaccattgcagacatcgcttatcgggtagcggacgtattggggctgaatcgctcgctcatccgtcccgtcactacgaaggagatgaatgaaaagacgccacgtccccgtttcagcgggctgagtatagaaaaggcaagccgggaactggggtatcagccgcacacgctggaagaaggaataaagcagatgttcggatggtaaataatgcaggtgcggatggcagcagattcgactacagcaactccggctctgccagtcctttctctttgcgatacacacgtaccatctccagaatcacatctccatatttctccacccctttttttccgaaatacggaatgcgtacaagcatggccttatccgaaggaagcagattgctgatgcctagaattgccttctgctgaatgacggtgtatacgggcagccctaatgcggaagcttctgcattgcgccatgctaccaagcggttgtaaagttccggatgcagcacatccgtgggtacttcaacagccgcagcatcgcgtttccgctcacgcggacgtttctctttatcagcctgcttactgcttccctgcccttctttggcagaagcacttctccctttgcctttacccttctgcgaagccgaatcatcaatggaaagcagtgctttctgcttcaagtatcctgccatatggaaaccattctccagcacataatccagcaaatcagtcttcatgtcaaacacttcctccagctcctccatggcatcccggagcttcttcttcaactctttattatcagaagttaccgtactcgccatcaccgcatccagcggttgcaactgctcttgaaaataagtggcggcagagtgtatgcgcccctgcaaagtcgggtcggctgcatagtcctgcgcagtatcaatcaggcgggtatactggatactgaacttctgggctactttcgtcactttgtcgtgaaaacgttccatttcctccttacaggctgcgagttgcttgggaaagagcttgtacaagtgttcgtctatcagccgcacataccgccgcaaagcctgctccatgggctggaaatcgaacaagcccgacagcagttccaggaaataggtctgctgcaaggaacggaagcgtttctcgtccggctcgtttctccgtgcctccatcgtgaaggtatctactgcatggtcactgataacggcctttgcagaaagcggggcactgagcaccactccctccaatgtcttgcagcggctcagagccacataggtctgcccatgcgcaaaggaggcactggcatcaatcacggcacgttcaaacgtcagtccctggcttttgtgaatggtaatcgcccacgccagcttcagcggatattgccggaatgttccttcaatatcttctgtaatctccttggtttcctcatcaagcacgtatttggcattcgtccactcttcctcttgaagtaagaaggtagcgtcgcttcccttactgcgcacttcaattccatctgccgacacggctgtcacctctccaatcatgccattgtagtaacggtgctcaccggaggtgtcgttcttcacaaacattacctgggcaccgcgtttcagttccagtacttcatccgtgggataggaatattcgggaaactttccgtcaatcttggcacgaaaggcatacgagcgtcccggaagttgttccagctcatggtcattaatccgttgggcctgataattgtgggtcaccaggcggatgtatccttcttctttatctggtacgaaattgggaatataccggcggttcaaggcttccagcacttgcccgtcacaacggttttcgcgaatgcggttcagtagttcaagaaaagtcccatcgttctgccgatagactttctttagttctatggtgcaatattccgtctgcttcaaggcctggctggagaagaaataaggcgtgtcatagtatttgcacagcatctgccactcatcgtctttcactacgggagacagctgctgtaagtcgccaatcatcagcagttgcacgccgccaaagggtttgttccggtcgcggaaccgcctcaagacggcatccaccgaatcgagcaagtcggcacggaccatactgatttcatcgaggaccaataaatctatgctgcgtataatgttgattttctctttcccgtaacgaaaacggtaggttgccttgccatctgcgctgaatgagctttcgggcacataaggagcgaaaggtacttggaaaaaggagtggatggtgacaccgcctgcattgatagcggcaattcccgtcggtgcaagtacaatcatccgtttcggactctctgccctcagttttcgcaggaaagttgtcttaccggtacctgccttgccggtcaaaaaaagatgagtgcctgtgttttcaatgaattgccatgcaagcgctatttcgggattattctccat

SEQ ID NO: 241 - DNA, 11486 bp, unidentified
  source 1..11486: mol_type = unassigned DNA
tcagccattgtaaacctccaaaattctctgttcaaatttttctctgcctactctgtcgattgtaaacttaaatcgttcgctcggctttgcgttttctgcaaagaagttaagagcggcatcacagatttccataagtttttctttattttcgataaacggaataattgtttcgcccttgttgattgagttgccgaaaagtccgccgaatgaaacaatgtaaccgtgaattgtgtcccacgcatctgtcgggcaagccttgaagcatctgccgcagtagttacactttgaattgtcaacggaaattttcccgtcctcaagattgattgcaccctgacggcaggcctttacacagactccgcagccgatacaagcgtcctctttccatgaaaccttgattccgcccttgataccgacatcgttttcctcagctttaaggcagttgttctgacagcctgttatgccgaacttgaacttgtgcggaagttcctttgcaaaatatctgtcgtcaagctcctttgcaagagcgtatgtatcaatacaaccgccggggcagattgcctcaccctgacaggctgtaattgttcttactctcggaccgcaaacgcccggctcaacatcgccctcggcaagcgcgtccttaactgcctcaacatcatcaagctttacaaaaggaatttcaacactttgtcttgatgtgaggtgaacataaccgtcaccgtagttttccgaaacctcggcaattttcgcaagctgtttagctgtgaggttgccgcctacaactctgagcctgagtgaaaaattatttttctgtttttgacgcataaagccgccctttttaagcgtagcataatcaactgccatttctcttactcctccgattcattcacatttatactgtctacagcctgtttgaagtcagactttaaatcctcaatatcttcaatgccgacgctgattcttattgtatcatcaaacacgcctgcgtttcttttttgttcttctgttccgtgagcgtaaattgtgcttgacggatgaattacaagtgttcttgtgtcgcctatatttgttgcatttgttgcatacttcaaattgttgataagcttaaacgctctttctttacttcctgccctgattgtgaggattgcaccgccttttcccttcaacagcttttgacaaagactgtaatatggagaagcttcaagagccggatagttgacttcgattccgttttgtgtttcaaagaactttgcaagctcaatagcgttgtaacaaagacgctccatacgaagtccgagcgtttcaagtccgacagagttcataaaagcattaaacggtgcaaggcaacagcctatgtttcgccagataccgtttctcagctttgcaacatatgcaagccgaccgaattttttgtactctgcaagacctttgtatctttccgtattccattcaaaattgccgctgtcaacgattattccgctgattgaatttccgccgccgttaatgtactttgacgaggaatgaacaacgatgtccgcaccgtgttcaaacggctgaataagatacggagttgccgttgtgctgtcgataatgagcggaacaccgtgtgaatgaacaagctctgatacagcgtcaagatcggcaatttcaagtccgggattgccgataagctcggcaaagactgcttttgttttttcgtttatgagcggttcaatctcctcggctgtcaccttgttgacatatcgtgtaacaattccgaaaggctcaagatctccaaacaaatcaattgttccgccaaaaagacctgcgcttgctattacctcgtcacctgattcaagaatgttcaggagtgccatcgtaacggctgccatacctgacgaacacgcaaccgcaccgacaccgttttcaatggaagcaattctgttctcaaaagatgttaccgtgggattgcctattcgagagtaggcgtagccgggagctctgttgttgaacaccttttcaagctgttcggcagagctgtgcgaaaatgcactgacctgataaatgggagtcaaggttgagccaaaaaccttttcaccgttaaaccccttgtgaagtaatgcggtgttaaactccataatatcaccaaccccttaatttcatacaaccaacccttttgtgtaagaccgtcgtaagaatttgtctgacggcttcgattgatataggtagattatactccattaatcatagtatttcaataggtttaataagattttacctcttgcacaatttttctttaaaatttgccgtaattccattatttcctacaatgcatatttgtttagtaggtattgatttttaaattaaaaactgttaccattattatatactctttcagcaaacaaaacgcacggaaaggagatgctaaaattgaagatttcaacaaaggtggaattcggaattatcgctgttattgacattgcgtcacactcactaaacggcaatgcggtaacaactcccgaaattgccaaacggcaaaatatatctaaaaagtatcttgaacagattctctcatcactcagctcggcaggacttgtgcgaggtcaaaagggttcaaacggcggttatgttattgcaaaaaaccttaaagggattacattcaaggatatcataaacgcacttgacgcaaatgttctgagcaatgtttattttaacactcggggcgatgatgatattatgataagacttatcgacaacagtctttggtcgaagatgtcgtcatatcttcaggaatatgccgaaagcattacactagcacagctttgcgatgagtatatcaaaaacaatgaaattgaacacaacattccgatgtactacatctgatagattacaaacaaaaagccaccgatttttatgtcggtggcttttcttgtttttatcggattttatttaaagctttcaataacctgacaggttttttcaatgtcatcttccgtgtgcgcaaatgaaacaaacatcgcctcaaactgtgacggtgcggcatagattccgttttcaagcagatgattgtaatactcggcatatctctttgtgtcggctgtggttgctgtgtcatagtcaacaacctttttgtcggtaaaaaatgccgtcataatcgaacccacacggttcacattaagtcctgcgttcttcattgcattttcaatctttgcagacttgcgttcaagctcgggatatatcgaatctttatttttttcaagaattttaagcgttgcaatgcctgcacttaccgctaccggatttcccgaaagtgtgcctgcctgataaacagaaccgagaggagcaacacactccataatctcttttcgtcctccgtaaaccgcaagcggcattccgccgccgacaatttttccgagggttgtaaggtcgggttttactccgtaaagcttttgagcaccgccgagtgaaagtctgaagcctgtgattacttcatcaaaaataagaagtgagccgtgcttttccgtgatttcacgcaagaattttaaaaatccttttttgggcggaacaacacccatatttgcggcacaaggctcaacgattacacaggcaatttcatcaccgcagttatcaaaaagctgttgcacggattcttcatcattatactttgcaaggagagttgtgtctgtgtagcctttcggcacacctgcgctgttcggaattgagtttgtcagaagtcccgaaccgccttttacaagcaagccgtcggaatggccgtggtaacagccctcgaattttacgattttatccctttttgtaaagcctcttgcggcacggattgcgctcataaccgcctctgtgcctgaatttacaagtctgagcatttcaattgatggcatatttttgcggataagctcggcaagttcaatttctccgctgtggcacgcaccgaatgtaagtccgttctgacaggcagaagtcacggccttgataacatcaggctgtttgtgaccgaggatattcggtccccatgagcagatatagtcaatgaactcgtttccgtcaacatcataaatttttggaccctctgcacggtcgataaaaagcggagttcttccgaccgaacggcacgcacggacaggactgttcacaccgccgggcataaagtcaagcgcctgtgcgtatagcttttcgctttgagttgtattcataaaagcacttccctatttgtaaaattcgtcaatccattttgcaacatcaagtgcgtggtatgtgattatgatatccgcacccgccctcttgattgcaatcatattttcgaacacaattttcttttcgtcaatccagcctttttcggcagccgccttgaccattgcatattcaccgcttacattataggcaacaagcggaaggtcaaagcgttcgcttgcggcttttacgatatcgagatatgcaagtgcaggcttgaccataaccatatccgcaccctcgtcaatatcgtctgcaatttcacgcagagcctctttgccgtttgcgtaatccatctgatagctttttctgtcgccaaattcgggggcagattctgcggcgtcacggaacggtgaatagtagcctgaggcaaattttgcactgtatgacataatcggagtgttgataagtccgttttcgtcaagtgcgtttctgattgcagacactctgccgtccatcatatccgaaggagcgatgatatccgcacctgcttttgcaaggctgacagccattttagagaggagcggaagtgtttcgtcattgagaatttcgtgaccgcaaacaacaccgcaatgaccgtgacttgtgtattcacaaagacagacatcggcaataataaggagtgacggataatttttctttatgtatctgattgcgttctgagttacaccattatcgtcataggctgatgttgcaagctcgtctttatgctttggaattccgaaaataagaagtcctgcaataccgctgttttcaatttctttaagaatctcgtctgctctgtcaagcgaatactggtagacattcggcattgaatcaacaggctttttaatattttcaccctctgcaatgaaaatcgggtaaatcaaatcgcccttgtcaattcttgtttcacgaacaagactgcgaatctgttcgcctgctcttaatcttctgaatcttctcatatatttatccttctttcaaagttacttccttgattatagtttccaaaattccgtctgtgtccttcgtttttgcaatcttgaacgaatttacgccgtgactttcaagtgcctcggcggtaatttcacctatgcatacaacggaagttctgtcggaaatagttgctccgccgtcaaaaaatgtgttcacacccgacgcactcgcaaaagtaataaaatcggtatcaacaacggaattatcctgctttttctcaagctgaatgtcataggttttcacatcgtcaaagtcaatgttgttatcagccaaaatccgagtgagttcgggcgaaccgttttcggcacgcagaatcaatactttttcgccgcttttcaccgtttttgcaagcaaaattccaagttcacgggttgtgtagacattcggaatacagtcggcaaaaattccgtacttttcaagtacagccgctgttcccgaaccaatcaccgcaaacttaatattagcgaaactgcggatatcctttttcagcttacgcagtcggctcataaaaatttctgcaccgttcatacttgtaagcaccacataatcgtagccgtcaatgccgtttattgcattgtcaaaaacttcgttgtcatgatattcaatcacctttaaaaggtcatgccttttgacctccgcacccgaaagcgtgagtattttgccgagcttgtcggaaagctttctcgtacccgtaacggtaacggaaacatttttcaaaggtcttgtaattgtgggggcaaagtcaaaatttgcagtttcgccaaccactataacggcaggcggaacaacctctgcggatttaacattttcgcagattgtcgagagagttcccctcacggtctgattttttgcacaagcgccgtttgacacaactgcaacgggagtatcctccgatttaccgttacgaatgagattttccacaatatctgggagatttctcaagcccataagaaagacaagcgttccgtcggtttcggcacatttctttatattttcgggcagggtgtcctgtgccgtatgtcccgtgattatatgaacacttcggctgagatttctgtgtgtaacagggattcccgcaagttcgggaacggcaatcgaggaagaaattccgggtacaatgtcaaacggaatatcggcacttttgagggtttcaatctcctctccgcctctgccgaacacgaacggatcgccgcctttaagacggacaaccgttttgccctctctcgccttttcaacaaggatttcgttaatattctcctgcttttcgctgtgtctgcccgaacgctttccaacgcagattttttcagccgtttcgggtgcaaaaccgagcaatgacacatctataaggctgtcgtaaacaagcacatcgcaatgtctgatatactctgcaccacgcattgttatcaggtcaaaatcgccgcatcccgcaccgacaatatacactcttccgttactcaatttcgctcaccagcctttttgcaagtttgattctgtttgaaatttcatctgttccgctgactgtttttttacagtcggcagacagagaaagcgttatcctgtcgttttcaacctttgaaattgcaccgacgggagttgaacaatcggcattgaggctgtgcagaacctgtctttcggtttcaaacgaaagcattgtatttttgtcgctgatttcagcgagcattttggaaacctcgctgttttttctgctttcaatcgcaactattccctgacacggtgcagggagaaattcatcggcatcaaacggagttaccgtgtaatcctcaccgttgcaaaggtcaagtctttcaagtcctgcctttgcaagcacaagagcatcgtactcaccgttcaacagctttttaagtcgggtgtcaacattgccccttatatccttgaattttgcattaggatagattttctccgcaaaaagctttcgccttaaactgcctgttccgattataaagccgtccttaatttcaaaattgttgcgtgtaacaaaaacatcgccatagctgccccttggcaacacggcggaaatctcaagtccgtctgcaatttttgtcggcaagtcctttgcgctgtgaacggcaacatctgtttctccgctcaaaagtgacatttcaagctccttgatgaacacaccttttccgcccaaagctgtaagcggtttgtcaagggttttgtcgcctgttgtcgaaatgtaaaccgtttcaattttaacattcggaaaacggtttttcagcgtttttattaacatttcggtttgtgcaagggcaagcctgctttttcgtgttccgatttttatcgtcattgttcgtattcctcaatcaaattttcaacagttttttcatcgggttcaagtcccgaaaggcaaagcgaaagaagctgttcaaaaatctttcttctgtcatcttccctttcaactttctccttaattatcgggcgatatttccacaaaacctcggttgtgttttcgttcatactttcaagaattcccacaaaaagctctttaagatattttgcgtaaatcggacttttgcccgatgttgtaattcctgccgttatgccgtttttgcttgcaattgcaggaaaaataaatccgcatttttccttatcgtcaactgtgttgacaagaatatttttctcattgcaaagctgaaaaattctgccgttgagcgtttcatcatcggttgcgctgataacgcaaaatgcaccttcaaggtcgctgtcacaaaatctgcggtcaatgattttcacattcaaagccttgatttcatcgcagattttcggggcaacaacggttatgtcgggcgaaaacggcgtcagcttttcaatctttctgagtgcaaccgtaccgccgccgactacgagtatttttttgttttcaatgtcaatataaaacgggaagtatgccattagttattctctccgcactttctgtagatttcaagaattcttgcaaattcttctgccgaaacgtcggatttcagcttataaatgaatttttccgaaaaatctgacggcattgcgtttttcacagactgcataaacggcagaaattcgtgaaaggcaaggtcttttttgagaacttcaatttcctcaaaaattatttcttttgcactttcaacgctgtcgagtttgagagcattgttctcgtttgcaagctgttttatgcagtcaatgttaatgagccttactccgcttattttggggatattttcgtcaatgtcgggcggtacggcaaggtcaataaacagccttgatttttcggtttttatattgttttttaaatcataatatgtaaccgtgtaatgcggtccgcttgtggcactgattacgcagtctgcaaaatcaaacgctttgtatctttcgtcataatcaatcacattcgcacccgtattttcaaaaacagtttctgctttatgttttcgtgaagtcacggtaacgcttatacctttgtgcgacaagagatttttcacaacagttgagccgaccttgcctgttgcaccgattacaaggacattcagctcaccgtctttgaattttgccgcctcgtttgatgcaagagttgcaacggaaaccgatgtttttgaaatggcggtttcggtcttgattttttttgcacaggcaacagccgcctgaacgcacatattaagctcatatgcaaccgtgccgttgtcctttgcaaaggcgtaggctcgctttagctgaccgagtatttcatcttcaccgataaccattgattcaattccgcccgccaccctgaaaagatggagcaatgccctgtcaccgtagaaaagacagatgtacttttttagttcgtcaaaatcaattcccgaaaaatccgaaagaacggtttcaaccgttttcacagatgattcgtcaccgcaaaaataaacctcggttctgttgcaggtgcagagaatcaaacactcgctgatattttcagaataataaagttcgtcaagaaatgtctttttttgctcatcgggaaaggcaagcttctttctcacaaccacatttgaagttttgtgacttacgctcaggcagtacataaaaatttcgctccgttacaaataaaatccgacagtaaaatacacttttaaagttattttattactgccgacagctattgtcaattaaagttagtcagttattttaccactaaacctatctgtttggtatgttttaattatactacattcaccattctatgtcaataaatttcgggttttgcttgacaaaaacagtgattacaatataaactatacaaagatacctcccgtcagcaaacaacgggagttttattccaatgtaaatacttattgtaccgataggaatactaaatgatttgaatatgtattaaggagcgtttttatgcttaatcagttttcaagaacacagcttttgattggcaaagaagctatggacaggctttcaaaaacaagagttgcaattttcggaatcggcggtgtaggcggatacacggcggaggctcttgcaaggagcggagtcggcgagcttgaccttattgacgatgacaaggtgtgccttacaaacatcaatcgccagatttttgcaacaagaaaaacagtaggcaaatacaaggttgatgttgcagaggaaaggctcaaggacatcaatcccgacataatcatcaacaaacaccaaaccttttacactcccgaaacctcggaaaaattcgacttttcaaaatacgactatgtagttgacgcaattgacacggtaacaggcaaaattgagcttgttatgcaagccgacaaagccaagacgcctatcatctgttcaatgggagcaggcaacaagcttgatcctacagcgtttgaggttgccgacatttacaaaacctcggtctgtcctcttgcaagggttatgagacacgaactcaaaaagagaggtatcaaaaagctgaaggttgtttattcaaaagaaaagcctatcacacccgttgacgatatggcaataagctgtaaaacaaattgcatatgccctcccgaaactgaaagaaaatgcacccaacgcagacaggttcccggcagtaccgcatttgtcccgtcggttgcaggtcttatcatagccggcgaagttatcaaggatttgattaagtaaatataatttttaacaaagcaaagcaccgagagaaattaccctcggtgctttgcttgtttttataggattttttacagttgatatcgtgattaaacagattagatgataaccgattcttcctgaagtgatttgttacggagaatctgaacctcatcgcctttggtaatgaaaagccgataaagaaatacattgaccttttctccgacggtaatcggagtttcgtcaagtcctctgtacgcataaaccgtgcctccgtcacattttacggcaatttcgatattgtcgcctctgaacgaagtctttataacctcaccgacggatacagacgctttttgtgcggttgtttcgctgagctttgtcacctttacaaattcgggacggataactgcacggtcaacattatcgacaacatcaaaggtcttgaactttgtataatcgtcaagcgtagtagtctgaccgaaaaatgatgcggaaaatgcggtttgaggatgctgataaatgtcaatcggcgagcctatctgctcaattctgcccttgtttgtaattataatttcatcggcaacttcaatagcctcgctctgatcgtgagttacaaatatacttgtaacgccgagtctttcaatcatatctttaagccatgagcgaagctcctgcctaacctttgcgtcaattgcggcaaagggttcgtcaagcagaagaagattcgggtttggcgcaagcgctcttgcaaaggcaacacgctgtttttgaccgcccgaaagctggcttggataacgcttttcaagtccttcaagaccgataagctttacaagctcgtttactctttccttgataaatttcttgctctttttctgaattttcagaccgaaagcaatgttatcaaaaactgtcatatatctgaaaagagcgtagttttggaatacaaagcctatgcctcttttgcttgcgggaatatcgttgacaacctttccgtcaattacaatttcgccgctgtcgggattttcaagtcctgcaatcatacgaagaattgttgttttgccgctgcccgaaggaccgagaagtccgataagcctgcccttttcaataccaaagtttacattgtcggatgccttgtagtcaccgaaagttttatttatatttttaagctcaacatacat

SEQ ID NO: 242 - DNA, 39900 bp, unidentified
  source 1..39900: mol_type = unassigned DNA
  misc_difference 15567: note = a, c, g, or t
  misc_difference 15568: note = a, c, g, or t
  misc_difference 15569: note = a, c, g, or t
  misc_difference 15570: note = a, c, g, or t
  misc_difference 15571: note = a, c, g, or t
  misc_difference 15572: note = a, c, g, or t
  misc_difference 15573: note = a, c, g, or t
  misc_difference 15574: note = a, c, g, or t
  misc_difference 15575: note = a, c, g, or t
  misc_difference 15576: note = a, c, g, or t
acagttgccatttcctcctctttattctttaaaagaatactcgcttgttcgtcaacgcctgtttctgcatatttaacctgcgacaacacatcgtttgggcatgagctcataaacatacgaacaaacgaaagcgcatacacaccgatgtcaagcattgcaccgcctgcaagattgcggttgaaaaatcggttgttcatattgtactctttgtaactgccgaaattcatctgaataagcctaagctcgcaaaggtcacctgaatttaccttttcaagaagtgccttgtaaatcggcatatggaaaattgtcattgcctctgcaagcacaacatggtttttttctgcaagagagattgcctcgtcaagttcatctgaattaagcgttatcgacttttcgcacaaaacatgctttcctgccgcaagagccttgcgaagatattttatatgcgtgttgtgcggtgtggaaatgtaaattatgtcaacattttcgtctttaaacagctcatcaatatcgttgtaaaccttttcaatgccgtacttttcggcaaacgcaaccgccttttcatgggtacggtttgcaacggaataaagtgtctgtcctctgcttttgagtgcggctgcaagctcatttgcgataactccgcaaccgagtgttgcccagttgtagtttttcataaaaacacctccgtatatttttcgagaaaagtttaacacacggaaatgcgtctgtcaacggtattagatggcttttctcgtatctgctccgtactttttcataatcttgcgaagttcgttattttcgctttttgaaaggctaaaatacataaatccgtgcttaacagtttcatcaccgtcacacgcaggcatatatgtattacagcctattcttattgatgccttttcggaaaaaccgcaagacggtgaatcaaaatatgcggatttgccctcaaacattttcttcacggtttcggcatcttcggcagacatcttagcgtcaaccttgtcgcagtactcaacatcaaaatacacggtaggctcacacgcatagaaactgattttcggcacggcaaatactgcggcggcaacgcataaaataactgcaaccacaattactgcaatctttttcttcataacattcactccttttcgcttatccctataaacatatattatattgagcttgtatcataattgtatcattataatttaatcggcatatacaccaattttaaaatcatttatttgtaggttaaaaaatttttcgtcaatgcttacaagagagcaattttacttttgttgaagaggcacaaattgcatacaaattcaaagccttgcttattgagaaaaatcggtctgaaaatatgcagaaaagcagtttttaccatattataaaggcataaaaagaagaattttgacgaggtagttattgtaactaaaattgtgagcaaagtaaactttatgtttataaggtattttgcttgtttatttcaggcaaaaggattacaataattgtggaaaatggaaaagaatggtattgtttacaaagattatgtgattgaagaggttagaaattaatggggaaagtcaaaaaaatgccctcacttgcgtttgcaagtctgtttaaaagaaacaaaggtcagaataccgtaaaagaaaagcgacggcgctcacaccagataaatatgctggaaggtccgctcgtaaaaaaaattcttcttttcacacttccgcttgcaggatccagtattcttcaacagcttttcaactcaaccgatgttgcggtggtcggcagattttcaagcagtcaggcacttgccgcagtcggaagcaacgctccgctcatcaatatgcttgtgctgttattcacgggactttcggtcggcgcaaatgttttgattgcacgatatataggtcaaaatgaccgtaaaaaggtttcggaagctgttcacacggtaataacactttcacttatatgcggatttcttcttctgatactcggtcaggttattgcagcaccgctgttaaggctgatgaacacaccggatgatgtaattgaccttgcggcaacatacctgagaatttactttatgggcatgccgtttgtaatgctctacaactttggttcggcaattttgagaagtgtcggcgacacaagccgtccgctctactgtcttgtaatttcaggtattgtaaatgttcttttgaacctcttttttgtaatcgtctgcgatatgagcgttgcaggagtcggcattgcaacagtaattgccgacggcataagcgccggacttattatgatgttcctcatcagaaacgaagacgagtcaatcagagtcaatccaaaaaaactttcattcaagaaagaacatctcattatgattttgaaaatcggtgctcctgcaggtattcagggtatggttttctcaatttcaaatgtattcattcagacagccataaacggcttcggttcacaggcggttgcaggctcatcagctgaactcaactttgaatacattacatactatatagtatgtgcgttcagccagacagccgttacattcacaagtcagaactacggcgcacttcagtttgacagatgcaaaaaggtgtttaggctttgtatgcttttcagctgtattttcacaggctgtgtgagcgttatattcatgcttggaagcggatttttcatcaccttcttcacaaccgacccaaccgttattaagtacgcaatcatcagaatggcgattgttatgctccttgagcttatgacaggttcatacgaaatcagcggcggtgcgctcagaggaatcggacattcactcctccctgcaattctcacaatcttcggttctgttgtgttcagaatcatctggctcttcacggtattcaaggcattccacacctatgatatgcttcttatggtttaccccgtttcatggcttatcacaggcacatccgttttgattgcctacttcatcatcagaaaaagagaattcaaaaaggtaagcgccgcttttgaaatttaaaatcaaatagatttttatggctgacatcggcattggtgtcagctgtttttgtttagaagaggctctaaaattaaaaaaaataacaaaaaacaattatttcgtactttttgtgcggaataattgtttttttgctgtgttttatgttataatccaattataaacacacggaggtgcaacaatgactaaacggactgttgccaacaattttttatactacattttttgcggattcagcggtgcggttacttcgctgatagtgtggctgtttctaaaacttatgggtttgggaatcggtcttgtgtgggatacaattccgtcaaattttgatttcaaattttatccgattatcgtctgtacggcaggcggaattattctcggaatatggcaaaagctgacaaatgccgttcccgatgaacttgacgaggttatgaaaaaggtaaaaaaagataaattttacccgtataacaaggtgcttttgctctgcatttcggcacttttgccccttgttttcggcggaagtcttggccccgaggcaggtttgacaggcgttatcgtcggactttgctactgggcaggaagtcatatgaaagacgctaaaagtaaaattcccgaactaatgcaaatcggcataagcgcaaccctgagtgcggtattctacgcaccgcttttcggtcttgcatcggtcaatgaagaaaggcttgacagcgaagaaaagcctaccgatatccgttcaacaaagcttatttcaaacatcattgccgtactttttgcggcgggaactctgtttttgcttaactcgattttcggcggaagtatgggacttccacgacttggcggttataacattacaaattttgagcgtttgtggggaattcctctcgcacttttgggcgctgtatgcggttttctgtttatcatatcttcaaaaattttcggaaaatttttcgcactcattcagggcaagctcggcattattatcagcacaactctcggcggaattatcctcggtgttatgggtacatacctccccctcacaatgttttcgggcgaagaaagcattaccgttgtcaaggaaagctttgccgaatttgcaccgtggattctcattatcagcggtgtgctgaaacttattctcacaaacatctgcataaagtcgggttggaaaggcggtcacttcttccccgtcatcttctgcggagtgagcatcggctacggtgttgcaatgctcggcggacttgacacggcattttgtgcggcagtcgtaacggcaggacttctcggtgtcacaatgaaaaaaccgcttgccgtaacaatgctccttttgctctgctttgacgcaagagttattccgtggattttgctcgccgcattcctcggaagcattattccgactaaaattttcggcagtaataaaaagaaagctaagtgagcatataaaaaactgctttgcgaaccaccgtttcctttggaacgcgttgaagaaatgaccgctcttatgggtggcgacggttcaattaaataaaaccaagaaatccgtgttgtaaccatgcaacacggatttttatataaagaacaacctccccgtaagctgaaatgctttgcagggaggttgtattattcttatatagaattttattttacttgcggataattattgctttgccgttgcaatgaacctttccgtttgaaaccgcaactgtttcaccgctgatttcgtttttatagtcgccgtcggggaggtcaacttttacatcagccgactttgatttaaggctgaaaatgccgacttttttgctcttgttgttgtcacgctcaagaattgcaatatcgttttcatcgtctgcatcagccctgaaataatcgtcatcatcaagaacggttttcttgattgtatcaagctttgcaagaaggttacttaaatcaatgcctgtgttgcgtgggaaaacatccttgtcaaaaaggcttggagtttcatcacaaccaaactcctggcctgcatagatgagggttgaacccttcaagaaatacagaaaagctgtataattttcaaggtcgctcctgttctttacataatggcagattcggggctgatcgtggttttcaaggcaacgcattttatcgtaattctgcggataaattgcctcctgataattgaacatatccatataatttgaaagtgaggtttcgcccttcaaatatttgtcgaaaacctcacggatatcgtagtcatattccatatcaaaagcgtcaaaaagctcatagtcgcttgcggtataaattccgctcttgcgagagaacacattgaaagagctgtgtacgctttcggcaagccaaatgcagtcgggatttacctttgaaacagcctctctcgcctgtttccaaaattcaacgggaacgaatgatgcaacatcacaacggaagccgtcaacaattctcgcccacataacgagtgaatcaatctgataccgccataattctttgttagaataatcaaggtcgattatgtcgctccaatcgccgactttgttgccaaaattgccgtccggctttctgtagaaaaattcgggatgttcaaccgaaagatttgaatcgggcgaagtgtggttatagacaacatcaatgatgcacttcatgccctttgcgtgaattttttcaacaaggctcttgaaatcgtccattgtgccatattcgggatttgttgtgcgatagtccttgtttgcataaggacaaccgagagagccttttttattcttgacgccaatcggatgaatcggcataaaccaaatgatgtcagtaccgagtgactttattctgtcaagatcctctgcaacggcattaaatgtgccgtcatttgtgtggttgcggacataaaccgaataaataaccttgtttctcaagctgatttcagtattttttgccatttaaaacatctccttatgtatttttccacggtctgtttttaccgttccaacctcgttctgcccagtaatttttatcggcttcattccagccgcttttctgaatcattctcataataaagaaaaagccttttgtttttaaccctgccttaactttgccgttatttttctttaccttattggcaattgaggtagtctttttgtcaattttctttttgagttcatcggtgacgcctgaataatttgttgcacgaacattgacaccgtaacgataagtttttggaacgccccaaaagaacatactgtcggcgatatccttgttggcagattttgtacccgaacctgcggctgtcgaaattacaaccgcctgctttgtgaacattttctgttcgggacggtgaaccatccaacgataaccgtaatgatcaagaaatgctttcattgagcctgtgcaatgataaacatacacgggcgttgtgaagatgagtacatcagcctcgtccatagcctcggtaatctttttcagtcgctcataatgcggacaaagtgtttcggattttagaaaacactgcgtacaacctacgcaaaaatcgccgaaatctctcggaagaaaaaactccgtaacctcgccgcctaatttatcggcaacctgcttgccaatatgataggttgagcctttatggttctgaccgtttattactgcaattttcattttatgtcaccaaattcatcaatttcaagtcaattttagcacaacaaagcaatattgtccatatgatttttatgccttttaagagcatttttatgcgaattttttactcttataaaagacaaaaagcacctgtcctctgacagatgcttttattgtcaatcatcataatgacctttgcactggtaaacaataataaagtcattatttacactataaacaagtcggtctttatcatttatgcggcgactccacaatccacttttatcgttttttagcggttcgggtttacctgctccgtcaaatggattacgctgaatttctttaagcaacgcattaatttttttaagagttttcttatcttgcgtttgccaatataaatactctgaccacgcatcatctgcaaatgaaatattactcaccgctcattttctccaattcttcaagtgatttcgttacaatatgaccactttcaacctgagattttgccttttcaatctgagtcatatttgattgcgaatagaacggatcaatcggtgcatcgactgcaaacggaatacttctttcacgaagtgccttttttgcgtaaatcataaaaaatgtggtcagattcatacccatttcagcacacatttcgtcaagttcttttttagtattgtcatcaaaacgaagacttactgttgtcatatcaatcaactcctttcactgcttatattatatgataaaagaattaattttgcaatagtttaaagcaaatttaattaaaactctttcatttgtcagtcattttgaagtagaaaacagctccccgaaaacggagagctgtgataagtacaaatagatttgtcaaacgaatcagaagtcgatttctgtatcgtagtagcaagccttgagaagtttttccatttcttcctgatttggctggcgtgggttagaacctgtgcaagcatcggcaattgcgttcttggcaacttcggggagcttttcgaggaattctttttcgtcgataatgctctcgtcagccttaacaccgcccggaccgtagttcttaatgccctgcggaatgttgagctgatcgttcattgaacggagttcagcgatgagtgcgtcaacaagttcttctgttgtttcgcccttgaggttgatgaacttagcaatcttagcataacgctcagctgcaacaggatcttttgagttatacttgataaccttaggaagatacatagcgtttgcacagccgtgaataatgtgaccgcctgtgaaagccgcacctgtcttgtgagccattgagtgaacgataccgagcagagcatttgagaatgccatacctgcaaggcactgtgcatcgtgcatcttgtcacggcaagccatgtcgccctcataagacttcttgaggttgtcgtgaatcatctcaattgcatggagtgcaagcggatctgtgtactcacagttgagagttgaaacataagcttcaattgcgtgagtcatagcgtccatacctgtgtgagcagtaagtttagccggcattgtttcggcaagtgcaggatcaacgatagcaacatcaggtgtgatattaaagtcagcaagcggatatttgataccctttgcatagtctgtgataactgagaaagccgtaacttctgttgcagtacccgatgttgacgggatagcgcagaatttagcctttgtacgaagtgtcgggaaactgaacggagtgatgatttcctcaaaggttgtgtctggatactcatagaatacccacatagcctttgcggcatcaatcggagaaccgccgcccattgcaacaatccaatcgggttcaaattcacgcataacagcggcgcccttcataactgtttcaacagatgggtcaggctctacgccctcgataagcttaacctccatacctgcttctttaagataatcaacagccttgtcaagaaaaccgaaacgcttcattgaaccgccgccgacaactacaacagcctttttgccggataaatttttaagacttgagagagcatccttaccatgatagagatctctcggtaaagtaaatctgtacattttaattacctcctgaaaggatattttgtcaacttctccttgactaccgtaattataacaccgaagatttataaagtaaataccttttttgaaaataatgtgtgtttattttgtgaaattttcactatagttctttattggaatttatattgagaaatatgctcagttacagcccgtaaatgttgtcatctcccttggcatatttcttaacagcctccataaaaagctttgcagcaggatttgaaatattctttccccatgccataacataggctatgcttgtgtccgcatcatcaataaggtatgaatcggtgtattcgtcagaagtatatgcagcgaccgaggttggtatgacagacacgccgattcccgatgacgatgacacatatatggaaacaagatcgtcaaatgaattactgattttaggagttatatggaatgtgcggaacaagtccataatttccatatacacaatcggtgcaaccgattccgaaagtaccagaatactttcatcagccaattcggaaagcttaacgctttttcttccgctgaattttgaatttttcgctgttacaacggacaaagtttcattatgtgtaatgattgattcaatacctgagctttcgggaaccatatctctcggcataaagcagaagtcgtattcaccgcctgtgattgcaagcgtgcggtcagcctcgtcaagctgtcgcacatcaattgtgattcccggatatttttccgcaaagtcggcaatacattttgtcgggaacgaaagcgaggtaacatcacagccgagcgtaattttaccctgacctccgtcatgcatctgcttgataacggtttttgctttctttaaagtttcaacaatttcaatcgcatagggcaaaagtgccttgccctcgcttgttatgataacatcacggtgagagcgtgtaaaaagctgaaccccaaactccttttcaaggtcgcttacatatctgctgacggttgactgagaaacatagttccgccttgccgcctctgaaaagttgagcgtctgagccacagttataaagcaattgagctgatttatatccataataacctccgttttgacaatttcccgcagtattttgtcggtttttttcaatattatgcaaaactgtaaatttaagactgccaaatcgtcatttttgcataatcaacggtattgaataatttttccatatttggtacaattcaagtatagcataataatatgcaaaatgtaaataacttattttaaaacaaggagcttaacgaatgaagaaaatagttgtaaccggtatgggtgcggtaacacctgtcggcatcggtgttgaaaactactggaataatatcacggcaggtgcatcgggcattgacacaattaagacttttgatccgtctgaactcgctgttcagattgccggcgaagtaaagaactttaatccgtccgactatcttccaaaggatttaatcagaaaaacagatccgtttatgcaatacgcttatattgcggctgaggaagccatgaaacagagcggaatcaagattgaacccgaaagaacgggtattgttatgggtactgcaatggcaggtattgcaacaatcgcatatactcaggaggcactcacaggcgcatcacacaaaaaggtaggtcctcgttttattcccaaaattctcggaaacattgccgccgcaaatatcgcaatcgactacaatattcagggaccgagctttacggtaagcacagcttgttcgtcaggcggtgacgcaatcaacacagcttgtatgtgtatgcagagcggcaaggctgatattatgctcgcagtaggagcagagtccgttctctgtcctcttgtaatttattcgcttgccaacgcaaaagctctttcaagaagaaacgattcgccaagcactgcaagccgtccgtttgatgttacccgtgacggttttgtaataggtgaaggcggcggtgcgctcgttcttgaaacagaggaacacgctcttgcaagaggtgcaaagatttatgcagaaatcagaggttgcggcaacacggatgacgcttaccatgtaactgctccgcatcccgaaggacgaggtgcaatcgcttgtatgaaacaggcaattgcagaggcaggaatcaatccttccgacatcggctacatcaatgcccacggtactgcaacaaacaagggtgacacagttgaaacatcttcaatcaagaaggttttcggcagcactctcccctatgtaagctcaacaaagggcgcaacaggtcatatgatgggcgcaggcggtattacagaaacaattacctgtgtcaaggctattgaaacaggcacagttccgcctacaatcaatctcaacgaggttgaccccgaatgtgccggcattgactttgttgcaaataccgcaaagaaagccgaaatcaactttgccatgtcaaacgcattcggattcggcggtcagaactcaagtattatcgtaggtaaatacggcaaataatctgccgacaaaacaacatacaagcaacacacatatgtgtgtataaaataatgtacatccatacataataggacaggaggatattatgaatttaacatatgattcacagatgttcagagaaacatttgaaagtgaatttacatggcttaacggctttatgagaaatgtaagacgcttttcggataaacctgctgcaattgatcctcagagcggcagaacatggagctacaaagaacttaatgccgatgcaaacagatttgcaaacgctatgaaaaaagacggcgtcaagaaaaacgacatcgtgtttatgcagctttacaactcaccgcagtttttgttcggttacattgcgccgcagaaactcggtgcaatctcaaatcccgctaactttaacctatcaccgggcgaaaccgcagaaattatgggacacaacaagcctgttgtttatgtttatgatacagacattatgcaaacagccgtacaggctcttgaaatctgcgagcataagccaaaattgattctctgcgttaataattccaaaaaggaagtaactcttcccgaaggacacattttctttgacgattacatcaaggacagcagttacgaaaatccgcctgttgactatgcaccgcatatttatgacgaggttttaagacttcagacctcgggtacaacaggcactccaaagggcgttccgcttaacgcaatcaacgaagttctttcggctcacgatgtaattatgcactttccgctctcacccgttgacattacgatgaatatgacaccgtggtttcaccgtggcggtattcattcgggcggtcctacacctaccctttatgcaggtgcgtgtcttgtgattatgagaacattcaacccgagaagctgcatggactttatcgaaaaatacggcattacattcatcacaggtgttccgtcaactcttgagatgcttgcaaaccgtcaggaaaaacatcagaaaaacctttcttcgctcaagggcattattaccatgggcagtccgcttgaaaaagccgcttgcattcgctatcaggaacttctctcccccaacatttttaacggctacggcacaacggaatctttctggaatacatttcttcgtccgtatgaccttcctgaaatggcaggttcggcaggcagatcatgcacagatgatgaggtaagacttgtaaatgtttatgacgacagaaaagcagagcccgatgacacagtcccctgcgataacaaaacagagggagaaatcatcatcaaatgtccgaacaaaactacctactgctatgtaaataacgaaaaggctacaaaagacaagttctacaagggttggatgtacacaggcgacatcggcacttggaacagcgagcagtttgttacaattgcaggcagaaaagatgatatgattatcagcaagggcgaaaatatttatcctgcaagaattgaggaaattctcaactcacacccgaaggttcaggaatgtatcgtaacaggtgttcccgattcaacaagaggcgagtgcgttgcggcatatgtaatcaaggccgacgaaagtcttacggttgcagagcttatcaatttctgcgacggctcaccgaatatttcaaaatatcaggctccgagatattaccgctttgtcaatgaacttccgcagactgcaacaggcaagaaacagcattttgtaataaaaaaacaggcagcagaggaccttaaaaacggtttgttgcttaaaaaataattacggattttccgtatatatgtaatggagaaaatatgaccgagaaattatacaaagcaaaggtttcatactatgaaacagactgtatgaacattgttcatcactcaaattatatcagatattttgaagatgcaagaattcagtatatgcacgacatcggttgtgatgttgccgaaatgcagtcaaaaggattgtatatcccaaatgttgacgcatatgcccgttacaaaaagccgcttaaattcggcgatgagttttccgttgaagtaagccttgtattttttacgggttcaagaatgatttttgactataaaatcttcaacaataaaaacggagaactttctgcaacaggcagaacaacacactgttttgcaactcccgagctaaaaccgataagcataaagcattcaaatcccgattattacaatcgacttcgtgacaacattgtcgatacggaagatattacaataagaagataaacaattttacaagcaaaaagtgcgtaccaaattttggtacgcacttttttgatataggaaaatatcagtcatcaaagttgggagtctgaattgcatcgtagcctgtttctcccgtacggattttaaccgcctgtttaagatagtaggtaaatattttaccgtcacccgggttgcccgtaaaggctgtttttctgattgcctcaattgtttttctctcccattcttcggaagaaacaacaatttcaaacttgattttcggcaagacctgaacatcaaccttctgtcctcttacatactccgacatacctcgctgaattccgcagcctacaacctgatacgctgtaattccgtttacgccgatatccgtgagagcctttttgacatctacaaacatttcttcacgaacaacggcctctatttttataagctgaatatcgttattgttttccatactttaaaacctccgttagttgtcaagaccgttaaatgacggataagcagattcaccgtgctgtgaaacatcaagtcccataagctcatctctgaggtcaaccctgattttgcctgtaagaagtcttgtgatgccgtagcagatgagtgttccgacaaccgcaattataattgtgatgccgatacctgccgcctgagcaccaaactgtgcaaactcaccgtacacaagaccgttacctgcactgctgttgattgccgtgcatgagaacacacctgtgagaagtccgccccagataccgcctgtaccgtgacagctgaatgcgtcaagcgcatcgtcaaagccgaattttttcttgccgtatgaaatcataatatagcaaacggggcttgttgtcaaaccgataataactgccgcccacatcggaacaaagccggcaccgggcgtgatacctacaagacctgcaaccatacccgtgcttgcgccgataagcgtaggctttttgttcttgataatatcacagagcatccacgagagcattgcggctgcggctgaaacacccgttgtcataaatgcgtgagccgcaagaccgtcggcggcaagtgcagaacccgcattaaagccgaaccaaccgaacataaggagcgacgcaccgagtacaacggtcgggatattgtgaatcctgtaaattgaatgttcataatcgtgacgcttgccgaggagtatgcagagtacaagtgccgaaacacccgaactgatatgtacaacatcgccgcctgcaaagtcgagagcaccgataccgtctgcacctaaaagtcctccctgtccccacaccatgtgagcgagcggataataaacgataagcgaccagaaaattgtgaaaacgaaaattgacttaaacttcattctgcctgctaccgcacccgtgataagagcaggggtgattacggcaaacatcatctggaacgcagagaataccatattcggaattgacgcatcatccgtgtaaccctccgtgagtgaaacaccctcaagaccgagccaacggaaatcaccgataaaagcatttcccgaaggagcaaacgaaagcgaataaccgaaaagcacccacataacaattccgacaccgataataaaaattgatgtcatcattgtatttacaacatttttctttcgtacaagaccgccgtagaacattgcaagacccggagtcattacaaatacgaaagccgcacaaagcagcacaaagcctatatttcctgaatccatttttaacctccacataaaccgtttttgccgaagcaaaaaaataaagctcacaatgtttttatccgattttgcaagtttttaaaaatttgttgcaaattcagaagaaaccaaagtgaacttccttgtcctttttatattcagttttccgaaaacttcgtaagacctttgccttactgtcttgaattataaagcctaattaaccgattgtcaatacttttttgaatattttttaaagttttttgctgttttttaaattacagtttacaataacaggtcaaaaatctaagctacggcacaaatttaatttttgcaagtttatttaattttcttgcaaattatttttttgattacagcatattctttgtagcgtttgtagcggcgaacttcgttcgccgannnnnnnnnnggtttggttacaaaaccaaaccgacttaatataaattatttgtttaagatagttatgatataaaaatacaattgcgatttattcatttcgtgtttgcacacgaaatgattggcgaacacagttcgccgctacattaaattgtgcaaacagctactatactacgttcgggcataatatgttttttatattgcaaaccatcttcccgaccgcaattttccattttcaattttcaatttttcatttaatgaacctatctacacgaatcaggtacggcggctcgccgtaccggcagataatatcgtccctacaaaataaaaactacggtcaacatagtcctgtcaaccgtagttaaaatcaagatattttattttgcaaaatcggacgctctgctttcacggataatattaaccttaatctgtccgggatattcaagctcttcttcgatttttttacagatatctcttgcaagcggaatcatacgctcatcattgacaatttcaggcttaaccataactctaacctcacggcctgcctgaattgcaaaggtacgctcaacaccgtcaaaagaagacgcaacctcttcaagcttctggagtcgcttaatgtagttttcaacattttctcttcttgcacccggtcttgcggctgaaatagcgtctgccgcctgtacaagacaggcaacaattgttctcgcctcaacatcaccgtggtgagcgtgaatagcgtgaataacagcgtcgctttccttatactttttggcaagatcgacaccaatctgaatatgtgttccctcaacctcatggtcaatggatttaccgatatcgtgcaaaagacccgcacgcttagcaattgtaggatcaagaccaagctcgctcgccatcatacctgcaatgtatgaaacctcaagagagtgatcaagtacattctgaccgtagcttgtacggtaacgaagtctgccgagaagcttgacaagctccggatgaatgttatgaacacctgcgtcaagcacggctctctcacctgtacgcttgatttcggattcaacctctcttcttgccttttcaaccatctcctcaattcttgcgggatggattctgccgtctgtaataagcttttcaagtgcaattcttgcaatttctcttcttacaggctcaaagcatgagagcgtgatagcctccggcgtatcatcaatgataagatcaacacccgtaagagtttcgatggctctgatgttacggccttccctaccgatgattctgcccttcatctcgtcattgggcagaggaacaaccgaaattgttgcctctgaaacctgctcagctgcaagtcgctgaattgcaagcgaaataatgtttcttgccttgtcgtctgcttcctctttgagctgttcggtgtattccataatcttaaccgacttctcgtgagcaagctcattttcaagctgtgaaagcaaatagcttttagcctgttctgccgtgtagcccgaaattttttcaagcatttcaaactggctctttttcagagtttcaacttcttcgagttttgcatctgcatcacgaagctttttgttgaccttttcttccttgcgttccatattgccaagctttttgtcaagagtttcttccttttgctggattcttctctcctgacgctgaacttccttgcgtcgatcggaaatttctttctcgctctcgtttctgaaacgatgaacctcgtctttaccctcaaggactacttcttttttccttgcttcggctgttttgattgcatcagccacaatcttctttgcctcctcctcagcacttccgatttctttctcggctgtgtttttgcggatggcaattccaaggaaaatacctgcacctgcgccgataacaactgcggcgacaatgcagataatacttatccacaatggcaatctggacacctccttagtttgatttttaatatttcacagttcccaatcaattagactttaaaggtgccgttaaaaagatattcaattttcatttttactttgtaaatatttttaatacattatatataccatacgcaaccgcaaaacaccgtacaggttgcacagagcgtttcaaaaggcgaaacgccataaaaattataaaaaatatctatatataacggctcttttaaagagtctgattaaaaaagtcgcaaaagtcaaaaactgtacttttgccaaaatccgcatcagcggactatacaattttataataaaataaccaaattgtcaagaataagcacgggaattttgcagataattattacggaaataaaaaagattacagctttttgacggttacagcttaaatttgccttaaaaaagcaaaatgtgaccgtgtttttaccgtatttgtaaaaagctcaaaaatttttcgttaaatttttgtcaagctattgaagaaatgaaaaaaatgtaatataatagaagcaccttagaattttaggaggaatttttttatgtcagtaaaagttgcaattaacggtttcggccgtatcggtcgtcttgctttcagacagatgttcggtgctgagggttacgaagtagtagctatcaacgatcttacagatcctgctatgctcgcaaaccttctcaagtacgatacagcacagggcggctactgcggtaagatcggtgaaaaccttcacacagttgaggccggcgaaggctcaatcatcgttgacggcaaagagatcacaatctacgctaagccaaacgctgctgagcttccttggggcgaactcggtgttgatgtagttctcgagtgcacaggtttctatacatcaaaggcaaagagccaggctcacattgatgccggcgctaagaaggttgttatttctgctcctgcaggcaacgacctcaagacaatcgtttacagcgtaaacgaaaagactcttacagctgacgatacaatcatttcggctgcttcatgtacaacaaactgcctcgctcctatggctgacacacttaacaagtatgcagaaatccagagcggtatcatgtcaacaatccacgcttacacaggcgatcagatgattcttgacggtcctcacagaaagggcgacaagagaagagcaagagcaggtgctgctaacatcgttcctaactcaacaggtgctgcaaaggctatcggtcttgtaattcctgagctcaacggtaagctcatcggttctgcacagcgtgttcctgttccgacaggttcaacaacaattcttacagctgttgttaagggttctgatgtaacagttgaaggtatcaacgctgctatgaaggctgctgcttctgagtcattcggttacaacgaagatccgatcgtttcttcagatgtaatcggtatgagattcggttcactcttcgattctacacagacaatggtatcaaagattgctgatgatctttatgaggttcaggttgtttcttggtacgacaacgagaactcatacacaagccagatggtaagaacaattaagtatttcgctgagcttggctaatctgaatttacagattattctttgggctgtcctttttggtcagccctttttgttttctttttcggaagatatttatccttatttttctttattcgtaaaattatgctttaaaatgtaacatttagtcgcagtttataaaatatacacgaaaaattagttttaaattttttgaatttgcttgaaattgacatataattttggtattatataagtgtgagcaaacaatcaacaatcaacagatattaaacaaggagcaattcttatgaattacagctttaacgaggcaagaccggctcttgaagtttttcacaccggcgattcagtgcgtgcgtatgattttttgggcgcacacctcgtgaaccgtaacgacaaaaacggagtagtgttccgtgtgtgggcgccaaccgcaaggagcgtttcggttgcaggcgattttaataattggaacaacgaggcaaactatatgtataacatcggttacggtgtgtgggaagtgtttgtcgagggtgtaaaagagttttgtacatacaaatactgcattgaaagcgaatacggcgacaggcttatgaaagcagatccgtatgcttttcatgctcaaacacgccccggtcaggcctctgttgtatatgatatagaaagctattcgtggaatgacagcgaatggtttaataaacgcaaagaaaacaacatttcatcgtcaccgatgaatatttatgaaatacatgcaggctcatggagaaaatatcctgacggcaacttttttaactatcaaaagcttgccgatgagcttatcccctacctaaaggagatgcactacacccatgttcagcttatgccgattatggagtatccctatgacggcagctggggttttcagacaaccggctactatgcccctacttcacgctatggcacaccgtctgattttatggcttttgttgacaagcttcacggtgaaggcattggtgtgattcttgactgggttccgtcaaattttccgacggacgatttcggacttgcaaggtttgacggttcacctctttatgaaagcaacgatccaaaaacaagcaagcgtgactcatggggaacctgccttttcaactacgcaagattcgaggttacaagttttcttgtttcatgcgcaatgttctggctcgacaaatatcatattgacggcttgagaatcggcgcactctcctctatgctctaccttgattacggtaaaaccgagggcgaatgggaaccgaacaaattcggcggaaaagaaaatcttgacgctgttgattttgtaaaaagactcaacacggctgttcatatgtaccaccccgatgttatgatgtttgccgaggaaaacacatcgtggccaaagcttactcataaaatagaggacggcggtcttggtttcgacttcaagtggaacatgggctggatgaacgatatgctgcactatatgtcactcaattcgatgtggcggccgttcaatcatgacagtcttactttcagcttttattatgctttttcagaaaaattccttctgccgatttcacacgacgaagtttctcacggcaaaggctcactcataaagcagatgcccggaaagtatgacgagcagtttgcaggcgtgagagcattcataacatatatgtacgctcatccgggcaagaaactcgtgttcatgggaactgaaatcggacagtttgacgagtggaatcacgaagaggcaattcaatgggatttgcttgaatttgaaaagcataaaaagctcagaacattttttaaggagctcaacaaattttatcttgactgcaagccgctctacgaacttgacacggtctggaaaggctttgactggattcaccatgacgattacacaaacagcgttattgcattcaagcgcaccgacaaaaacggtgatgaaattgtttcggtatgtaattttcagcccatcaggcgtgacgaatactgcatcggtgttcctaaatacggtctttatgacgaggttttcaactctgatgaagagcgtttcggcggaagcggtgttgtgaacggtaataatatcaaaaccgaggtaatgaaaattcacggttttgatcagggcctttcactcactctcccccctctcagcgtaatctatctgaggtgtgcaaaagaacttgaacccgatgaagttcagaaagaaaattgatattttcagtcacaagactgtaattaataagtttaataaagttaataaaataaatatcggaggtattttaagatgtttccaaaaaaggaagtagtggctatgctgcttgccggcggtcaaggctctcgtcttggcgtgcttaccaaaaagcttgcaaagcctgccgtaccgtttggcggcaaatatcgtattattgatttcccgttatctaactgtgtaaattcaggcattgacgctgtaggtattctcacacagtatcagcctcttgttcttaacgaatacataggaaacggacagccgtgggatcttgacagtatgcactcgggtgtaaactgtctcagcccttatcaggctgttgacggtgcagactggtattcgggaacagccaatgcaatttatcagaatatcaactacattgagcgttacaatcctgagtatgtggtcatcctttcgggcgaccatatctacaaaatggactacaacaagatgcttgaatatcataaggaaaagaatgccgcttgtacaattgcggtaattgatgtttcgcttgaagaagcctcaagattcggtattctcaacacaaatgaggacggctcaatctacgaatttgaagaaaagcctgctcatccaaaaagcactaacgcttcaatgggcatctatattttcagctggaaggaacttaaaaagtatcttacggaggatgaattcaaagagggttcaagccacgatttcggtaaggatgtcctccctgccatgcttgacgcaggtgagcgtatgtttgcatatccttttgaaggctattggaaggatgtgggaacaatcgacagcctttgggaggctaatatggatcttcttgatccaaaggttactttagacctcaaggatatctactcaagaaacccgatgatgcctccgcactatgtttcaaacgaggcgtcaatccaaaattcactcgttgccgacggatgcaatgtttacggcaaccttgagttctcaattctctttgcaggtgttacaatcggtaaaaatgctacgattaattcttcaatcatcatgcccggtgcggtaattgaggacggtgccgaggttcagtttgctatcattgccgaaaacaccgttgtaggcaaaaatgcaaaagtcggacaaaaccccgaagaaacggaaaatattgacgactggggaattactgttgtcggtgcaaataccgttatcaaagaaaacaccgttatcaaagcaaaaaccatgatagacagcgacacggaggtggacggcaatgagaagtaataatgtactcggtttcatctttgcggcaacacttgacgacaaaatccccgagcttgcatcttcaagaacaactgcaagcgttccgatcggcggaaaatacagaattatcgactttgacctttcaaatatgtcaaactcaggtatcagcaatgtaggcatagttgcaaaaagcaactttcagtcacttatggatcatgtgggttcgggcagtgcatatgacctttcaaagagaaggagcaatctttcaattctcccaccatatgacggcaaggctttttcaagctttgttgaaacaatctacaatatgcacggctacattgagcattgccgtgaggagtatgtgcttatttcacagggcaatgtaattactaacattgattacacagatgtttttgacttccactcaaagaagaaggcagacattacacttatatataagaatcatgcaattccgcagggctatgacagaccgattacccttgatgtagataatgacggcaaggtaaatcagatttttgtaaagcccggtgttgttgacaaagaggtattcaaccacgcatacggctctattctcatcaagaaagacattcttatgagtgaaatccgaaacgccatcagcgttaatcagcttgatgtaaagcgacttcttcagagcagtctgggcaaatacagtatttatgcttatgaaaataagggttactgtgcggcaatcagctcaatcaacgattactttgagttcaatatggatcttatgaaaaaagaagtgagggatgagcttttcaatccgcaaagacctatctatacaaaggtaagagatgacgctccgtcacgctacggacttacaagcaatgtgaaaaattcaatcattgcacagggttgtgttatcaacggtgaggttgagaactgcgttatttcaaagggtgtttatgtcggcgaaggcgcaaagctttctaactgtattgtaatgcaggacacaaaaataggttgcaataccaacctcaactatgttatcatagataaggatgttaccatcaaggatggtcgatcacttatgggatatgattcgtaccccatttatattgctaaaaaatctgttgtataaagttgtttaaacaggaggtaatcttacaatgagaattttatactgtgcttcagaggctaatcctttctgcggcagcggcggacttgctgatgtagcaggaagtcttccgcacacactttgcagaaaaggtcaggattgcagaattgttgttccgctttacggcacaattccgcaggaacttaaaaactccatgaacttcatcacaaactttaccgtgccggttgcatggcgtcatcagtattgcggtttgttctgggcaagatggaatgactgtacatactattttattgataacgaatattatttcaagagaggcactctctacggtcattatgacgacgctgaaagattcgctttcttctcccgtgcaattcttgaaatgcttccttacattgatttccatcccgacatcattcattgtaatgactggcagacggctcttgttcctgtttactactatctgttctattcacacagaccatggtactataacattaagagtctgttcacgattcacaacatccagtatcagggtgaatacggctgggaagttaacacagagtgcgtcggcattcctgcatccgaaacaaagattcttgaaatgaacggcaaactcaatatgatgaagggtgctatcgaaacagctacccgtgtttcaactgtttctccaagctatgcggctgaaattaaagacccgtggttcagttggggacttcatgacgaactcaatcttcgtcattacaagctttgcggtatcaagaacggtattgacacagaaagctacaatcccgaaacagactatcagctttatcgcaactattcaaaggacgatatgagcggcaagggcgaatgtaagcgtgctttgcaggagcgtttgtgtcttgaacagcgctgggatgttccgctggtcggtatggtaacaagacttgttgcacacaagggacttgaccttgtaagaatgggccttgaggagcttatggacacagaaaatatgcagtttgtaattctcggttcaggtgacaaggagtacgaggactacttcaactatatgcaggctaagtatccgggcagactttgcttctgtcacggctatgttcccgagcttgcaagaaagatttactcaggcgcagatattttccttatgccgtctgctcaggagccttgcggtcttgcacagatgattgcactccgttacggtacaattcctgttgttcgtgaggttggcggtcttaaagactctgttttcgacagtgccgacaactacggtaatggatttacattcaaaaactatgaatgtgcagatatgcagcttgccgtaagacgagcattgtggggcattcaggacgaccagggttggcatcagcttatgtggcgtgctatgatgagcgacaacagttgggatcgttctgctcaggactacatcaatctctacaacgataccctcaagtgggcttaatcgtgcagtcaaattttataacaaaaaattcagtcggaaagcagatttcaaatttgctttccgacttttattttatttgaaatagcaatctcgtaggggcggatattatccgccagcacggcgagccgccgttcccaattcgagcagatagtttgatagaaaaacaattccaatgcccgaattaggtgaatttatgtttacaaaaaattatttttcacaaaaacaaaaaaggttggaaactactgcggggagcagtcgatttccaaccttaaaattttgcattagcttttcatcaggttctctttattgcgtgcggaacacgaattttacctgcaagcttaccaagagcaaacacaagaataatctcgggaatgcacttaacggcaacactgataaatcttgctgtaagataaactgtgtacggtgttgaaccgccgccgtagagtgtgtaaagccagaaagctataaggaatgtttcaacgcagagcatatttgtaaaccatgcaagaacaactctgagcggagttacattgttcttataaagaaacataccgtagataaaaccagtaataaaaccgttgattgtaaagccgggaaaatatgcgcctgtcggagcaatgataaatgaaagaatatctcccaaagcgccgacaattgcggcaggaatcggtccgaacattacacctgttacggcaatcggcaaaaacgctgcgctgagctttacattgtttccgaaaaacggaagtgtgctgtttgcgaaaaatccgagaacaatacgaagtgcaagcagcattgcaattgccgcaagagcgtagatactcttcatttcaagcaaagagctttgaatttttttgagttgtgacatattttttacctcctgaatctctgttgttgcttcaggaagaaaaaagcggacagattgctctgcccgctgaattatatgtcccaaagtaacagcgggatgcgaaatctgtaccgcaggataaacctttcgttcttgcggcaactccccgtccgcaaaacacttcacgcacaaatttctactctgtgatagatgccttccgacaccgtatgttattatacgcctgaatttgttgtttgtcaaccaaaaaattaatttcgggtttactgaaccgttgcttttttcttctttgtaagaagggcatcgaggctgttgataagtcttgaaagcggcttgtagattatgaaaacaactaccgaaatgatgagtcccttaatgatattgaatggacctacgcagtacaggcagaatgtaaatgtgccgtcaattgcagggaaaattgcctgtcccattttgataatttctgtaagcggcataaatgacgagtagagcggaacaagcacgaatgtgttgagaaccacaccgatagccgccattgcaaccgtacccgtaagcattccgacaatcgcaccgactcttgtttttttgtacttgtagatgaagcctgccggcaggataaacgaacagccgatgagaaagtttgcaagctcccctactccgcctgtgcttgtgcctttgataagaaacttaacgagaatttttacaaattcaattactacaccggcaatcggccccatgctgaatgttccgacaagaacgggaacttcggaaaaatcgaactcatagaatgaaggtgcgatgaatccgagaggaaattcaaagaacataagaactgccgaaagcgccgcaagcattgcggttacggcaagctttgttgtctttgccgtgttgtctgaattgattgtttttacttttgattttgtcattacgaccactcctgaaaaattatttcgagttgtcgggaaaagaaaaatcccgctacaaatgtaacgggattgcgtaccaaaataaaacagacgaaccgcctgttctgccgcatcttctcgtatccggactataaccgtcggtgtctgaatttcacagactcggcaggctttcacctgttcgtggactttaaccaccggtggagaatttcactccgccccgaagacaactgttgattatattatatgccgattttcggatttgtcaatatctcttcagtgttttgagatattttttcgtttcatcgtcaattctgaagctttcaacgcatttccgaatcattttattaaaggttgcattatcaagcgaatttgactttatgtaccgcatagtttgttttctgcactttgcaagtgctgttgcaacaagccatgcccttgccatactcacataataatgcggatttttcgcattgtcacaacattcaagcaccgtttctatgtactcatcttcaagataatagtcaagcatcagcacaagacctgcacgaattatccacggattgtcgcttttggtgtattcacaaacatgaggaaaaaattctgatttatactttttcgtctgctttaaatttgcacaaaagccgtcgcaaaccgcccagctgtctatacgctgtacaaaatcatcgctgtacatcaaaaattcttcatagctttcggttttgagcaaaccgattacaatacctcgcattgttttttcttcataagaattatcagttgtctgctctaaaaaactgcgtccgttgcccttagaaatttccttgccgagctttcgcataacagtcattcttactccgataaaaaagcccttgtcattgtcgggaatcaatgaggaatgaaagcttctgtacttttcatcggcatatgaacgaagttcccctacaaaatcatcatagtcatttttagtacaattatctcttataagctccataatgcaccgttatttttacttattatttcttttgctgtcataaattttacacggtgagttcaagtcaagatatgcaatatcgtggtgtggcactctgtcctcaaccggcggaagctgcatataatcaccgaaaaccattctgagatactcgtcatagccagacatacacggcatttttatgccctcaaatgtgacataatcaacgcccgaataaatgtgtttcggatactcaattttcatccaatgggggcccgaacaaagctccgttacacacttgtttttatcaagcctgtacttaatcatatgcttttcggcagttctccaaatcttttctcggagctttttccctctgaaaattgaaagcaaagccttactgcctgctcccacaattccgccgtgcttttcgggaacaacctgagccagaaacagcgaataaagcattgtccacacatactgcattttgcgtgcaaaacggctgtcgggacaaacatcaagcggaaagacatcaagcacaagtccgtgcggaatatcaacctcggtctgatttgtcttgaccatagtgtaatttgtgtcggttacggtcataaaaatattgcccgtgaacatatcgctgtcggttttgagaagtcgaaatcttccgtctgcgccctgttcatgccaaagcttgtacagcttttcgtagtcctctcgtggcagcataacatcaacatcatcatcccacggaacgaatccgccgtttctgagcgcaccgattaacgcaccgccgatgagatagaatgtgagattgttcttttcgcaaaagtccctgaaatacacgagcatatcaagctgtttaagctgtaactcacgcaaaagttctggggtaagttctactttttcagtcataagtatctccgtaaatatcaaatacgggcggagattatccgcccaaaaattatttgtatgaatgaccgggaagtgtgttttccctgatttttctttttaccttttcaatgtgttctttcgcaccgctgtttttgattttcttccgccatgacggaatctgaattaaaccaacaatcgttcctattccgtaggcaacatggagcaacgggaaaatgaacggcaaaaacacaaactgaggctgaacatttttcattgtgcaacatccgacagcgtttacaatatcaaacattccgtagattatcaaaagaatgtacaaaaaaagcggaagtccgagaaatgcaagcacggaacagccgagaagtgccattacaaaaagaaacggtgcaaagtgaaagtatgaaagacaaccgggacattccgagagtgtaagtcctatccaccgtccgtttgaatacttctgccttatcattccgtgaaggtcgtttcgtgaatgctgatacgaaataatatcggggcaacagcacatcttgtagcccgccattctaatgcggtagtgaaattcattatcctcggttctgccgagattttcgttaaatccgccgaccttggcaataacctctctgcggtaagccgcatgaaaaaggctgtcaagatattccttttgcgcaagcggccgtctgtacgaagcaaccgaactgccgaacagagaatcctcagccgcaagcaaggtaagcttccagcttgaaacatttgaagtgatattcggtctgccgccgcctacaacattttcgccctgctttatgttataaacatttcgtgaaacaaagtttctcggaattcttgcgtgagcgtcaactcttatgataacatcgccctttgcggtcatcagagcggcattccatgaggttgcctgattacgctttacgcattgaacaacggacacattccaaaagccgtagtcggtatcacggaatttttccattttctctttagtatcatcggttgacatactgtcaacaaataccacctcaattttatcatgcggatagtcctgaagtgcaatatccctgaaaagtccgctcaaagcattcgattcgttataggctatcatacaaagtgaaactaacatataatatctctgctcccttcaagctcgaacaaccattttgcagacattgcagaggttgtcagaaaataaggtacggcataaaatgccggaacaacaaaaaagcacaaagccgcccaaccgataaaaccgataaacagctttattgtggagatgaagttctttattgaaaaagccatcattctcggaagataaattccgagcggcagatgttcgttaaaaccgtaagccaaaaatgtataatgaacaaaaataatgtaacacaccacaacaaccgcagtgctgacgataaacgccaaaacaagcaatacagccacaaccgccgtgagtgagggtgaattttcaattattttatccgaaaccgcactaagataattgaacacattgagcagaccgcttatgataaaaaacaagccgactgaaattacatcaagaataacagacttaaaaaataatttcggctttttataatagtaaaaaacatcaagaggactgcactctctgcccctgactacattacacacacttctgtaaactccgtttatgagcggcagacacacaacaacaaaagcaaaaaatacaagcccgaaaatcattgtaagcatctgctgagtctgattcggatttttcacaccataaagtcctgccacagacattgcaaggctgaacgcaaacagccctgtcaaaaatgcaagcacagcgaccattatctctgagataattaccgaccgattcccctcaagaaccttttttgcctgttttctaacagttttttccgtattcattagcattcccttttcatctgaatttgttcataacgaaacgcattattctccgtcagtaaacattctgtacattgcctcaaggcaaatctgagcgtgtttaaagaagttctccttatccatactttcgtctgcattatgcatacgaacatcatcgtttttgaatgcaggaccgaatgcaacaccgtgacctccgagcattcttgcgtatgttccgccgcctgttgaataaagctcagccttttcacctgttacgcttttataagcgtcagagagaagctttacaagcttgctgtccttatcggcataaagcggttcttcgtgattgagaacagtaaccttgaggtcgctgatttttgcaacctttttgaactgtttgagaactctgtttccgctcacggtaacgggataacgaatatcaaacacagcctttgcggtctgtccctcaatattcacgctgctgaggtttacggtgagtgagcccgaaacagcgtcgctcattttaagaccgagtgatctgccgtttgtttccttgttgattgcgtagtcaataaatgaacagattgaacctgtttcctttgttgtgtaaacatttgagataagatcaacaagtgccgctgcggcattgtagcccttgtccggttcacacgcatgagccgctttgccacggctgattatcataagaccgtcaatagtgtaattaaattcaaaatcaccgtcacttgcgtctgcaaggcgcatgagagtctgctcgtcatagtctgatgaatcaagcattacatacgctctgtcgggaactgcattaactgctctgcctgcatggaactggctgagtgttgttgcattatttaaaagtgtgctgacttcaagctgaagaatacccttttcggcaaagcagatgccgtagtcgctgtcgggagtgaatgccatgtcgggaagtggatttttcttgaaataattttccatatcctccatacccgtttcttcacccgtgccgtaaatagcacgcagagtgttcacgccctttacaccgctgtccttgattgctttcaaacaatagagagtaacaagagccgcacccttgtcgtctgcaattcctctgccataaagtctgccgtccttttcggtaagcgcatacggcggaacgctccagctgtttcccgcaggaacaacatcaaggtgagtaagcacaccgcaaagctttccgctgttgccaagggttatatgaccgctcttgtcggttgttctctcccctgtcagaccgaaatcttctgctcttttaagaataaaattcaaggcattatcgcactcgtcattcttttcaccgtcaaccgattcaaaagaaagaagtgtgttaagatcctttaaaagttcgtctttgaagtcaagtattttgtttccaaacataataaatacctccgtacttaaatgctgattgtatctttatcagtttttattttttctttttttaactgttttaacggtcacaataaccgcacagtagattaaaaatgctccgaatgcgcaaaggctgattttgacacctgttgaaaatccgggtgtttcgtaggtgaacacaatgtcacacttttccccctttggaatcttaacagccataaagccgtagtcaaccttttcaacatctgccgccttgccgtttacagttgcggtaaaaccatcgctgtaaggaacgctgaaaaacaacaggttatcgtcaccctttttattattgtaaacagccttaaagccgttatctgtatattcaaatgaagtacaactgttcaaggctctgagattacaaacctttttgtaatctgaattactgtaatcaaacttttccgtaatgctgtcgtaatcctccggatgtttgccgtacaaaagcttgtacttttcatcgctgtagcccgtaatatcggaatacttcttcataaggtcacggggaagaaccattgcgtagagcaaagcctcggacttgtgtgcgttcgtcacaaggtcaaattcttcttcggcaatgaacttatcaaaggtgtatcccataggaatgtagtattcattgcggtaaatatcaaaacggttctgcgttctgagatatttccaacccggcattcttgtgttgccgttttcgtcaacgaatgaattcagacttccagattttccgtcgccacggtaatcaaaaagatacttacagctcagaaacgggcgaagtccgtatacatcaaggtcaggtcttgacgcaacatcccttgtaattccgagtgcatcgtaaaactgcattatagatgttgaaacagaactctgaaagcagttaatgctttgaatctgccagaacattgccgtgttgtcaacacattcgtaaaaatcactgcgaacattgtcaatatcggcaattgtgataccgtcacgcctgtttatgatatcttctttgatggcatttgtactgctgcttgaaaaatagcctgtggcgattataaaatatgaggtgaaaagcgaaacgctcaggataccaacagtgagcataaccgtaaatctctttttgtttcgtctgaattttttgatgatgagaacgaacgcaagcaaacttaacaaagccataagaacatagagccaatagcgttcaaatgttgcctgagtgccgataaccgtatttcgaatatcgccgctctcctcatccgtatagctcacaggcataagacctataagcagagttgcgcctaccgtaattcccgccgaccaacgaatcgccctgttccaatcggtttttctgttttcaaacgccttgattgttgcaagaacaagcataagcacgcccatatagaaccatcttgcgtagtaaattgagctgttcataagctggaacatactgttcaaaacaggcacacacgcaaacacagcaagcacggcaagaagctttttgagccagctttttcggcaaacctgaaaatatgcgataactcccgtcattccgacaagcggcaaccatgccgcaacagatgcccatctgcaatttgagccgggtgtgaacacagggaacgcaggcatatctgcggggaaaaacaggcttaaaattatcagccagtatttttgcggttgactgtagacaagcgaatcccagccgttcggaagctcggcaagccttgggtttcccattaatccgagcactgacggcagcagtatgaatgccgttgcaaggaatcctatgataacctcaagcgcaagcaagagaaaatttttaactttaaatttgtaggttttggtaagcgtaatcataagaaagtagatgattacgaacagaacctgtcccacaaagaagtagtagttcacaacacaggcggagaataccgcaagtgtgaacactattctttttccgtcatagatgaatgcgtcaagtgccgcaagcaacagcggaaacattatcatcggttcatgaaaatggaaaaagaacacattgtagattgaaaatcccgaaaatgcatacagcaatccgcctacaagagcgaaattcctgtcagccacatatcttttcaaatagagatatgcggaaagtgacgcacagccgaattttaaaatcagcaacggtccgataagatacggtacagcctcactcgggaacggaattgtcagccaaaagaacggactgccaagaagataaaagctgaagcttgagagcatatccgttccgaggtcaacattgtgcatccaacccgtatcaccgtttcttacggcgtcatgcacaagctgataaaacggaatttcctgaacattgaaatcaccgtaataatagaaaacaccgctccccattatgataaacggtagaaaaagtgctgttgcagttataattgatataagaaacacacgcaaaccgaatagtttttgtgttggatatttttgcaaaattctgctcggcataaaaccctccacggagcaaaaagtctgaaaaaatctttttttcgataatttctttacttttaaattatgaatagtataatcagtaatataaatgtccttcaccgtcatttattcaaaagacacctacatattcattcggagcaacgctctgctttgcttgcagagaacagaagacactcgcatttagattacattataacataaagcgatacaaattgcaccaatttttagcaaaaaacaggagaaactacctatgaatatttcacatttttacgcaatgctttcaagaatgaggtatatcaaccgttggggacttatgaacaacacacgctgtgaaaacctcagtgaacacagtcttgatgttgcaatgattgcacattgccttgttttgattcacaacaagcgtttcggcggtaatctcaatgccgaaagagccgcattgctcgcactttttcacgatgcaaccgaaatcataacaggcgatatgccgactcccgtaaaatacttcaaccccgaaatcaaaaatgcctacaaggagattgaaacaacggcaggcaacaggcttgtgtcgatgcttccggatgattttaaggacgatatggataaaatcatcaaaatgaacggtgcaggtgacgatgaacttaaaaaatatgtaaaagcggcggacaagttttccgcactcataaaatgtattgaagaaataaaaatgggcaacagcgagttttcaaaggcaaaagaggcaaccgaaaaatcaattcacaacatgaatatgcccgaaaacgaggtgtttgaaaaagagttccttccgtccttctatttgtcacttgatgaacaggattgacagttaccgacaaaaaaatcaatattttcagtcagatttttcgctaaaactttacgaaaaggcagattttaattctaatttagcattaaaagaaattctcatatggtataataaactatacttgtgtattgtgtgctttttacccgattggaggagtaatatgccaaattacgaaaaaaacagtcagaaaagcaattttattgacataagctcaaataagcaggtcaaaaaattatacaacaaaaaaggcagactcaaaagaatcctttgtcttgtgttttcaataatcttcctgttgggcggcggcggaatgctctactactattcatttcttgacactctcaacttcaaagagcttgatgacacaaacaacaacacagcagcaaccaactcatcggttgcaccgcttgagagtgacgcaacaaacctttcgctttcagagggtgaacttctgcagaactccaaggagcttaatgttatgctttttggcgaagacaattcaaaaggcgataaacacggcagaagtgatacaatgatcatgatgaccattgataacaatcacaaaaagcttaaactgacatcattccagcgtgacacatatgtttatatccccggttacggatatgacaagctcaacgcatcttataactacggcggagcaaagctttcaattcagacaattgaggcaaacttcggcatcaaggttgaccgttatgcggttgttgactttgacagctttaagaagattatcgacaccctcggcggtattgatatggaagttactcaggacgaaattgactacatcaactatcagatgtacaagaacaatcaggctgacacaagaacaactatcacagacgcacccggtactgttcatctcaacggtcaggaggctctttggtatgctcgaaacagaggtcttaaaaagggcgaggacggcaacgaaatcggtcttgacggtgacgactgggacagaacctcaagacagagaaagcttcttgaaactttgttcacaagtatgaaaagtgcagacctcggtcagattgtttcaattgtaagctctgtcggtccccttgtaacaacaaacctcaagaaggacgaaatcacagcacttgtttctcacgctctcacatatctttcctatgatgtagaacagtattatgttcctgaagaaggtctttggtactatgatgataaaaccgaaacatggaacggtgcaatcacatcaacaatcaaaatttcagaccttgaagaacagagaaagaagtttgcaagcttcgtttttgaggaattgttcacaggcggcacttcttcaaaagaaacaacctccgcatcaaattgaatattgaacaaaatgcagacagccaattatcggctgtctgttttactgtgacggcgagccgccgttccctattcgtgaagatagtttgtttaattacaaaacatattacacccgagcgtaacattgcggttattcgctctaaattagggcgagccgccgttctctattcgtgaagaaagtttgcgatattaaaacatattatgcccgagcgtagaattgttattattcgcacaattcaacaaccgcattgcacataaaacaaaaatgcatcagaaccttacttggaatctgatgcattttatttgtttgattattattctattttcgtataataaatactcaaaaacagctgataaaattctgcctcgctgacattgaattctgcgtactttgaacccattgtaacctgaccggggactgaaaccatatcaattccgttcataccgccaagcacagcctgctgagcaagatatgacacctttgacgggttaagatttgtacatgaatacggagcggacgcattgaacaaatcaatcggcgtggttaaatcttcctttgtctgctgaagaaccgtattcataaaagactgaatgtaaaccttctgtctttgcatacgcatattgtttgaatcggtcttgcttgtatcacgggttctgacaaagctttcagcctgctgtccgacaaggtgatagctttctccctcaacaaactccccgattgtttcgggtgacacaacatcaacaccgccaacgctgtcgttgagagcggaaatgccgtcaaggtcaagcgaaaagtatgtgttaatcggaatgttatagaacagcctctgaactgaatttaccgtattttcacagcttgattccttaccgtcaccgtatgaatacgaaagacaaatctgctgtttttccgtgccggcatacgcaccgcctgctgaatacattgtgacatcaaccatcgaatctctcgaaatgttgaagagcgttattttaccgtttgaagtgtcgattgacacaagcataagcacatccgcctgaccgccgctcgccttgactttgctgttattattttcgtcaaggttgcgcttgtcaacaccgatacacagaacattcgtcaccttttcgttgaactgatatgtttcaccgttgtatacgacatacttaccgttttcctcggtttcaatgtcctgtggggcggtaacatgaatatccgtattaaacagctcgtttccaccctgataaatcaaatacgcaaccgtgcctacggtgagtataattaaaccaagtaatgtacagccgattgacaaaagcacctttttccaggttttcatctttcgatgctttgaatggtgatgatgcgactttgatctatgctttttatagtgatttgtggtgttactattcacgacaatgctgtcggaatcaactccgtacacatctgtatatacttttttctttttctttattaacttgctgtccttgaaaatataaccttctatatccagccttgaaagattgcttacatgctccttactgttcttttctctttttgattcaagaatttccggtgtattcggatcaagcttgttttctatattttcagttgttgcctcagccgaactttcattttgtcggttcatctttcttcagcactccctgcacaagatatcttccgtcaccgctgtttaagcatgtgcttaaaacaagaattttatcatcggtagtaagctccgtatttctcttgttcacagaaacagaatgtggatttttaatcatattgagataatccgaaaatacattatcatcggaaaaatcaaacgaattcataatgtgtcggttatcatattcaaaagctgacacaatttcgtatgtaagctttctgtcgggagtgtaaacatagatgtacctgttcttgttaaagaaatcggcatcataaaagcgatggagcgttgcaaacattgagccgtttgccatattatgaccgtaaagcacagtcactctgtcggaataatcacgcttgttgcacatctgcgaatagatactgcccgaaaagctgtaattcttataaatatcgtggtcaagatataagttatcgtcaagatgactttgcaaaacaggataatttacatttgtattcggaatgtaaatccacgaataaatgtcgctgttctgctgttgaagcgacttgaaatcaatcggattttcgacctttttcacattgattgacggtgaagtcacttctgttgcagaggttgtaccgttttcaatgcctgacgcatacgagcctgcgatgttatcaagactttttcgttcgttattttcatttaagtttttaacgactatgtacgcaagtgtgccgataattgcagccacaagcaaaataatcaaagctataagaaatttgtttctttttctgctcatatcaaaaactcccaattggtcatattgtatcatttttgtgtcagtatgtcaattaatcattacttgttagtaaaattttattacaatttacaaactactacatctgcaatacaaaacctgattattcaaacatctaatgaataaaaaagagacttccttatgagaagtctcttgatttttagttaaggttggattatttgctctttacaagcttaaatacagccgcaccgcaagccgcaagagaaagaactaaaattgcatacggtacaacatcgcttgcgcctgtctttggtgaagttgttgaatcatctttctttgccgtagctgtagcaacaggacctgttgtgccgccgctgcttgccttacggtaataaggagtacaaacaaggtcgcctgaaataataatattcattttagcatctgtatacttgctgtcggttctgaaaggaccgcccgaaatttcccagtggtcaaaagtataaccgtcataaggaatcggctcaatgtaaacatgctgttcgccgttttcgtcaatacctgttgtgaacttataattaccgttaccgccctctgtcggaataacttcaaccttatatttgaatgtattcggttccggacttacggcagcaaatgcgggaactgccgacaataacatcatcataactgcaaataacacagcaattgtctttttcatcacataatccccctaatttaa

SEQ ID NO: 243 - DNA, 15883 bp, unidentified
  source 1..15883: mol_type = unassigned DNA
gtgtttatgatgcagtcagaacgtttcagtgaagaagtcaaaagtttattggaagccagtcagcagcaagctgtcatgaactataaccaagaggtgggaaccgtccatctcctgtcagccatgatgagcgaacctgatagtttcctccattatgtcttaaagagccttcatatcgaggaaaacgacttcagtcgtgaccttgaccatttggtgaaggccgtcccgtctgtgaagggaacggaccagcttagtatgtccacggggatggcaagggtctttgccctcgcggaaaaagcagccggccaaaataagattaccggagcccatctgctggctgccctctgtgaagatggcgatagcgatgtggtttccctctgccgcaagtacggcattacccgttcggccatccgtggtctcgtcgaccgctatgaaggcggcaaggacagtgacgaaaaccgcaagaccttggaaaaatatgggcaggatctgacggctaaggcccgcaagggagcccttgatccggtcattggtcgtgacgatgagatccgccgtaccgttgagatcctgtctcgtcggaaaaagaacaaccctgtcctcattggggaaccgggtgttggcaagacggctattgtagaaggccttgcccgccggatcgtggcaggcgacgtgcctgaatccttaaagaacaagaccctctatgccctggatcttgcgtcccttgttgctggggccaagtaccgcggtgaatttgaagaacgcttgaagaaagtcctcaagattgttgccgattcggctggacagatcatcatgttcatcgatgaactccataccgtcgttggagccggtgcctccgaagggtccatggatgccggaaatatcctgaaaccgatgctggcccgcggtgaactccgctgtattggggccacgacccttaatgagtatcgaaagtatattgaaaaagacagtgccttggaacgccggttccagcctgtccttgtcaaggaaccaagtgtcgaggatacggtttccatcctgcgtggcttgaaggaacggtacgaagtccatcatggggtccgcatcaaggattctgcccttgtagctgcggctgcgctttcaaaccgctatatcagtgaacgcttcctgccggataaggctatcgacctcgtcgatgaagcggcagcccgtctgcgtacggaaattgattccatgccgacggaactggatgaaagccgccgccgtatgcttcagctccagattgaggaacaggccctttccaaagaagaagataagcagtcggctgaccgtctcgaaaagatccgtgaggaactgaaagagatgaaagcaaagaacgataagatgacagctcgctggcaggaagaaaaggctggcattgccaaggttcgccaggtcaaaaaagccattgaccaggtgaagaaggacatggaaacggccgagcacgactatgatctcaacaagcttgccgaactcaagtatggccgtctgccggaactgcagaaacagctccaggaactggaaaaagaagagcatgcagaagaccgtcttctcaaggaagaagtcgacgaagacgatatcgccaaagtcgtcagcacctggacggggatccctgtgagccgccttatggaaggcgaaaagaagaaactggctcacctggatgaaatcctccatcagcgggtcatcggtcaggatgaagctgtgaaggctgtctccgaagccgttatccgcgctcgtgctggtatcaaggatcccaataagcccattggttcctttatcttcctgggcccaacgggcgtcggcaagacggaacttgccaagagccttgccgaagtgctcttcaacgatgaaaagagcatcatccgcatcgatatgagtgaatatatggaaaagcataccgtaagccgcttgattggtgcgcctccgggatatgtaggctatgaagaagggggtcagctcacggaagccgtgcgccgtcatccttattcggttatcctttttgatgaaatcgaaaaagctcatgccgacgtcttcaacgtgctcctccaggtccttgatgatggccgcctgactgatggccagggccgtgtcatcgacttcaagaataccctcatcatcatgacgagcaaccttggatcccatgaaatcatggaacataaaggtgaaatcagccatgaagaagtgcgcagtatgctgatgaagttcttccgtccggaattcctgaaccgtgtggatgacattgttgtcttcaaaccgctcggcgaggatcagatccgcagcattgtccgcctcattctgggtcagctgggcaaacgcctgcaaagtcagatggaactcacccttgaggccactgatgaagctgtcgatgcccttgccaaggaaggcttcgatcctgcctttggcgctcgtccgttaaagcgcctcatcgttcatagtgtggaaaccatcgtcagccagaagattgtccaaggagacattgtaagcggcgatcatctgaaagtcgtcttgaaaaacggtaaaattgacgtggtaaaggcgtaagccttgactgctgggaaggaccccttcttcccagcatttttacgtttattgggattttttgggaaaaacctttgtgaactcgtcgtaaatgagttcacagagtaggggttccgttgtataataagaaggaatttgatgaatcgccaaggaggatttccatgaaaaaattactcacccttgtcacgcttcttatgacgctccttgccgttccttttacggcaagtgctgagcgcagcggcgccaaagcaagcggcgttcctttcaataagaccaaggttgtctatctaaaaagtctcgaaaagactgatggggaatttgttaagaataacccccaattcagacgcgatgaggatgcggtccgcctcacctatcttgggctccagaaatccttgaaggatgaaggggtgacgctttataacaatccagtcatgctgcccgaccgttacctgagaaagaccctgaccatgcaggtcgttgtcaattttgcagggactgtgcccctcgaaggagaagcggctcaggaagccatcaaggacaaacgggaaccggtggaatcccttgtctccctttccttccttgtcaccaaaggagaggcaccggtctaccgtatgaccgacgtgcgtacgagtaaggaaaagaacttggaaaaactcatccgggatatgacaaaagatgtagcaaatgaaatcacgaataatcgtatgaaactaaaagatgtaaaataagaacgccgagaggctgtgagaaatgagtacatcatttctcacagcctctttttgtatggcttgggagtgggggattatgatgttcaggtggtgtgatgctgtgatgcagggccgcactgctgttctgccactaaaatcggtgcagccgaatcttttgtctttggaatttgaatccatcaaaagactgtacagccgaccctaaaccgttccttctttaaagggggagggaccgaatccattcgcccggaaacatggccctgcgcccttgtgctttgccccaatgcgggcttgggactcgggcatatttgccttgctagctgcttgcaaggaaacgtcgctgcggtttctcatccaccaccgaaatcgggaaatccgaattggataaccgtatggatatttcccacacaacatgagtgctaataaattatattatcggccccgtcgtacacgaaaacggttcctttacctccgcagctgcaatggatttatactggtgcggctgtcaaaggcggggtatcgttttcgagtcaatgcggaagatggctatagaggatcagccgtatcatgttccgtctttttgactacgcagatgggccgatatgggcttcaggcgaatcatgtttcctttaaaaaccgaaaaaattccaagaagtggcccatccgccgaaggcatttttttgggcgtcttaaaaatgagattgtggtacgtaccttcttgcgacggggcatgtcatcatcggcatcagatcaatctttttaaagccaatgacgacacgtagccgcatcgaatcggcgcgatttccgcgccgagtaaaactacagacctctacccttgcgacaaacccatttaaaagatataattctatgagtatcatcgtgagaccagcccggttatccgccctgtgtcccccttgaggaaaggatggacgatatctatgccgatacctcttgctctttgggctgctgccggaatcggagcagcgggcatgaagctctacatgaacctgaacagtcctgaaaccgtcgtgcgcaatgcaacggagcgttataacgaagaacgctataaattctataaacaaatggaaaggctcgttcccctcatcgaggaattgggccgtttgaagttatctacgtggtccaagtataccgcgatgtttgacacgctggataagctcatcaacctccccggtcattatacctataagagccacaagaacctccacatgctgccccaggatgtgcgcaagctgcggaaggtggcagacgtcgtaaaacgaatccatacggatcatcttgatattgaagggacagggatgctgactattgttgcccttcaaggcggggcggccagtgattacagccagacggccctggccgaaggggagtcgcgcctcattctcgaacaaatcatggagcagcccctttatacgtcagaatgcggcgtccttgacgaagagcaggtcctgtgcgccgtcatggattttcccaaagtcatgccccgtggttatttcaaggaccgtcatggcagaaagcgggaacgcaaggtttccaaacgggcggcccgccgctacaaggaattgacggataaggaatcggtccgtcttgctgacgcgacggcgcgggctgatcgcctttttcatgttgtgacccatgtcctgggctatatgaagccgctcaaaaaggaacatgatgaacagcttgatttttttacggccctcatcaagaaaaacaacgattacgatcagtttacgctcgaacagaaggatcgtctcaattttggcgttaccttaggatttgtcctgcgtgaactggcccggaccgatatcatcatcaagaacgggaatgttcccatcatcaatacttcggccctgcgggcggtttatgcccgggccaaagatttgatgcctgcggaagaaatgccctatcagatataagaaaggaagaattctatgatcagtacaaaaggtttcaaagcctatgatatccgcggcgtcgttcccagcgatgtcaatgaggaacttgcttacgccttgggccgcagtcttgccttttacctcaaggcaaagacccttgtcataggtcacgacatccgtctgagcgggcccagcctgcgcgacgccgctgtacgtgggatgcgtgacatggggacacatgtcatcgatcttggtcagtgcggtacggaaatgatttattttgcggttgcccatcttaaggctgatggcggcatgatgattacagcaagccataatcctgccgaatataacgggatgaagcttgtccgcagcgagtcccggcccatttcgggagacacgggattaaaggaccttgcggccatggtcacagatcctgattttgaaacaaaatatcccaaagccgcacggcagggaagctatgagcaggtggacattgtcccaagttatgtggatcatctccttagctatatcgacactaaagagattgctcccctaaacatcgtggctaaccccggaaatggcggagccggtcccattgtaaaggaactggcaaaacacctgccctgtcactttacgtatcttaatgacacgccggacggacatttccccaatggagttcctaatccgctccttgttgaaaaccgtgatgccaccagcgacgctgtccgccgggaaggggccgatcttggcattgcctgggacggggattttgaccgctgcttcttctttgatgaaaatggacgcttcatcgaagggtattatcttgtcggtctttttgcctcttacttcctcaagaagcatcccggtgccaagatcctctttgacccgcgcttgatctggaatacagaggacatcattgcccgtgaagggggctatcctgtccgctgcaagagcggtcatgccttcatcaaggaatgtatgcgtcgggaacatgttctttatggcggagaaatgagtgcccatcactatttcgccgatttttcctactgcgacagcgggatgattccttggcttcttgtcatttctctcatgtcgacatcaggccttagtcttgctgaaatggtggacgctcgcatccgcgaatatccctgcagcggagaaatcaaccgcaaagtggggaatgccgatgccatcatggaatccctgtcgacgcgctttaaatccggcatccaggaccgtatggacgggcttagcgtcgtctatgatgaatggcgcttcaaccttcgtaaatccaatacggaacctgtggtgcgtctcaatgttgaaacaagaggagatcgggaacttctcgaacaaaagacccgtgaacttctggaccttatccagggcgagaaagcataaggaggcagcagtatgaacgttcttgttacgggcggggccggttacatcggttcccatgtcattgatgatctcatcaaatctggttatacaccgattgtttatgataatttcagtaccagtcatgccgaagcggttcccgaaacggtacagcttatccaaggggaccttcacgatttcaccttcttgaagcatatcatgggccaatatgaaatcgatgccgtcctgcactttgctgcaagttcccaggtcggcgagtccatggtcgatccgggaaaatattactataacaatgtggctggtactttgggtcttcttgacgccatgcgggaaagcggcgtcgagtatatcgtcttttcgtcgacggcggccgtttacggggaaccggaccaggttcctattacggaagacatgccccttcatccaacgaattcctatggccggacaaaactcatgattgaaaacatgctgcgtgactacagcatggcctacggccttcattatgtagccctgcgctacttcaatgctgctggcgcgtcccttttgggaaatatcggggaagaccataatccggaaacccatctcattcccctgaccatccaagccgctctgggtaagcgcgatgctatttccatctttggtacggactacgacacccctgacggcacgtgcctcagggactacatccatgtgaaggacctggcctccgctcatatccttgccctgaaccatcttgtcaagggcggtgcaagtcgggtctataatctgggaaccaagacgggactttctgtccgggaaatcatcaatgccgtcaaggaagtaacgggccgtgacttcatggtaaaggaagaaaaacgccgtgctggcgatcctgcgcggctcattgcctccagcgaaaaaattgcaaaggaactccattggaagcccgaacacagcagcgtcaaggaaattgtggagacggcatggcgctggcatagcggccaccccaatggatatcgctgagccttatggatatcctggtaaccgtcgatcatctcgccaaaagctttggcgctcatgatatctttgacaaggtgagctttaccattcgccaaggggaaaagctaggccttgtcggtgtcaacggcagcggcaagacgacgctcctgcgctgcctcatggatccctcctttgccgataagggaaccgtccaatatgcaggggaaattcgcgttggctatgtggaacaggggtttgacaatatcgaagacgaaaccatctgggagttcatgctccgttcctgcccggatattctttccctccgggaaacgatgaaggaacttgagcgggaaagcggcgaaatgacaggtgatgccctaaaggatgtcctggaccgttatggtcgggtggaaacccgctatgcccacttggacggttatcactacgaaaataacatcaagcgggtcctgatgggactgggctatccagaatccacctgggagcacaacgccctggccctttcgggcggacagaaaacgcgccttcagctggcggcggctcttgtcaattcgccggatctgctcatcctcgacgaaccgacgaaccacctggatattgtcatgagtgaatggctggaaaaatatcttcgtgagttccgcggtggtgtcctcatcatctctcatgatcgggccttccttgatgccgttgtggaaggcatccttgaaatggaaggggggaccctgcaccgctataaaggaaactattcccgctatgtggagcaaaaagagctccaggttctctcccagacccgggcttatgaagcgcagcaggaaaccatccgacgcacggaagagtatatccggcgctacaaggccggcatcaaaagcaagatggctcggggacgtcagtcccagctggaccggatggaacgcattgacgcacccgtaaaggaagaatcttttacgctgcgtctgccccatgccgctgaatccgcggaaaaggtcatcatgttggaacacctttccgttggctatgaaggaaacgcccttttaagcgacattgacctggtcctgcgccgcggggaaaaggtggccatcatcgggcccaatgggagcggcaagtcaaccctcctaaaaaccatccttcaggaaatcccgccccttcacggcgaagcaaagattggaaaccgcgtgaagattggctacttttcccaaagctatgagcgccttgattcccagcagaccattcttgacaacttccttacggagtatggcatgacggacgaacagacgcgccgtctattgggcagtatgctctttcgcggggaagacgtctataaaaccatcgggagcctttccggcggtcagaaagctcgtctggtcctcttgaaactggttcttgacggggccaattgcctcgttcttgacgaaccgacgaaccatcttgatatcatggccaaagaagccgtcgaagccgcccttgagacctttgacgggacggttcttctcgtcactcacgaccgctatctcgttaatgaagtggcaggccgcatctgggctgttgaaaaggggcacctcacgaattataacggcaattacgacttctatctggaagaacgggacaaacgccaacagcgggaagcgccgcttccggaatcctctcatcgagcgccgaaggaagaaccggtaaaacctgatggatcaaagcaccgcccccatgaggaaaaatccaaaaaccagcggatctatacgccggctgaggcggaaaaactcctgcctgaagtagaactgaaaatccgtgaacacgaggctctgcaaaaggtcctaagtcagcagattgccgatcctgaaaaccagatggaccttgaaaaaagtgcggcccttgccgcggaatacgaaaaggagcaacagctcattgatggcttcatggaaaaatgggaagctcttatggaggcccttgaatgacagcattatccattgacagtttcataaaagccctgcagggctatcacagcgatacggccttcaacccatgggccgattacgacccccagtgtgacattgggccccaggcacccctcatccgggcagccaatctgaagcgctatttgacgctccgccaaaaggcacgctttctttttattgccgaaggactgggttatcaaggcgggcacttttcaggcatggccatgacgagtgagcgcatccttttgggtcatcaccctaacgtgcggccccatgtggttcttggcgaggattacccttgccaaaggacaagcaatcccgagtcgcccctgttaaaccgcatgcagcgggaaaaaggcttcaatgaaccgacggcgaccgtcatgtggggggaacttgcggcccaagaactggcccctttccagacgattttgtggaatatttatcccttccatccctataaaccatcgggcatcctgacaaaccgcacgccgacgccaaaagagcttgacgaaggcattgactttgctcgtatgatccttgcccttgtgccggggatgcgcgtcattgccattggccgaaaaagtgcggacacgctccagaagtatggcgtagcctgcgacgcggttcctcatccttccatgggtggggccacgcgctttcgcagcgctgtggacgccttgtttgaatctgaataggtatttttggaggtaacatggaaagcaccattgccagtatgactaaggaagaggtcctcaagatttccctcacgtgcgggaaactgctcctgacaagcggcgccgaaacctatcgtgtggaagatacgatgacgcgcatctgcgccctcagggatatgcagattgctgccgtcagcacgccgtcatggatcatggtgggcgacgaaaccgtggacgggaccagtatggtctcccgcgttacgcggcgggggacggatctcaccctcatcagcgaagtgaacaacatttcctatcatatgcccacgtgggaccattcctttgccgaaaccatggccatgcttgatgaattgagtgcccgcccgtcaccgaccgcactctacagcatggtttggtccggttttgccggcggcttttttgccggcgtcattggtggcaatttctgggattttgtggcagccttcttgggctccttcctttctatggccttcatctgcctcgtgcggcccttccgccccagcagtttttgggaaacgactatggcaggcgtcatcatctgttttgtcacctatatgtgtcatctgttcattcctggtgtcactatggaatttgccattggcggcggaatcatgccctatttgcccggtatggcttttaccaacggaatccgggacttcatggccggtgacctcatgagcggaacgagccgggccggcgaggccattttccttgttggcggcattgccatcggcattgcggccttccttggcatcgtctatctttaaggaggactgccatgaacgtcatcctgaccatcgtcatcaagaccatctgctcctttttcggaaccgtggcttttggcaagatcttcaactgtcctaaacactgcctctataaagcgggctttgtcggcgctgtgggttttggcgtctacatcattctcctcagcggttttggcgtcagttccatgctcagcaattttgctggaaccgtagccctttctatctgcagtgagctctttgcccgctggtacaaggaacctgtgcctgttttttccattcctggcgtcattcctcttgtgccggggctgcccctttatcgggccatgaactatacgatgcaaaacggctacagcatgggtatgcatacctttgtctcggcggcccttgacgcaacggccatcgccatgggtattctccttatctcaggtcttgccaaggtttataagaccagtaaacgccttgtgtcgaaaaaggtccatcatcattccgaacgcttgtaaaaaaacgattgcttataaaccgcgggagtccttccttggagggactctttttgattgggcgccttacgatcttttgccttacagtcttttagcatcacagcatcttagtttccttccattttttcgcccgacagccagaactgaaggctcgtgacagccctttagaacaggcctcgaagaaaacagcttgacagctttcccctttgcgccccgccagaaaaaagattataatatccccaaaaggaggaatgccccatggccatctatcatacgcttacaagaacagtaaaggaaaacccccagacgggaagcatcatcagtgatgccatcatggatccagagaccctcggcaagggggtcaagatgtttgcccaagttacgctgaagccgggctgtgccgttcctattcatcagcatgtcggcaacaatgaaacgtattatctgattcaaggcagcggcgagtatacggacgaagacaaaaaattcaccgtcaaagcaggcgacgtgaccttctgcgctgatggcggcacccatggtctcttgaacacgggaaaggaagacctcgtcttcgtcgcccttattgccaataccatcgcctaaggcatttttgggaaggcggcctggcaggctgctatctctaaaaaatcggagccagctacgccttatcaaagggctgcgggcagcaaagcataaaaagagaagcggaggaagaaatgagcgaatcctttctttccccgtctttttttaaaatagttaatgaaagttttaaataaataagatgaaatatattcaaaacattaataaggaagcgtaacatttttctttcattcttacctaaaaatccccaaaaatgcacagaaaaaccctttctttgcccttctttccagtccgcggtggggatatatgacacactaggaaccgtgtaaacaaagaatggcataaaataaggcgtacagcgcccaaaattttcttgacagggtacgcgaggaatgctagaatagcatggtgtcacaggagaaactatgtcttgacggaggtgcgcaatgtttttggaagaagtaaaaaacggcgctccgactgtggtgggagtaaaacagacccagaaggccctcgtcaaggaaactgcccgcggcgtcatcgtggcgatggatgccagcgatcacatcacaggccccgtcagggccttgtgcgggattcatcaggttcctgtggaaacggtcccgaccatgcaggaattgggcaaggcctgtgggatccacgtgggagcagccgtggcggctgttcttgaaactcggtaaaatcttccgcttgggagattttaatacattaaatcttattcttgagaaaggaggtgccggaatgcctacaatcaatcagttgattcgtaaaggtagacaagttgttactcaaaaatccacggcgccagcattgaaaaattcaccgcaaaaacgcggtgtctgcacgagagtgtacaccaccactccgaagaaacctaactctgctcttcgtaaggttgctcgtgtccgcttgaccaatggtatcgaagttactgcttacattcctggtattggccataacctgcaggagcacagcgtagtcctcatcagaggcggaagagtcaaggaccttcctggtgttcgttatcatatcattcgtggcgcattggatactgccggtgttgctgatcgcgcacaggctcgttccaaatacggcgctaaacgcccgaaagcagctaagaaataagcacaatgcgtgaatgattcataacgaaggaggaattacagatgccgagaaaaggtcctgtaacgaaaagagacgtattaccggatccagtatatggttccaaattattaaccagattcatcaacaagattatgctcgacggcaaaaaaggtgtcgctgaacgcattgtctatgatgcatttgatctgatccattccaaaacgggcaaagaccccatggaagttttcgacgctgccatgaagaacgtcatgcctacgctggaagttaaagctcgccgcgtcggcggtgccaactaccaggttcctgttgaagtccgcgctgaccgcaagaccactctggggattcgctggctcgtcaactattcccgcctgcgtggtgaaaagacgatgtacgaacgtgttgccggcgaactgatggacgctgccaacaacaccggtgcttccgtcaaaaagcgtgaagatacgcacaagatggccgaagccaacagagcgtttgcacattatcgttggtaatctttacaaccaatcattacaaggaggagtaatctgtgggcagagagtttcccttagataaaatcagaaatatcggcatcatggcacacattgatgccggtaaaacgaccaccacggaacgtatcctgttctataccggtaagacccataagatcggcgaagtccacgacggcgccgctaccatggactggatggttcaggaacaggaacgtgggatcacgattacttctgctgcaacgacctgtacctggaaaggacattccatcaacatcattgataccccgggccacgttgacttcacggttgaagttgaacgttccctgcgtgtactcgacggctccgttgccgtattcagtgccaagggcggtgttgaaccccagtccgaaaccgtatggcgtcaggcagaagaatacaatgtaccgcgtatcgcgtacatgaacaagatggatacgacgggcgctgacttcttcaacgctgtccagatgatgaaagatcgtctcggcgcaaatgctgtgcctatccagattccgatgggtgctgaagatcagttcgtcggcctcatcgacctcgtcaagatgcaggctatcgtctatggcgatgaccttggcaaagacgaagaattcgagccgattcctgaagaatacgttgaagaagcccagaaatggcgccagaacctcttggaagccgttgctgaaggcgacgacgacctgatggaaaaataccttgaaggcgaagaccttacggaagatgaaatcaatgccaccatccgtaagatgacctgtgcctgcaagatgttccctgtcacctgcggttcttcctataagaacaaaggcgtgcagccccttctggatgccatcattgcttacatgccggctccgaccgatgtggctgacatcaagggcgtggatcctgaaacgggcgaagaaacaactcgtccttccagcgatgatgctccctttgctgcccttgccttcaagatcgcaaccgacccctatgttggccgcctggctttcttccgtgtctactccggtaaactgacggctggctcctacgtctacaactcttccaaaggcaagagagaacgtatcggccgtatcctgcgcatgcactccaaccatagaacggaaatcgaagaagtctatgctggtgatatcgcagctgccgttggcctgaaagatacgggcacgggcgatacgctctgcgatgaaaaggctccggtcattctcgaatccatggtcttccctgaaccggttatttctgtagccatcgaaccgaagaccaaggccgaccaggaaaagatgggcattgcccttggcaaacttgctgaagaagacccgaccttccgtgtccgcacggatcccgaatcttcccagaccatcatctccggtatgggtgaactccaccttgatatcatcgtcgaccgtctgaagagagaattccacgttgactgcactgtaggcaatccccaggttgcctatcgtgaaaccatccgcaaggctgttaagagcgaaggtaaattcgttcgtcagtccggtggtaaaggtcagtatggtcattgctggcttgaactgactccgctcaaaccgggcgaaggcttcaaatttgaaaacaagattgttggcggtgccattcctaaggaatacattgcacctgttcaggctggtgttgaagaagccatggaaaacggtgttgtggctggctatccgatggttgatatcggtgttaccgtttacgacggttcctaccacgaagtcgactcttctgaaatggcatttaagattgctggttccatgggctttaagtccggtgccgccaaagctgaccctgttctgctcgaaccgtacatgaaagttgaagtgacggtccctgaagaatacatgggcgacgttatcggcgacctgaactcccgccgtggccgcatcgaaggcatggaagcaagaaacggcgcccaaatcatttccgctttcgttcccctgtctgaaatgttcgggtatgcaacggaccttcgttccaagacccagggccgtggcaactactccatggaagtcgaccattacgaagaagttcctaagaacatcgcggaagcgattgttgccaaaaataagggaacggctgaataa

SEQ ID NO: 244 - DNA, 8516 bp, unidentified
  source 1..8516: mol_type = unassigned DNA
atggcagcaagaatttcaaaggcggattttgatgaaaaagtattaaaaagcaagcttccggtaattgttgatttttactcggattcatgtgtggcctgcaagaagctggcaccggttctcggagatatcgaggatgattatgaggataagcttcatgtatacaaggtcaacacaaactttgacggagagcttgctgatgagtatgaggtgactgcgaatccgacactgcttttcgtaaaagacgcagaggtcttagatagaaaggtcggcgcacaaaagcctgccgatttgaaggcgtgggttgaagaattattatagtctttagattattatataaagcagtctgatacaggataataacacatacagataccacaatctgtgacacaggaggaaataaaatgactatcacagtagcaggagagaagaaagaatataaggatggacttacattaccggagcttatcgagcttgagaatgtagatatgcctgagtatgtaacagtttcaataaatgaggaatttgttgccacagaggataagccaaagacagtgcttaaggatggcgacaatgtagagttcctttacttcatgggaggtggatgctaatggcaatgactgatgagcagatcgaacgctattcacgccacattatccttaatgaggtgggcgttaaaggtcagaagaaattattaaagggcaaggtgcttattatcggtgccggcggacttggagctccggcagccatgtatcttgcggcagcaggagttggcacaatcggtattgtggatgcggatgaggtagatttatccaacctgcagagacagattatccacggaacagccgatgtgggcaaagccaaggtaaagtcagcaaaagagacaatgaacgccatgaacccggatgttcaggtcaatacataccgtatgtttgtagatgcgtcaaacatcagagagcttatcagggattatgatttcatcatcgatggaactgacaatttcccggcaaagttcttaatcaacgatgcatgtgtgcttgagaaaaagccgttttcacatgcaggaatcatccgtttcaagggtcagctcatgacatatgtgccgggagagggaccttgttacagatgtgtattcaagaatccgccaccaaaggatgcagtgcctacatgtaagcaggcaggcgttatcggagctatgggcggagtaatcggttcgcttcaggctatggaggctatcaagtatttaatcggtgttggagagctgctcacaggatatctgcttacatatgatgcactcaccatggagttccacaagattaagcttccaaaggatacacacaactgtgcagtctgtggcgaccatccgaccattctcgagccaatcgactacgagcaggaggtctgcgaggagacagcgggcagatttgatgcacctcgtacacaggaataaaaagacagtaaggaaaggaacgatatgagtatcataagaatgaaatatccgtttctggatgaaatagcaaaatatgctaaagagcatctgccggaggaggcgtgcggtctgatagcaggcagtgaggacgaaaacggtcgtctcatcacaaaggtatattacctgacaaatacagaccatgccgaggaccatttcacaatggatccaaaggagcagctggcagccataaaggacatgagagcaaacggccttaagccgcttggcaactggcattcacacccgtctagcccttcaaggccatcggatgaggacataaagcttgcatatgatccaaatgcgagctacatgataatgtcgcttatggcagaaaatcctgtaatcaactcgtttcatatcgagggtggacaggtcacgaaagaggatttacgaatatattctgatgaatattacttctaaatcatatgttaatgttttgagtcgcagcgaaagctgcaaagaaaagtcagcttcatcgaagatggcttttcttttttagagaaagatgttattatagcatgtatatttaataaaacgaaagagcgttcgaaaatgaaattaaaaacgaaggaacttacaacatgtgcactttttgcggcacttatagcagttggagcatttatcaagattgatattccgcttcctatgtacaccatgcattttacattacagtggttctttgtgctgatggcgggatttctgctgggggcaaagctggcatcgcttagcgtgatagtatatttgtgcatcggactggtgggagtgcctgtatttgcggcaggcggtggtcctacatacattttaagaccgggctttgggttcctcttaggctttgtgcttgcagcatttttaatcggagctatcacagaaaagcttaaaaagaccaatgcgtttacactcattcttccggcaacggtcggactggtggcatattatacagttggagcgatatacttttactgcatgaaaaatttctatgcggcaacacctgtcagctggggcatcgtaatagtggattactgtctgataactgttgcaccggactttatattatgcgtatcggcagcagtgttttctgctaagcttcgtcctgtttttgaaggaatgctcaatggatacagtgtgaagcataaggcaaaaaataaagcataaagcgtataataaagtataaaataaggcatgaaataatgtatgaaataaagtatggatatggtattacagggagataaaaatggcgtattttccgatgtttgtggatatgacggaaagagagtgtctgatcgtcggcggtggaaaagtggcataccgcaaggtgatcgtaatgctggattttggcgcgaaggtcacggttgtggcagaggatatatgtgatgagctgagaaagcttacaattgatgatatagcgagcgaggataaaacgggctcatatacggcaaatatagaaaacaatcagacggactcggatgcagcagatagaattacgttcataaaaagaaagtttgaacgaaaagactgtgatggcatggaaatggttatcgctgccactgatgacaatgctttaaatcatgagattgcagagtattgcaaagctaatgacatcatggtaaatgcggtcgatcagaaggctgattgcagctttatttttccgtcatacataaaggaaaagaatcttgttgcggcattttcgagcggaggaaacagccctgtgctgactcagtatctgaaaggcaaagagcaggaggttcttactccgtttcttggtgagctgaacgaatacatgggacagatccgcgaaaaagtaatagcgcaatatgacactcaagccgagagaatgcgtgtatttaaagaaatcttgtgtgcagctattgataatggaaggattccggaaatatagtttaaagtatggtattacagattttaagttgttgttcatttataaattataaatggaaaatggcatgatccgtaggagagtaaaatgaggtatttaataggaacgagaggctcaaagcttgctcttgttcagactgattacgtgatagataagttaaaaagggcatatccggatgatgattttaaggctgttatcataaagacaacaggcgatttagagcagaaaaaggcactcgataagattggctcaaagggtatcttcgtaaaggagatagaggaagagcttttatcgggaaagattcatatggcagtccattccatgaaggatatgcctgatgaaccggcagcagggcttacatttgcaaaggcatggaagcgtgaagatccaagggatgttttggtgctaaaaaatgccgcttcactggatgagcttcctcatggtgccgtgataggaactggaagcaagcgcagaaagtatcagcttttaaggctgcgtcctgacattaaggtggttggcatacgcggaaatatcgatacaaggcttcgtaagctatatgatggtgaaattatatatgaagagattgccgataatactgtaaataacaatgagatagctaacgaaaaacagaataagtataacgaatacaggctggatggaatcgtacttgcagcggcgggaataaagcgtatcgaaagagattctgagatcacacagtacttttcggaggatgatatgattccggctccggcacagggcacactggcgcttgagctacgtgctgacaatgctaagctgatggcaaagcttgatgctttgtcagatgagaaaaccaatctgtgcgcaggcattgagagagaatttttaaagcggatcggtggaaactgtcatctgcctgtagctgcatactgtgatattgtaagtgaaaaagaccgcggtaatgacagcaaaaaaaataacaggctaaagctccttgcgatgtttggctcagaggatggaaaaaagcttgcaaggacagagcaggtatgggatattacatcagacaaaaacaatattgtggagcgtgcggtgcacgatattcggtataaattagaaatcgactaaaaatatcaagtcataatttttaatcataataattcagtagaaaaataattaggaaaatcatgagagaaaacacaggaaaagtagtattagttggagcaggaccgggagatacgggcctgctcactttaaaaggagaaaaatatataaaacaggcggattgtctggtgtatgacaggctgtcatcaccagagtttctttcaatggcaaaggcaggctgtgagcttatttatgtgggcaaggaaaatcacaagcatgtcatgaagcaggatgccataaacgagcttttgtacgagaaatcaaaatatcatgagcttgtagtccgtttaaagggcggagatccgtatgtctttggaagaggcggagaggaagctctctacctggtagatagaaatgtggaggtagaagtggtaccgggtgtcagttcgtcggttgcagcgcttgcggctgcaggaatacctatcacacacagaggtatagcaaaaggctttcaggtcatcactgcgcacagcagaaaggatgaggaggcagatatagactattcccttcttacagatgagacaatcacctgcgtatttttgatgggtcttgcgcatgtaaaaagcattgtagcagggcttatgaaagcaggacgaagagcggatactccggcagcagtgatatcgaacggcacacttgccgcgcagcgcaaatgtataggaacgcttgcggatatcggagaaaagattgaggaagcaaagctgacatcaccggctataatcgttgtgggagatgtggtttcactgaatgacaggcttgatttctttgaaaaaagactgctgtttggaagaaaaatcacagtaccgtatatcgaaacaaacgaattgatagcaaaattacagcagcttggagcagatgtcacaccggttaagacaggcataataaagccgataataattcctgaatttgccgataaagtaagatcggcagactggatagtttttacaagcaaaaatggtgtaagatcatttttctataatttggatctggcaggggcagacatcagacttatagcaaatgcaaggtttgcagtagttggaaaagctacagaaaaagagcttgcaaagcatcacataaaggcagatattattccggcagaacagaccggaaaaggacttgcaggagaattgagttcgtatatgggcgataatgatgaaatcaaagtctgcattttctcggcaaaggaggcttcacctgacattgaggcagggcttaaagaaatatgtgaattagaaaaaattgatgcatatgtaaatgagcaggcatatgagagtattcctgaaagcattggaaaaatggtaagtgaagcggtttttacaagcgcatcaaatgtggaaagattttttcatatgctgccggagaatgcatacgtggaaacagcatactcaataggtgaaaaaacaacagcagcattagagcagcacaatgtcagagagatagtacaagctgatgatagcagttatgaagcgctggtagataaaatatcttataaagatgcttttaaagattaagaatttatggtgacaaaagttatataaagttatataataaatgcaaagttatataaggttatataaacttatatacgaaacaaaaagttatataaagttatataaggggaaaacaaaatgcaaaatccatttacattatcattcgggaaaaaaccactgcaatatatatcaagaatctcacagaccaatcagatagtagagacatttaggtcagaaaatcctgcaaaccagctttttatgataaccggggtaaggggatcgggcaaaacggttatgatgaccaatatagtatcagagataaagaaggatgaggaatggctgacagttgagcttaaccctacgagagatatgcttcagagccttgcagctaagatttacagtatgcctcagatgaataaaatatttgtcaatgcaaaactggatttttcagcgtttggactgggcgtttccatagaaaatgcagcaccggttacggatatagaaaatgtgctggaattgatgcttgaaaatataaagaaacataataagcggttactcatttcagttgatgaggttatgaactgtgaatttgtaaaagtatttgtcagttcatttcagatatttctgagacaggattatcctatttttctgcttatgacggggctgtttgaaaatatatatgatctgcagaacgacaaggcacttacatttttgtacagggcgcctaagataatgcttgagccacttagctttacagcagtcaggaaacactatatggatatttttgaactggatcaaagagaggcagacaaaatggcagctcttacaaagggatatccttttgcattccaggtattgggatatctttactgggaaaacagggatgatcacacgatagaagatattttaccggaatatgatcagtgccttgatgagtatgtgtacagtaaaatctggtcggagctgtcagagcttgataaaaaaatattgttggaaatatcagtaagtggtgaagaaaaggtaaaagaaatcagagaaaaactggatatgaattcaggattattctcggtatatagagaccggctcaaaagaaagggggttatagatacctctgagtacggtaaaattactctcacacttccacgatttgaagaatttgtcaaaacgcgccaaatgtaatatactatatccatctgaaacattaacataataaaggagaagcacaatgaaagaatacagtataggtacaaagtgtgtacaggcaggctatgcagccggaaacggagagccgagacagattccgattattcagtcaactacattcaaatatgacacaagcgaggacatgggagagctttttgaccttgaggcagagggctatttctacagcagactgcagaatccaacctgtgatacggtagcaagaaaaatcgcagctatggagggtggcactgctgccatgctcacatcatcaggacaggcagccaatttctatgccatgttcaacatatgtgagtgcggagaccatatcgtggcatcatcatccatctatggaggcaccttcaacctcatcgcggtaactatggcaaagatgggtattacagctacattcgtatctcctgatgctacagaggaggagctgaatgcagcattcagaccgaacacaaagcttatgtttggtgagactattgccaatcctgcgcttacggtgcttgatatagagctttttgcaaaggtggcacacgagcacggagtaccgcttatagtggacaataccttcccgacacctgtaaactgcagaccaattgagtggggcgcagatattgtcacacactctaccacaaagtacatggacggacacggagccacactcggcggagcaatcgtagacagcggcaaattcgactggatggcacatgcagataaatatccgggactgtgcacacctgacgacagctatcatggcatcacatatgcagagaaattcggcaaggaaggtgcgttcattaccaaatgtacagcacagcttatgcgcgattttggttctatgcagtcaccacagaatgcatttatgctgaatcttggccttgagtcacttcatgtgcgtatgccaaagcatgtggaaaatggacaggcagtggctgaatttttggaaaatcatccaaaggttgcctatgtaaactactcagggcttccttcaaacaaatactatgagagagcacagaagtatcttccaaacggaggctgcggagtcgtatcatttggcttaaagggcggcagagaggcagcgtctgcatttatgaaggcattaaggcttggagcaatcgagacacatgtggcagatgcgagaacctgctgcttaaatccggcaacaagcacacatcgtcagatgaatgatgagcagcttaaggaagcaggagtgccggcagagcttatcagaataagcttaggtcttgaggacaaggtggatttgattgcagatatctcaaacgcactcgacgctataaaataa

SEQ ID NO: 245 - DNA, 11012 bp, unidentified
  source 1..11012: mol_type = unassigned DNA
atggcagaagaaaatgcaaaatttgaatggaatgcaaagcaatattccaagtttgtgaaagaccgcaccttgccctcaatcgatttggcaaaggcgattgatttgccgggcgcaaaagccgcgcttgatatcggctgcggcataggaaacagcaccgccgtgcttgcaaaggcgtttcccggcgcaagggtgatcggagcggataattcggcggatatgcttgattcggcaaagaaaaatcaccccgatttggaatttataaagcttgacgcgcaaaacgaaatcgaaaatatcgataagcgctttgatattgttttttcaaatgcctgcattcagtggattccgaatcatcacaagcttttgaaagatatgttttcgctgcttaatccgggcggcgtgcttgccgttcaaattccgcagcagggaaagcaccccgtgcatgcaataatgcgctcgcttgccgaaacggaaaaatggcgcgaaaaaattaaaacaaaaaggattttttatattctttccgaggaggaatattttgacgaacttgcccgcttaacggatgatttcagaatgtgggaagtggtttattttcatgcaatgccctcgcacgaaagtattgttgaatggtataagggcacggggcttcgcccgtatctgagccaactcaataaagcgaatcaagccgaatttttaaaggatttttcggtgcttgttaaagaggaatatcccgttcgtgaaaacggcgaaataattttcagatttccgaggctgtttttcacggcgaaaaagaaataatgcacaatatataaaaagctcattcttgcataacggggcgcactccgtaaagaagaacgtggtttaagcttcctgagttttgaccgttgcactattaaaaaaatctgccaatacgcaagtattggcagatttttgttaatgcaccacgaacaaaatcagttcgttttagcagtcgggagccgaatacaacatggtttaaagcaaccgatttccgcgtgaactgtgttaaaatactcgttaatcctgccgccttcactgcaattttaacacagtgttttgccgtttatttgatttattgagcaattattctttacggagtgcgccccccgagaatggacttttgttatttgctttcgtcttttgaaaaaatgccgttgataagtaaatatatcagtctgttgtaaaggctcaaaagatcgcccgccaaatccattgcggcttcatcgtcaccctgtttgatagcatgcactattttaaacatatcgcgcataaacatattatcgtaaacaaatgccaaaatattaagcaattcgttttctgaaatgttgattgattggccgttcatatcaagaatttctttcgatttttgaaaaagtgcgttcttatatttttgtaccaaacgcgaatatttgcccggggtttctttcggcgccgtgtttttgagcgaatggattattatgaaatgatcggggtgatccatccaataatctattcggcgtttgtaatatctgctgaaattttccgtcatcgtttcgcttgaatctattttaaaatcaactatgtttgagcaaaggttgcttacggcgtattcgattgcgctgttgaaaatatcttcctttgatgaatagtggtgtaaagcttccctttgatatatttcccgtgcggcaaagctcatttacggatatatctttgcagccgctcgccgcatattgcgaaatcgcacattccattatgtgcgccgtgcttattttgtttctctctcctgcttcatgttatctgccgcctataattcgttctattctggcataatcaagcgcaaaatggcgctggcttatcattattataagctcgtcgcccgctttaagctcggtgtcgccttttggggttatcggagtttcgtctctttcaaccgaaactatcaggcaatgcttgccccatttgatttgcgaaatcgttttgccgcaaagcgggctgttttgcggaatgataaacgattcaagcaccttttccgccgcttttgattccttaacgccctcgtgcttaacaattctgtcgagcagtgcggcataaaacggagtgttgcccgccatgttcgcaagcgcatatgatatcaagctcacaacaacaagcggcaacaggctgcttgcgttgcccgtgatttcaaataccaggataactccggttatcggcgcgcgcactattgaggcaaaaagccccgccatgccgagcaccacaaattcctgccaaaggctttgatcaagcccgaaaatatttatcgctcccgtgccgtatatcgcgccgagatatgctcccaaaacgcaaaggggataaagcgtgccgccgggtgcgcctgtgccaaagctgaaaatgccgaaaataaatttcgcaatcagcaaaatcgccatcgcgccgattgcggggtgctcgtttatgagcagctcgctcattctgtggccgccgcaaaggatttgcggcatcagcaagccgactgcgccgctgattgcaaagcctgccgccaccttaattgtgtttggaatttttgttatttttgcaactatatctctgaatcctatcataagaatattgcttataacgccaaacaatccgcaaacggcgcccatgattattaaaagccaataccagcgcaggggaatggtaacggaatcgtagctgaaaacagtgtcttgcccaaaaaacagctttgaaacaaaatccgccgtaactgccgccactattcccatgcaaagaattgctttgtcaaaggttttgtaaatttcctcaagcacaaaaacaattccggcaagcggagcgttaaatgccgcggcaagtccggcacccgcgccgcagcttatcattctcagctcggttgttttgtctgcttttgtgatttttgcaacgccctttgccgccattgctccgaattgaatgctggggccctctctgccgagcgcaagcccgctgaatatagatgccgtgctgcccacaagctttgcaataatcactttccaccagcttggggaaagatatcctttgatttcacccgtaacctgcggaatgcccgaaccgcccgaatccggcacggcttttattatcagcgccaccaacgcgccgagtattgccagcgcggcaatccaaataatgcattttacggggctgcccttaacaaaatcaatcaccctgtaaagcaagctttccgcctgtgaaagcaaaaatctgtaaagcacgcacacaagcccggcaaaaacgccgacttccgcccctcttataatcagaaaaaagctttccgccttttcacggcgaagctttcttaatgttgttttttcctgttctttcataaatatgcccgaaaagcctttcgtttttatcgcttcttataataattttaacacacgattttaggattgcaataaaaatcgtttataaatttgcacaaaaaccgccgagcatatataaatgttataatatatatttaataattttataaaaaaatcaaattggcaaaatattttacaaaaattgttgaaatatttttaagaataggttattattataaggcaagggggaatttctatatgaaagctaaaaccggactcgatgtgttcaataaaatattagcggtaattcttgttataagcattattgctttagttgttatatgcggcgtggttaaaaaaggcggcgcttcagcaactcctgctaatgcagacgccacatcaaccgaagatgttgcaactatcgatgaatttgtggccggcacttacggcggcaaagaatttaaaaccgttgaagatgttgtaaattattatgtagaatgctataactacacaaaaaccttgggcgccaactacacttatgaaggcagccccacaacaatgtataagcttgttggctcagagaatattgaagttaagaatcttcttgttgaaggcaagtcaatcagcatgatcgatcagcttatcccgggtattctcagcagcgtattcaccggcggcattaagggccttccgcccagcggcagccttgttcccggcaatgatacggtaaccgatcaaaaaatcgatgtatccaaatctctccttacagcggatgatgttcttgcggcaaatgttaaggataacggcgatggcactatttccatcacaattcagcccaaagccgtaattctttccatgcccgcacaggatgcacagggtcacttcttcaacactctcggcgatatcagctccgttgttagttcaatcagcgtgctctcattctcatccggcacaatcaatgataattttgttgttgattataagggcggttcaggcaccgtaacaattaacacagccaccaacgaaatcactgcaggcgaatatacaatgaatgttcacatcaatgttcagcatgcgaatgtgctttcattcaaagataagagcgcaacagttgatattatttacacaaactctttccctgcaacggatgaatatctcacatctcataactgcgcaaggggttaataaaattcaataattgattaaatcccgcaggatttcctgcgggatttttctttgcataaatttgtcttttttttggattttattttctcaaatgagaaaatatctgctttttcgattaagccgagcggaaaatatattttcgtcacattgacgaaaatgcgttttcttgctcccggttaagcaaaaatataagcactgtatgttaaaaatatcgaaaagaacgacaatttttgcacaatctcgtcaaaccgcttaacaaagcggtttggcggcttttcaaaggctttaaatctgcactaaaaatgatgatttaacgcccctgttttgttatagttgccgaaaatttgttaatttattgacaatcattgaaatctatattattatagagctgtaaaaaaaataaagtctcgtgtattcgaggcaataaaagttattgtgaggtaataattatgtctagaaaagttgttcttgccggtgcttgccgcaccgctatcggcacaatgggcggcacgctcagcagcactcctgctgttgatttgggcgctatcgtaatcaaaaatgctcttgaaagagccggcgttcccgcttccgaagtagagcatgtatatatgggctgcgttattcaggcaggccaaggccaaaatgttgcacgccaggctgctattaaggcaggacttcccatcgaagctccagcagtaacaatcaatgttgtttgcggctccggtcttaactgcgtaaaccttgccgctcagatggttaaatcgggcgaagcagatatcgttgttgcaggcggtatggaaaatatgagcatggctccctatgcactcaagcaggctcgttacggctacagaatgggcaatgctccaatggttgatactatggttaatgatgctctttgggatgctttcaatgattatcacatgggcatcacggctgaaaatgtttgtgaaaaatacggcatcacccgtgaagagcttgatgaatttgcggcgaacagccagcagaaatgcgaaaaagcaagagcagagggcaagttcaaggatgaaatcgttcccgttgaggttaaaaagaaaaaagaaacaatcgtgtttgacaccgatgaaggtcctcgcgcaggcacaaccgcagaaggccttgcaagacttcgccccgcatttaaaaaggacggcattgtaacagcaggtaactcttcgggcattaacgacggtgcagccgcagttatcgttatgagcgaagaaaaagcaaaagagcttggcgttaaacctatggcaacttgggttggcggcgctcttgccggcgttgatcctacaattatgggcatcggtcctgttgcagcaactagaaagcttatgagtaagcttgatctcacggtagatgatatggatcttattgaggctaacgaagctttcgccgctcagtctatcgctgttgcaagagatctcggtcttgatgcttcaaagcttaatgttaacggcggtgcaattgctctcggtcaccctgttggtgcttcgggctgccgtattcttgttactcttcttcatgaaatggaaaagagagatgccaagaaaggccttgcaacactttgcatcggcggcggtatgggctgcgcaacggttgttgaaagagactgattattcgtttaaaacttggagatagcaatggaatttataaattatgaagcagacggcgcagttgccgtattaaccataaacaggccaaaggctcttaacgcgctcaacagcgctgtgcttgatgaaatcaatgaagcacttgatgcaattgattttgacaccgttcgtgctcttatcattacgggtgcaggcgaaaaatcatttgttgcaggtgcggatatcggtgaaatgagcacgcttacaaaggcagagggcgaggctttcggaaaaaaaggaaacgatgtttttcttaaattagaaaatcttccaattccggtaatcgctgcggtaaacggttttgctctcggcggcggctgtgaaatttcaatggcgtgcgacatcagaatttgctccgaaaatgctgttttcggccagcctgaggtcggcctcggaatcacacccggtttcggcggcacacagcgccttgcaagaacagtcggcgtgggaatggcaaagcagcttatttacacggcaaggaatatcaaggctccggaggctcttcgcatcggccttgtaaatgccgtttatcctatagaagagcttatgccggcagctaagaaaatggcttcaattattgcggcaaatgctccaatagccgttcgcaattgcaaaaaagcaattaaccaaggcttacaaacggatatttcaagcgcagttgaaattgaagaaaagcttttcggcgattgctttgaaacagaagatcaaaaatacggtatggcgtttttccttgatcgcaataaagataaggttaaaaagccttttatcaataaataattattcaggaggaattgaatatgaaagtcggaattataggcgcaggcacaatgggctccggtattgctcaggcttttgcgcaggttgaaggttatgaagttgcactttgcgatattaacaatgaatttgccgcaaacggcaaaaacaaaatcgcaaagggctttgaaaaaagaattgcaaagggcaaaatggatcaggcggcagccgatgccattcttgccaaaatcacaacaggcaccaaagaaatttgcacggattgcgatcttatcgtagaagctgctcttgaggttatggatgttaaaaagcaaacctttaaagagcttcaggatatcgttaagcccgattgcatgtttgcaacaaacacatcatctctttcaatcacggaaatcggtgccggccttgacagaccgcttatcggcatgcatttctttaatcccgctcccgttatgaagcttattgaggttatcgcaggtgcaaacactcccgcagatatggttgctaaaatcaaggaaattgccgtagcaatcggcaaaactcccgttgaggttaatgaggctcccggctttgttgtaaacagaattcttattcctcttatcaacgagggtatcaccgtttatgaaatgggcattgcaagcgttgaggatatagacactgcaatgaagctcggcgcaaatcatcccatgggtccgcttgaactcggcgactatgttggccttgatattgtgcttgcaattatggaaacaatttattccgaaacaggcgatcccaaatatcgccccgcaactcttcttaagaagatggttcgcgcaggtaagcttggccgcaaaaccggcgtgggcttctatgactatcgcaaataataactgaaatcacggcggcgtgcattttttgtgcacgccgctgcggcggtagatttgaaaaagtttatcgctcggcaaggttattttcgctgcattgcagcatataattgcgccaagcccgcagcgcaactttgaaaatttatcgtacaggcgggcagaaaggctaaggaaatcaatatggattttactttcggcaaagaacatgaaatggcaagaaagctttttgctgattttactgaaaatgaagtaaaaccgcttgctgttgaaacagatgaaaccgaacaattcccaagagaaaccgtaactaaaatgcaaaagctcggcttcctcggaattcccgttccaaaggaatacggcggccagggctgtgatcccctcacttatgttatgtgcgttgaagagcttgcaaaggcttgtgccaccaccagtgttatcgtttccgcacacacctcgctttgctgcgacccgattcttacttacggcacggaagagcaaaagcaaaaattcttaaagccgcttgcttcgggcgagctgctcggcgcattcgctcttacggagccgggcgccggcactgatgctcagggcgcgcaaacaaaggctgtgcttgatggcgatgaatgggtgctcaacggctctaaatgctttatcacaaacggtaaagaagcagatatttatatcgttattgcagtaaccgatgttgttgaagataaaagaggcagaaagaaaaaacttttctccgcatttatcgttcccaaaaccgcacccggcttccttttcggcacaaaagaaaagaaaatgggtattcgcggctcttccacttatgagcttattttccaggattgcagaattcccaaggataatattcttggccccagaggcaagggtttcggaatcgcaatgcacactcttgacggcggccgcataggcattgccgctcaggctctcggcattgcagagggtgctcttgaccgcacagttgcttatgttaaggaaagaaagcagtttggcagatcaatcggcgctttccaaaacactcaattccagcttgcagatatggcagctcaggttgaggctgcaaaaatgcttgtttataaggctgcaatggcaaaggcaactcaaaagaattattcctttgaagctgcagaagctaagcttttcgctgcagaaaccgctatgaatgtaaccacaaaggctgttcagctcttcggcggctacggctatatccgtgaatatgaagtagagcgcatgatgcgtgacgctaagataacagaaatttacgagggcacttccgaggttcagcgtatggttatcagcggcaatttgctgaagtaaggaggagcagaatatgaaaatagtagtttgtataaagcaggttccggatacaaaaggcggagttcagtttaatccggacggcactttaaacagagcggcaatgctcacaattatgaatcctgatgataaagcaggccttgaggccgctctcagaattaaagatgaattcggtgcagaggtaacggctcttactatgggtcttcccaaggcagaggaggttttgcgcgaggctatggctatgggcgcagacaacggcattcttgtaacagacagagttctcggcggtgcggatacttgggcaacctcaagcacaattgcaggcgcacttcgcaatatagattatgatattatcatcacaggccgccaggcaatagacggcgataccgctcaggtcggtcctcagattgcagagcatctcggaattccggttatctcctatgcggaggatattaaggttgacggcgacagcgttgttgttaagcgccagtttgacgacagatatcatatgcttaaggctaaaatgcccgtgcttatcacagctctttcagagcttaatgatccccgctatatgactcccggcggcatttttgacgcctataaaaaagatatcaccgtttggggcagagcagatcttaaagatgttgatgattccgatatcggcctttccggctcacccacaaaaatcgcaaaggcttccgataaggtaagaaagggcgcaggcgaaaaggttgcgcttgatactcctcaggaatccgcagattatattatcgcaaagcttgaagaaaagcatatcatctaaggagggctgaataatgattacagaaaatatagaacagtataagggtgttttcatttacgctcagcaggtggataacgaaatcagccccatcgcttttgaattgcttggcaaggcaaaggatcttgccgcaaagcttgaaacagaggtaacggctgtgcttatcggctacaaggttgcaaatcttgccgatgagcttgcaaaatacggcgcagataaggttattgttattgataatcccgtgcttgaaacttacagaacagagccttatactcaggcccttgcagcagctatcaatgaatataagccggagataatgcttgttggtgcaacggctatcggccgtgatctcggcccccgtgtttcggcaagagtcggcacaggcttaacggcagactgcacagtgcttgaaattggcgattttccgcttaatcctcttccgaataaagagcaaaagcacaatcagcttcttatgactcgcccggcattcggcggcaacacaatcgcaacaattgcttgcccggacaaccgcccgcaaatggcaaccgttcgccccggcgttatgcaaaagattgctcccgttgaaaacgcaaaggctcaggttattgagtttaatcctcagcttgaagaaaacaattgttatgttgaaattcttgaagttgttaaatccgttgaaaccgttgttgatattcagcaggcaaagattcttgtttcaggcggccgcggcgttggcagcaaagaaaacttcaagcttcttgaagatcttgcagatgccctcggcggcacggtttcatgctcaagggcagttgttgataacggttggcttcccaaagatcttcaggttggccaaacgggtaaaacggttcgcccgaatgtttatttcgcaatcggcatcagcggtgcaattcagcacaccgcaggtatggaggaatccgatatcatcattgcaataaacaaggatgaaagcgctcctatttttgatgttgccgattacggcatcgtcggcgatttaaataaaatcgttccccttatcacagaagctgttaaggcaagaaaagcggcaaaataa

SEQ ID NO: 246 - DNA, 24471 bp, unidentified
  source 1..24471: mol_type = unassigned DNA
aagataagcggcaagaagctccgattcgccgtttgaatcaaaatccatttggcgcacatacgaaagccccgtgagctgatattgattttcctcttcaagcggcatggttttgcaaacgccgtaggcggaaatcaatttggagcacacctcgccggcatcctgcctgaatttttgctgtgccttgttgctgccgcgcaaatcggaatagaaaaacacgcccgtaaacaccacagctgccgcaagcaatatgccgaccgcagcgcgaaagccgattaaaaggcgggcgttttttatttgaggaagcgaaaagcttttaactttaacattgattttgccctttgaaagctttttaatcgccgcaactgctgaaacggcggcattttgaagcgccgcttcggcttttttctttgcaaggaggcgcgcttctttttttgcgcggcgtttatcaagatattccgcgtcgtcatcaaaataattatatttcaacagcgctcctcctttcgtgttttcggcaatatgccgattttaaaaatatttcgccgctgcaaatgaagtgccggcaaaatacagctttgttcaactaaagacctatccgattaaatcggatttttgccgacggaataaaacaaattttgcaccagtggcaaacgccgccgtgatttgcttatatatatgccccgaaaatgggcaacacaaccgccgcggcgaaaaaataaaaatcaatttaatttatttgatatacctgatatcgtttccctccagcgtaagagtcatataaacgccggcgatgcggcttgtgattctttgattataatctctttccaaatcatcatagctgaaatttgtgcttataatggttggttttttctttaatatgcgtgtgttgataatattataaaggcaggcaacggaaaactgatttttaaattccgtgcccaaatcgtctattataagcaaatccgctgcaagcacttcacgctctgtataatcaagattttcatatctgccgaagctttcgttttgcaaatcggaaagaatgttttgcgccgtgccgtaaacaacggaatatcccctgtttataaccacatttgcaatggcaaggctgaggtgcgttttgccaagccccgtgccgcccataaacaaaatgctggcggaatgcggaatgaagccctgcgcatatctgcggcaggattcaagaattttttgcgctttttcacggggcgaaacgccgttttccatggcctgtgcaggataatattccgtgttaaagctgttaaacgtgcaatcatcaacgggagcaaagcggcgcaaattatcacgctcgatttctttaagaagctcgcggtggcaattgcacattctgtcgttcacaaaaccggaatcgttgcacgcggggcaggtgtatttgattgagagcgcatcctcgccaaatccgttttccctgagcagcttgcgtttttccgcctgaagtgccaacgattgctctttcagccgagccaccttttcgcgcgggttttcatcacgaaacagcagagtggaaatattatagccgattcttgaaagcttcatttgaatatccgcaagctgcggtattttttcaattgccgcatttgtgcgctcctgctgctccataagggcattatcgcgcctgtgctgcaaaatatttatcgctttttgatacacttttttgctgtaagccattgtttttctccgttaatctcaatatttagcctttatttcggtgttgtttagtgcgtttttcttgattttttccaaatcataggtgggcttgcggctgatttcgcccgattttgcctttgcgccgcggttctctttttgcttttgataattttcactgtctgcctgcgcctgctccacggtggttatgcccgcttttttccagcgcaaaagcatggtgttcatatatttcagattgggcttgtctatcgcctcgcgcatttcggaggcggcgtgcagaatcaattcgtcggaatgatttttacgccattccattatcatatccatctgcttttccgtgggtgatttgctcgcaaatccgcccgcttccctgattttgtgccaaaaggtgcccgcattttcggcttcgcaaaggcgcgcctccgcatctgccacggtggttatgccctgctcaagccaattttttgcaattgcataaagatatgccgagccgattcttctgcctgcttccttggcccccttgcaatatgctatcagcataagcaccacctccggcagcatgccgtaaaacgaaaccaaattaaccgtcatttccatttcgcagtggctgagcgtgtggccgaacgccacctgcgcctcgttgagcagatttgcgatttcggggctttccgagcctattttatcaatctccgcgggtgttaaaacgggcggagaaattttaaattcgctttttgccgcctgcttttgcgctttttcggcaatttgttcatttttcaaggcccgatttccggcaggcgcaggattttcagccaatggcgaaacggaattttgcgccggttccgtttgcacggcttcgcggattgcttcgccgcttaccttgccggagttttgcaccaaaatgccctcggcaacccaaaaatccataatgttttcggcgtccgctcccgtaattccgagctttttcgcaatttcggcagaagaagccgcaccgcctttgcccagcaggaaaagcagcgcctttaattgatattcgcttgcaagctttaaatatttatcggcaattgcctgcggcacgaaaaacatgccgccgctccaaacactgtcgacgggtaaaatttgataattcataatatcgcctgaaatgtataaatcctaatttgtatattaacacattataattttatcaaaaaggcggcgcaatgtaaatagaaataattgcatattttttcaatttcggtgttgacaaatgacttttgattatgtataatttccttacggtttaagaaaacacatgcggatttagctcatccggtagagcgccaccttgccaaggtggaggtagcgagttcgagtctcgtaatccgctccatgaaaaagaagaagcacttcggtgcttcttttttgcgcttattaggattgcgaggctcgaaaaggccgttgcaaagcaaagaaacagccgggggctgtttcggcggccgcgtgcgtgtcggcgagcgcgaaagcgagccgagcgagtctcgtaatccgctccacaataaaaaggaacggcaacgccgttcctttttaatttcaacctgttttcattttcggctgttttaatttcaggccgtattatttcatatccttatatggcttctttttcgttacccagccgggcttattcacctgctttgcgcgggcaattgaaagtgcgttttccggcacctcatccgttatggtgctgcctgcggcggtgaaagcataatcgccgatttcaacgggagccacaagatttgaattgcagccgatgaaggcatgattgccgattttgcagcggtgtttgtttttgccgtcataattaacggttactgttccgcagccgaaattaacatttttgccaacatcggaatcgccgatatatgtgagatgtgcgctcttggtgccgtcgcccacaacagagtttttaacctccacaaaattgccgatatgaacacccttgccaaccttgctgcctgcacggattttaacaaacggtccgcaatcggtgccgtcctcaacctcactgtcaagcagctgaacattgttgagcacaacattgttgcccaccatgccgtttttgatatatgtgtttgggccgataacgcaatcactgccgatttttgtgttgcccaaaataattgtgtttggcaaaatctgtgtgttgcagccgatttcaacctctttgcctatcataacgccgtctgtgcacggaatatcaacgccgtttatcatatggcgattgtttatgttgcggcgcataatattatttaagccgttaagctgcaatctgtcgttagcgccgagaattgcctctttatcctcgcaaacatatgcgccggcatttttgcccgccgccaaaaggattgcaaggctgtctgttaaataatattcattttgtgcgttttcgtttgtaattctgtccagagcataaagcaaatcggcgccgtaaaaccaatatgtgcctgcatttgattcacggattttcttttcttcctcatttgcatccttatgctcaacaatgcaaagaagcttgccgttttcatctcttttaatatggccgatgccctctgtgtcgtctgcaattgcggaaacaagggtgatggaattttcgttgcttttgtgataatcataagccgcatttattgttggctcatccatcaaggggccgtctccgtttaaaataagaatatcatcatccttatgctcctcaacaaaagctcttgccgtcataacagcatggcctgtgccgagctgcggattttgataagccgttttaatttgggcgggcaaatattcttccacaatttcatgcttatagccggtaacaacgcagatatcctcgcagcctgcctccctaaccgcatctataacatatttaagcataggctcaaaaagcacttcgcacataaccttgggaagctccgatttcattcgggtgccttttccgcctgccaatataatcgcacatttcattataaaaacctctctttatttcataaaaattccataaaataagctgttacttacattcattatgcaacaaattttgttttttttcaatacaaacttgccttggcggctgtttttgtaaaaaatatttgtaatttgcggtgatatatggtataattctatcgcgttatactatataagtataaataatttgcaaattattattaggaggtaatccccaatggcaaagaaatattgctatctcttctctgaaggcaatgccaacatgagagagcttctcggcggtaagggcgctaaccttgccgagatgacaaatatcggtcttcccgttcctcagggcttcaccatcacaacagaagcctgcactcagtattatgaggacggccgtgagatcaatgatgaaatcatggcagaaatcaatgaatacatcgttaagatggaagaaatcaccggcaaaaagttcggcgataaagaaaatccgcttcttgtttccgttcgttccggcgcgcgtgcatccatgcccggcatgatggacacaatccttaacctcggtcttaacgaagacgttgttaacgttattgcagaaaaatccaacaaccccagatgggcttgggactgctacagaagattcattcagatgtattccgacgttgttatggaagtcggcaagaaatactttgagcagcttattgacgcaatgaaggataagaaaggcgttaagcaggacgttgaacttactgcagacgaccttaaagagcttgcttctcagtttaaggctgaatacaaagaaaaaatcggcgaggatttcccgaccgatcccaaagagcagcttatgggcgctatcaaagccgttttccgttcttgggacaacccccgtgcaaacgtttatcgccgtgataatgatatcccgtattcatggggtactgcagtaaacgtacagagcatggcattcggcaacatgggcgatgattgcggcacaggcgttgcattcacccgtgaccccgctaccggcgcaaagggactctttggtgaattccttacaaacgcacagggcgaggacgttgttgcaggcgttcgtactcctatgaaaatagctgaaatggagcagaagttccccgaagcatttgctgaatttactcaggtttgcaaaactcttgaagatcactacagagatatgcaggatatggaatttaccgttgagcacggcaagctttacatgcttcaaacccgtaacggtaagagaacagctcaggctgctcttcagattgcttgtgaccttgttgacgaaggcatgagaactcccgaagaagctgttgagatgatcgatccccgtaaccttgacacacttcttcacccgcagtttgacgctaaagcacttaaggctgccactcctatgggcaagggcctcggcgcttctcccggcgcagcttgcggcaaaatcgttttcactgccgatgacgctgttgaatgggcagctcgcggtgaaaaggttgttcttgttcgtcttgaaacatctcccgaagacatcaccggcatgaaggctgctcagggtatccttacagttcgcggcggtatgacttctcacgctgccgttgttgctcgcggcatgggcacttgctgcgtttccggctgcggcgatatcaacatggacgaagaaaacaagaaattcactcttgcaggcaaggaattccacgagggtgacgaaatttctatcgacggctcaacaggtaatatttacgacggtattatccccacggttgatgcttccatcgcaggcacattcggcagaatcatgggctgggctgatgaattcagaacccttaaggttcgcacaaatgcagacaccccggcagacgctaaaaaagctcgtgagcttggcgcagagggtatcggcctttgccgcacagagcatatgttctttgaagagaccagaattgctgctttccgtgaaatgatctgcgcagacacagttgaagaaagagaagctgctcttgataagattcttccctatcagcagggcgactttgaaaagctttatgaggcacttgaaggctgccccgtaacaatccgcttccttgatcctccgcttcatgagtttgttcccacagaagaggaagacattgaaaagcttgctgcagctcagggcaaatccgttgaagacatcaaagctatcatcgcttctcttcacgaattcaacccgatgatgggtcaccgcggtcttcgtcttgcagttacatatcccgaaattgcaaagatgcaaacaaaggctgttatccgcgcagctatcaatgttcaaaaggctcatccggattggacagtagctcccgaaatcatgattccgctttcttgcgatgttaaggagcttaaatatgttaaggatgttgttgttgcaacagctgatgctgaaattgcagctgcaggcatcgatatgaaatatgaagttggcacaatgatcgaaattccgcgtgctgctcttactgcagacaagattgcagagcaggctgaattcttctgcttcggcacaaacgatcttacccaaatgacctacggcttcagccgtgacgatgcaggcaagttccttgatgcttactatgatgcaaagatcttcgagaacgatccgtttgctaagcttgacacagaaggcgttggccagcttatgaagatggctgttgaaaagggcaaggcaacaagaccttctcttcactgcggcatctgcggcgagcacggcggcgatcccagctctgttgaattctgcaacgagattggcctcgactatgtttcctgctcacctttccgtgttccgattgcacgccttgctgctgcacaggctgctatcaaggctaagaaagcgtaagcttgctttggtgctaaaaccgaataaataaaatcagaccttgcagagtaaaatctgcaaggtcttttttttacacattattttcgctttgccgggcaaggcgaattttcaggcggattttgcaatgcacaaaatccgctttttataattcacgcaaaagaaaaatcagcttttaaatgttttgcaaaaatccttttttgtggttagcacaagaattgtttcgcccgaatgaaacgttgttgccggcgaaatggttatatcgagcctgccgttttcctttttgccgagtatgtttatattatgcttgcggcgcacatcaagatcgcctatggttttgccgatccaagaataaggcacttcaacctcataaacggcaaaatcgccgccaagctccatataatcaagcacatgctccgtgctgcatttaaccgctgcccaatccgccgtttgcttttcgggataaacaatttgatctgctccgtttctgagcagaaactttgcatgaacatcatttgaagctcttgcaacaaccatttttgcaccgagttcctttaaaagcgaggttgtttccagcgaatcctgaaaatcatcgccgattgttacgaagcacacatcaaaatccgaaacgccgagcgtttcaagaaaatcataagaagatgcatcgcctatttgagcgcttgcggcatagggcaaaaccgaatccacacgctcctctttggtatccaccgccataatttcatggccgagatcataaagctttcttgcaagatgcatgccgaattggcctgcgcctaccaataaaatagatttcattgttttatcctctttaaaaaatataatcaatgcaaaaatgctgccgccggcaccgaaaagcaaggcattccgtgcgcagcagacaagcgattaccgattgcctgcaacggcttatgcggcaaaatccaaaagccgccgtgccgctctgatttctgcacatttgggtttcttttaaccgcttagccaaccgcaaccttttcaagcggatactttgaacgctttttttgaattccggacgctgcggcaaaaatcaaggttaggccgccgactctgccgaaatacattaagcttatcaaaacaacctttgaaaccgtgcaaagctccggagttataccgagcgaaaggccaaccgtgccgattgccgatgctgtttcaaacattgcgggcataataggcacatcctcaagctggcaaataataatgctgccaagcataaacaatgcaacatacattgaaagcacggcggatgcgctgcgaaccacatctgccgaaaggcggcggtgaaacgcctctggatcctctctttttttaaacacggaaaaggcagagcttataagcacggccaccgtggttgttttcataccgcctgccgttgagccgggtgatgcgccgataagcataagcacaattataatcattttgcttacatcgctcatcatatttaaatcaattgtgttgaagccggccgttctgggagttaccgcctgaaacaaagaggccataattctgccgccctcgctcatccaatcccagcgaacacggtgaaattcataaatatagaaatagagagcgggcaaaataatcaaaattgccgtcattaaaagagctattttgctttgcaaacggtattttttaaatttaaaaccgtttcggcgcatatcatcccaggtgatgaagcctatgccgccgaaaacgataagaaacattatcacaaaattaacaacggggttattataataatgagtgagcgagcaataaggctgctccactccgtttaaatcaatgccggcattgcaaaatgcggaaatggcgtgaaacacggaataccaaattgccttcagccagccataatgctgcttaaacaccggcagcaggcaaagcgcccctgccgcctctgtgcacgcggttacgcaaataatatactttgtaagcttaatggtatcgccgaacacaggcgcagaaattgcatcctgcatggtatatttttgcattatgctgaaacggcggcgtgaaatcaaaccaagcataatagttaccgtcataacccccatgccgcctatttgaattaaaatcagtataataatttgcccaaagagcgaccaatatgtgcccgtgtctcttgttatcagcccggttacgcacaccgaggtggtggaggtgaacagagcatctatataaggaacggaatcgccgctttttgtggcaaaaggaaggctcagcaaaaagctgccgagcaaaataacaccggcaaagcccaaaataatggtttgaaaagtgttgagcttaaatttgcgccgttttgcattattcgtttccaatttatactccttttgatttatatttgcaaatattttgcagaaattcaagggcaccgccgcaaagcggcatcggcgttttcgggcgtgcccgcattcaagcgaaagagatttattttaaaaacaacttagcatattcctcatattcttttttgttataaaaataatcggatgatttgcctgcaacgccaagctgctgccaccattcatcacgcagctttgcaaaaagctttgtgtaagtgggctctgcaattgtgcgcaaattccaaaggctgaaatgaagcgcataatttatgtagtctttttcaacttcttcaaaaatgccgtctttttgcaaccttgctttaagtgcgcaaagggcattataaaagcaatcccaagatttttcccttgtgttggaaagcgacgatttattgttgcggcgctgatgagcaagcggcttgcccttttcaacataagcaatgcggcccgcctcggcaactgcggagaaaacaaaaagcatatcgttgcttgtgcgctgctcctgaaaccacaaatcacgggaaagcacccattcgcggttataaagcttatcccaagcccagccaacgaaaaccttgaatatattatccgtcatcgaccttctgccaaagggctgatagggcggaagctcctgatagcgaacaacccaagaaacgggcttaaactgatttgaatcttcaaaatactgatccgagccgaaaacaacaaaatccgccttcgtttcctctgccttttcatatgccttttcaagcatatccggctcaaagaaatcatccgaatcaagaaaagaaagatatttgccctttgcatggcgcaagccgttgtttcttgccgcgcctgcgccgccgttttgctgcttaataacaacaaatcttgaatccgctgccgcaaattcctctgcaattttgcaggaggaatccgtggagccgtcgtccacgcaaataatttcaatatcctttaaagtttgcttttgcacgctttcaagattttggcgcaaatatttttcaacattataaacgggaattataacggaaactttaatatcagccattcttcttatagccctttctcttttgatttatttttctgtaaatctttttggcaaggcgcttgaacctgacggggatatacataatcattctgccgattcgataagatttgctgcgcttaatcttatcaagctctgccttaacctctttgatattgttgttgaaattggtgctgccgttattcatgggcagcgcctttattttataatacatttccggctgatttataagcatatgcaaattatcacgctctgccggggtgaaaagctcttcatccatttcgccgagctcgcgcgcgcgcttcatttcctttgaaaagcgaataacataatcatgcttaaattcatttgctatgcggcgaagagttgcaacgctgttgtgaaatcttttaagagtataatatgttttaaaggtttcccaggtttcgggatactgaataagaatatcacgaatgtgatcgtattcaacatttatgcaatagattttttgcatatttttaacagagctgttaggattatctctgcggttcatataatagggcttatcgattatcatgcccctttctgcaaaggcaaaggtttgaaaccaaaatccgttatcctgaaaagatgcgcccggagtttcgttgtggcggatattgaatttatcaagaaacgcctttttataaatgccgctccaggtgttcataataaagcgaattgcctccggagtttggcttgggttaaacactttgttgtaatactgattttttctgtctaaatgattatattcgcaaaacatatcgccgtttgaagcgcgctggaagcgataaaaatctgccttaacccaatcaagatcgtttttggaggcgatatcataaagatcgccgaacatattaacgggcacaaaatcatcaggctcaacaatgccgatatattcgccggttgccaagccgaagccgatgttcatgccgatgccgtagccgccgttttctttatccacaagcttaatgcgcgaatccttttcggcatagcttttaaggattgcaagcgagccgtcggtagacccgtcgttaatgcagataatctctatatcctcaagcgtttgatgagtgatgctttccatgcactccttcaaataaggctccacattaaaagtgggcacgattattgaaacctttgccatatttaaattaacatccttccgttaaaattcctcggaaacggcttgaagcgcagcctcaataaccttatccatatcataatatttatatttgccgagcctgccgccgaaaataacattcttttcctgcgaggcaagctgctcgtatttttgataaagagcattgttttcatcattgtttatggggtaataaggctctatgcccacgctccattccgatgaaaattcttttgaaacaaccgtgccctttgcatcgcacttttcaaaatgcctgtgctcgataacgcgggtgtagggcacttctctttcagtgtagttaacaacggcattgccctggtaattatcaacatccggcatatattccgtttcaaaacgaacggtgcgatactgcaaagcgccgtatttatagccgaaatattcatcgatattgccggtgtaaacaacccttatatcggaaatatcgtgcgctgccttgtaatcctcaaacgaggtggaggtgagcacatcgattccctcaagcattttttctatgatttttgtgtagccgccgatgggaattccctgccagcgatcgttgaaataattgttatcataagtgtagcgaacgggaagccttttgataataaaggccggcagctcggtgcagcttctgccccattgcttttccgtgtagcccttaatcagcttttcataaacatccttgccgataagcgaaagcgcctgctcctcaagatttttcggctcggtgatattatattccgccttttgcttttcgattattgcctgtgcctcggcgggagttttgatgccccacatttttgaaaatgtgttcatattaaacggcaggttataaagctcgtccttataaacggcaacgggcgaattgatatagttgttaaattcggcgaattgatttatataatcccacactgctctgttacttgtgtggaaaatatgcgcaccgtatttatgcacattgattccgtgcacattttcgcaataaatattgccggcaatgtgatcgcgcctttcgataacaaggcattccttgcctcttttttttgcttcataggcaaaaaccgcgccgaaaaggccgctgcccactataagataatcgtattttttgctcatattgaactctccttcggcaggcgcaaagccctgccatgcaaaagaatttatttgcaccgattgccgagcagagcccggcaaagcgattttttatttaaaatgaagcagcttttttcccttatcgtaaaggctgctgtttgcaggcagcaagcctgctatttttcttgcaaagcgaattttaaaactgcgctccgccctgcttttataataaagtctgcccgctttttcttttctgtatttaaacatcaaaaattcgggaagcgagccgcttttgattgcttcaaaatcctcataatcgggtttgaaataaaaataatcggggtctttgatatcggcaaagccgaaatattcaatgccctcgtttttgattttatcgtaaacgatttgcatggcttcgccgtttgtttgcagcataaccgcgcgaatcaagcccgaaagcagctttgaatgaaagctttgcagcgcttttcccgccatgcccatggtaagcagcttatcataagcggctttatatgcctcatacgcgcaaagcggatcttttgaagccttgcccgttatgctttgggcattgtttgtgcggtaatttataagcggctttgggcagcaaacgattttttttgccgcatatgtggaagtgagaacgaaataggtgtcgttcgcatggcgaagcggctgaaattcaaagccgttttcgcgaataaaatcagctctgaaaaggcgctgccacggcacattggaggcaaagttgaaaatatattcgggattgctttttgccgaaaattccttttccctcggcagaaagcgcttttttaaaaaggtttcgtcaaccgcgcgcctgcccgtttcgccgtccacggaataagccccgcaaacgcaaatatcggcatttgatttttcgcacgcggaaaacatgatttcaagcgcattcggctcaaaaaaatcatcactgtcccaaaacgcaaaatacttgccgcaagcagccttcatgccgttgttgcgggcaacgcccgcataaagattttgctgatgcagcagcttgacgcgtgaatcgctttttgcaaaagcctccaaaattcggggagaggaatcggttgagccgtcgtccacgcaaataagctcaatctccctcaggctttggtttaaaacgcttgatatgcatttttcaagatatttttccgaattatacacgggcataattacggaaaccttcacttcattcataaattttaccctgttttacaaaagcatatggtggctccattattcttttattatatattataatatatgcactgtcaatgacggaaaaatataataaatattaagtttatgcaaaaaaacaaagtgctttggtcattctgcgcggcgggaatcgcgaaagcagccgctttttttgcagaaaaaatgcggctgcaacaagcaaccgcaccgttttaatatttaatttaaagattaacgccgtctgccgttttaacaaagcgaacggcaaaatcatccttatactgcggataaaccttaagatattcctctttcaaaaaggcttcgatttgctcttttttggcagggtcaaccaaggcaacggaggagccgttaaagcccgcgccgctgaatctgccgccgtaaatgccatcgcatttcagcataatttcataaagggttttcagctctgccgagccggtttcccaattataaatcgaggaatggccggattcaaacataattctgccgaattccgtgatatcgccgttttcccaagcctttgcgccgcgctgaacccttgaaaattcgccgtaaaaatgctctgcccttctgcgccaagcgggcgggattttgcccttaaattcatcaaaaacctctttcggcacatcgcgcatatatgaatccttgaagctgccgtaaggaattccggcaaaagcgcgcagagcgaaggaagcggctttggcctcatccaccctggaattaaacgccgtgtttgcaagctttctttccttgcccgaaaagataacggcaaattcatatggcggcattttttcgcttgtgggaatcagcttataggaatcatcaagcgtgtctaaataaagcagatggtctttttttgaataaacctcgcagctttgatccattttgcccacattcatttcaagataatcatgctcggcataaagtgccaaatcaataagctccgcgcggttgattttaatatcgtttgccttgcagattgcgcatatgtaggaaatcaaaaccgccgcagaggacgataatccgccaacgggcaaactgccgtatattatgccgatcattcctttttcaaccctgtgcttgcgtttcaccgaaacgaatgctgcttttgcaaaatcgccccaattatagcttctttgcgccagctcaaaggcggaaaattccgccgcgccctcaaaattaaggctgtaaagcttaacggagccgtcttccgtgggcaaaaaatcaagctgcacaccctcgttgattgcaaagccggaaatcagtccgtgctgataatccgaatgcgcgccgaccggggcaattcgataagggcaataaaccgaaagcggagtttccgcggtgttgaacttttttttgaattctgctgatatatccatctttttcaccgtttttcggcagccgcggcgtatgctgttgagccgcccgcgaaagctgccgtgttatcaataatgttgtaaaacgatttaattatttgttgctcggaacaagcttttccgtgccgcccatataaggctgaagcgccttggggatattaacggagccgtccgcattaagattgttttcaaggaaagcgataagcattctcggcggagccacaaccgtgttgttaagagtgtgggcaagatatgtgccgttttcacccttaacgcgaattttcaggcggcgcgcctgagcatccgaaagatttgagcaggagccaacctcgaaatactttttctggcggggagaccaagcctcaacatcaacggatttaaccttaagatccgccaaatcgcccgagcagcattcaagcgtgcgaacgggcacatcaaggcttctgaaaagatcaaccgtgttttgccaaagcttatcaaaccacatttttgattcctcaggcttgcaaacaactatcatttcctgcttttcaaactgatgaattctgtaaacgcctctttcctcaatgccgtgtgcgcccttttccttgcggaagcagggtgaataggaggtgagcgttttgggaagctcgctttcgggagtgattgtgtctataaacttgcctatcatggaatgctccgaggtgccgataagataaagatcctcaccctcgattttatacatcatggcgtccatttccgcaaagctcataacgccgttaacaactgcagaacgaatcatataaggcggaatgcaataggtgaagcctctgtttatcataaaatcacgggcatatgcaagcaccgccgaatgaagtcttgcaatatcgcccataagataataaaatccgtttcccgcaaccttgcctgcggcgtcaagatcaatgccgttaaagctttccataatctgcgtgtgataaggaatttcaaaatcgggcacaaccggatcgccgaatttttcgcgctcaacattttcgctgtcgtccttaccgatcggcacgctctcatcaatcatgttaggaataatcatcatgattttggtaaccttttcggtaagctcggtttccttctttgaaagcccgtcaagctcgtccgcctgcgccttcacctgctcgcgaagtgccatgccctcttcctttttgccctgcgccataagatttccgatttccttggaaagcttgtttctgtttgcgcgaagctcgtcggcgcgcttttgaacatctcttctttcgccgtcaagcacgataacctcatcaacaagcggcaccttttcatcctgaaatttctttctgatattttctttaaccgcttcgggattttccctcacaaatttaatatcaagcataatttattctcctaacttatttgctatatcctttaattcctcggcagaatagaactctatttcaatagtgcccttgcccctgccggtgtaaaccttaaccttgcggccgagtgcttccgtaagcgaaagctcaacctcgtcataaaagctgtcgcggcgcttgctgcgcttttgaacaggtgcggacggctccttgatttttgcaagcctttcaacatcccttacggtgagtttgtttgaaacaatgtttttggcaacctcaaaaatcatcgcctcgttatcaaacgcaagcagcgcacgcgcatggcccgcggaaatttctccgtttttcgtcatatcgcgcacttcgggcggcaacttgagcagcctgaggctgtttgcgattgccgggcgtgatttgccgacgcttgccgcaacctcctcttgcgtgaagccgcatttatcgatgagtgcctgcaaaccctctgcctcttcaatggggtttaaatcctcgcgctgaagattttcgataatcgcgatttccatagtttccgtgtccgtaagttctttaataacaacgggcacatcttttacgcctgccatgcggcttgcgcgccaacggcgttcaccggcaacaagctgatatccgcctgcgggcagcggcctgacgagcagcggctgcaaaacgccgtgctgctttatgctttcggcaagctctgcgagcgaattctcatcaaaggtttttcgcggctgatccttattcggcattatttcgttgagcggcaatgtgtttgagctcaccatttcatcggtggcgttttcaagcataagcgcgcccaagcccttgccgagcccggatggcttttttgccataagttttcctcctattcatcctctttcacgctttcggtgtatctgcatttcggataattcgagcagccccaaaaagcgccgtattttgaatttctgcgaacaagctttgcgttgcaacgcgggcaaagcggttcgtttcggttatcatttgtttctgttaaattgtttttctccgctttttcggcggaagcttcacctatttcggctttttgagtgctttcttcgccgattatttcgactttttgcggcgttttattttctttcaaacccgttttgccgcgattttttgcataatgctgcctttgctcttcaaggcgaattctgtatttttcagtgaaatcggtttcaacgggcattgaatggttgaaataatcctccgctcttgcgcgtgtgtctttcagattttgcgcaagctcggtgctttccgagtggattttcttaatcgtttccaccaaagcgtctgccctgataacgcggtttcttatttcgcgcggcgcaaagcgatcgtttaaaacggttttgttatttgccagcactataagtgatttattccaagactcaaagctcttattgatgatatactgcgccatctttcccttgccgcacatcaccaaatccttcataacctgcatatggcgctgattttgagaaacgggcgattcgatcccttcacggattttgcgcccgttaacctgataactgcgcacaaaattgcccttgttatcaatagttatatcgccgtaaagatttttacattctattataaaattgattttcggtgtaacaattaaaaaatctatctgcgctgataaatcgccgactttaaaataaacatcgcgaagcacaaacatatccattccggcatatttcagctgaaaaagtatttcttcctcgccctttaagccgcgctcaaggatatatatttgattttcaagttcttttttcaattctccgtgcgcctcaaggcacatttctttcatttcagccagggtttcatcggcagaggagtcctctttaagaatcaccacttccggctttttaaagaatcccataaatcacctgttgctttttatgatttcatcggctaattttttatatgcaaatgaagccttgcaatatttttcataataaataacgggttttccgaagctcggtgcttccgccagcttaacagagcgcggaatcatcgttttatacgctttattcgggaaatatttgtttacttcctcgataacctgctgatttaatttcaagcggctgtcgtacatagtgtaaataacaccctcaagctccaaatgctcgttataaagctgcttaaccgtgcgcacggtgctgagcaattggctcaagccctcaagcgcataatattcgcattgaagcggaacgattaaagtgtctgaagccgcaagcgcattaaggcttaaaagccccaagctcggcgggcagtctattataatatagtcaaaatcaagcgcaaggggagagattgcttttttaagggcgtaaaatctgtcctcctgatcggcaagctcaagctctgcgcctgccaaattcatatttgcgggcaataaaaacaggtttttaaactcggtttctatcataatggcccttgccggcactttgttgattaaaatatcataggttgaatattcaatctctgccttgtctgcaccgacgccgcttgtgctgttgccctgagggtcaacatccaccagcaaaactgatttgccttttgcgccgagtgatgcggcaaggtttacgcaggtggttgtttttccgactccgcctttttggttaaatatagatatcgttttgcccatatgtgcctcctgcgttatgtgttaattgcgctgtattgcgcacagttctgcgctttacagcaaattcattatactacacgcgcgccgcacattcaatatgtttcacatgaaacactcggactttttttcaaaaattgtgcaatgcgggcaagcctatactatatatagaagtttcacgtgaaacacaaaaatatcagccttaaatttaaatctgcagagaagaatatcgcgatagaaatgttattgttcctataaagaaagttaaagaaacatattaagcaaaacgcattacaaaaagcttgattgcaactgaatatttcagcggaagggcaaaagcagttcggctcactcgcatttttgcccggtgcatgcagcaacaaaatttaatccgccgctgcatatagccgccgcgcataaaaaatctcagataaacggtaagatgttacagcaccgatataaacaaacatgtatgtttatatcgacttttcaacattttaaacacagttttcaacaaaatcacacataaaccggttgattttcaacatgtttatgtgaaaatcaatatcttgtgctttgtttcacatgaaacacaagaacggggaacatttcaaaaaacgaccttgaccatgctccctcacttttttaactgcgtgccaaaagtcacaacataataagaaataatatatcacaagccatctgccatgcctatatataataggtatagaaaaagcgcggcacctaattgttatcggtgtcgcgcaatgttaaaaacaatattaaataggtaaataataaatcgcttaaaatccgttttcggaaattgtgccatcatacgcagaacagcccaccggttaaggcaggctgttccacgtgatgaaaagaggagaatatgttaaaacggcataagccgttttaagcagtttcactctccgccgcctttttcggctgctgcggagatttgggaatacgaacatgaaattcaatataatcgtccgtttccgttttgtttgattcggccggaataccggcttccttcattgtgtttattgctttatttactgtgtttacgaatattcgcacatcgcgaaatatcgtaaccaccttttttcttgatttaacttgcttgtttgttacggaatctatatacgcttccgtttgctgcacgtttaagccgcgctctttaataacattaagcgccgtccaaatctgcttttcggattgaagccttaaaagcgctcttgcatggcgctcggtcaagccctctttttcaatgaaatatcgcacatcggcgggcaatcgaagcaggcgcagcttgtttgaaagggcgctttggcttttgccgagcctttttgcgatttcctcttgcgttaggccgaaatggttttgcatttggtttatcgcctgagcctcttcaaaaaagcttaaatccgagcgctgaatattctcgagtatggaataaaccgccgattcctcgtaatcgcaatcaacaatcaagcagggcaccgtggcaaggtttgccaaaattgccgcgcgcagtcggcgttcgcccgcaatgatttcataataatcactgttgttgatttgccttgcaagcagcggctgcaaaattccgttttcttttatcgattccgccaggcttaaaagctcttcgcttttaaattgctttcgcggctgatagggattgggcagcaatttttccgttgctattctttgaacttcctccgccatgaggcacactccttatgaatctcctcggcgggctcatcattccctttccaatggtaaatataccataaatcaataaaaaatggaagtgttttttagccttaatattcaacttttttcggcaacttcaatttatttacaacggctttgtgcttattttttttgattttctggggtactttgacgaagtttgcgatatctttttaattataattaaatttcttgtgtcgtcgttcgggagtttcagtaaaacaacctgttcaatattgcctccgagcgttttaattgcgtttgtgccaagctcggcttcgtcctgcgcgcccttcattgcaatgaaatatccgcccggcttcacaaacggcaggcagtattccgccaagatattaagcggcgcaacagcacggctgacggcaaggtcaaacctttccctgtattgcttttggtgcgaaagctcctcggcccttgcgtgcacgatatcgcccaaaagcccgcagttgctgagcgcgtctttaataaaggtcagcttcttgcccacggaatcaagaaaggtgatatttaaatctgggcgcttaattataatcggcagcccgggaaagcccgcgccgcaacccacatcgataaccgaagcgccttcgggcaaatttgcgtagggaataagagtcagcgaatccacaaaatgcttaatcacaatttcattcgggtcggttatcgccgttaaattaacatgctcgttccagcgcaaaagcctttggcacaaatagtcaaatctatccagcgccatatcgtcaagcgaaactccgtatttttcggagtattctttaagcttatccttatttatcatagcaacacgcctttcactgtttatcgcaaacatcggcgtgaggcaatcacgccattgaatctaatattatgtttaacgctgccacatcggcggggttgacgccgcttattctgccggcctgacccaaattttgcggttttattttggaaagcttttccacagcctcaagcctaagccccttaagctgtgaataatcaagattttcgggaattttttttgattctatgcggcgcatttctttaatctgccgctcctgccttgctatgtagccttcgtatttaacggaaatttcaacctgctcaaaaactcttttcggcagccttgggcgagtggtgtctatcgtttttaaatcatcatatgttatctgcggtctgcgcaaaagctctatcagcttgcagccttttttcaagggcgcggtgccctttgcctgaagaatattctgaagttcgtcggaaacaggcacggaggtttcgcgcaccctttctttttccgcctcaatcatatcaagctttgcaagaaaattttggtatctttcgtcgcttataaggccgattttgtgccccgtgggggtaaggcgaatatctgcattgtcctggcgaagcacaagcctgtattcactgcggctcgtcatcattctgtatgggtcggagcagcccttggtaacaagatcatctatcaaagtgcctatgtatgagccgcctctgtctaaaatcatcggctcctcgcctttaattttaagcgccgcgtttattccggcaacaagcccctgcgccgccgcttcctcatatccgcttgagccgttgaactgccccgcgccgtaaaggccgggtaaatcgttaaactcaagagttgcttttaaggcggttgggtcaacacaatcatattcaatcgcatacgccgtgcgcatcacaacggcgtgctccaagcccggaatggtgtggataaattgcagctgcacatcctcgggcagggaagaggaaagcccctgaagatacatttcctccgtttcaagcccgcacggctcaatgaaaagctggtggcgttccttgtctgcaaagcgaactattttatcctcaaagctggggcaatagcgcgggcctttgccctcgattttgccgctgtacataggcgagcggtcaaggttatccaaaataacccttttggtttcctcgtttgtgtaggtgcaatagcagcacaccttgttttgcggaggctcttttgtttcaaagctgaagggcacggtttcatcatcgccctgctgaaccgatgttttggaaaaatcaacgctgcgcctgtttaccctgctcggggtgcctgttttaaaacggcgaagcggaatatcaagcgcataaagcgcttttgataattcgtttgcgggaaacataccgtccggcccgctggcataggaaacatcgccgatgtaaaccttgccgcccaaaaaggtgccggtggcaagaacaacggccttggcggtgaaaatcgcctcaagctttgttttaagctgccaaagcccattttcgcatctgcgcaaatcgattatttccgcctggcgcacatccaaattttcctgcaattcaagcgtgtgcttcatgccttttgaatattcgcgcctgtctatctgcgcgcgcagtgaatgaacggcagggcctttgcccaaattgagcatgcggctttgcagcgaatatttatccgccgccttgcccatttcgccgccgagcgcgtctatttcgcaaacaagatgcccctttgaagtgccccctatggagggattgcagggcatattgcctatccaatcaagatttattgtaaaaactgcggtcttgcacccaagcctggctgccgcaagcccggcttctatgccggcgtgccctgcgccgataaccgcaacatcataactttccgaaaaatattccataatttattttcccacgcaaaatttgctgaaaatgttgtttaccacctcggtggtggcttttttgccggt

SEQ ID NO: 247 - DNA, 7892 bp, unidentified
  source 1..7892: mol_type = unassigned DNA
ttatttaccctcgtatgccgcctgaatctcttttttgaactcttcctcgcccactctctgaagagtaagtctgaaacgctcaccaccatttgcatgcttctcgaagaaactaattgctgcatctgtcactctgaaaagagtttccttgtcgcggataatcggaacaagctgctctcctttatagatgtggtttccgaaaagtcctccaaacgatacgatatatcccggagttcccttccatgcatctgtcggacagctctttacgcagcgcgcacagttgttacatttgtctctgtcgatgacaatcctgccatcctccatgctaagtgcaccctcgcggcatgccttcacacatacaccacactggatacaatcgtcatggctgcactctactgtcatgccgcccttgattccgacatcgttttcctcagcctttaagcagttgttctgacagcctgtgacaccaaacttgaacttgtgaggaagctctcttccgaagtatctttcatcaagttccttagccagagtgtatgtatcgatacatccgctaggacagatttctgagccctgacacgctgtgacagtacgtactctcggtccgcagacacctgttcctacaccgccctttgccagttcctcttttaccacattgatatcctcaaccttgataaaaggaatctcaataccctgacgcgatgtcatatgaacatatccgtgtccgtatttctcagcaacctctgctactgttttgatattttctgctgtaagatttcctcctacaaccgcaattctaagcgagaaacagcccttttgcttctgtctcatgaaaccgcccttttttagggccgcgtaatcaactttctccgccatttttaatctccttactgtgtaaatatgttaatgttttgttttatatgtaaatgcatatgcacgctctcatttgcatacacattgataccttattattatggcttaatcagctatatttgcaaaagcctgtgcaaaatcctccttgaggtcatctatatcctcgatacccacgctgactcttataagatcctcaaatactcctgcatcctccttctgcttatctgtgctgtgaagactgattgtagagcccggatgaatgacaagtgtctttgtatctccgatattgctgagtgtgtatggaatcgtcaggctgtctataaatttaaatgccttttccttgctgccaaccctgattgtaaggattgctccatagccgtttgcgagctgtttttttgctatttcatgccatttgctgctacaaagccccggataattaacctttatgtcaggataattgttttctatccacgacgcaagcccgagtgcattagaacattctctttccattctaagaccgagtgtctcaagtcctataatatttaagtatgcattcaccggagctaaacaggcacccatatttctgaaaaggctgtttctcagctttgcgacaaatgccataggtccatacttcacataatctgcaaaacccggatatctgttcttgtcccatttgaacttacctgagtctgtcagaataccactgattgcattgctgcttccattgatatatttggaagatgaattgaccacgatatcagctccatgctttaaaacctgtatcaggtaagctgtcgatgtggtattgtcaactacaagcggtatatcatgtgcgtgtgctatctctgcaagcttctcaatatctgtgacatccagacatggattaccgatagtctctgcaaaaatcagtctggtatgctcattgatgctgtcctctatctgctgccagttgttgttctcgacatatctggttgtgatgccgaaggcctcaagatcatggaacaaatctattgtgccaccgtagaggctggcgcttgagatgagctcatctccactgcttagtatatttaagaaggtattcatcagtgccgccatgcctgatgcgcatgccaccgatgctattcctccctcgagctttgttattctgttctcaaaagctgtaatcgtaggattggcaactcttgtgtaacagtagcccggagctttgttttcaaatattttttccagatcagccgcgctctcctgctcgaaggcgcttgtctgatataccggtggcagtgtagagccatttgtctcttttgtcacgccggcatgaagtaagcttgtattaaatctcattgttttcttcttctcgttaattcttacatagtctattatgttactaggaattgatgagattattatacaaacgtgttggttgaaagtcaatgctatcagttatacaaattatttgtgcgtggttatatattttatttataaccattaatgtcccttaaatactctgcggctgtcgttgcggcatttgctccgtcagatactgctgttaccacctgacgcagtgtcttggtacggacatctcccgccacatacagtcccggctggacacttctatcatggtcaccattttttgttgcagcatatgtgatgccgtcctcacctgccactacatatcctctctcatcgagctgcaccagattctttataagctctgactgcggtactgagccatatgccacgaatactccgtctacagccagtgtcctgccacttttaagctttatgcctgtcggctttttttctccatatatttctgtcactgtttcgtttaggacaagttctacattttctttctgctttaagagctcaactgtgctctgtgcaccgcggaagctgtctcttctgtgaaccagatagaccttctcacatatatcggacagatataatgcatcatccaaagcggtatctccgccgcccagcactgcggctgtctttcctttatagaatgctccgtcacagattgcgcagtaagatactccctttccggtatactcatcctctcccggcactcctgcctttctcggatatgctcctgcggtatagatgagcgctcttgcctctgctatcgtgtcatcatcgaatttcactctgtatatcgctgattcttctttctcaccgttttgcactgcttctatctgcactgcttctttttcgataaattctacatcaagagacactgcatgctccctgaatttctcgcccaggtcgtatccgtttatatttggaagccccagatagttgttcacatttccgctctcggctatctggcctgtcccctcgtattctttttctgctactgccacattcagattggctctctttgcatatattgctgcagacagtcctgccggaccactgcctattattattatatcatacatggaattggttcctttcagcgtccattgaattttttcggtaacttattatatacattatccttaaaaaatacaataataccgcctgcttttataaaacacctttataaaaacaagcggtatcaattttatctatcgtatatacatcctggcctcataaggtctgagcactgacatatcagaggtatccttataatttgaaatcagcacctccatgccctcacactcctttgcaagcggcattggtatctccttgtcaaagaaattgcacacaacaatcatggttttttcttcattctttctgctgtatgcaaaaatattctcatcatcctcaagtaaaagtgtgaatttaccatcaacaaataccggataatcctttctcagctgaacaagcttcttgtagcagctaaagattgaatcagggtcattcacctgtgatttggcatttattttgtcgtaattgtcatttacctttatccaaggtgttcctgtggtgaagccggcatttgccgagtcatcccactgcataggtgtccttgcattgtcacggccctttgcgtaaatggacttcatgatttcatcctttgagtatcctttttctaggcgctcatggtacatgtttatgatttcacagtccttataatcctcgatatcatactgtacatttgtcatgcccagctcctcgccctgatagatgtatggtgtaccctgcatgccgtgcagcaatatagcaagcatctttgcagattccactctgtactccctgtcattgccccatcttgacacgatacgcggcaggtcatgattgtcccagaacagactgttccagccacagttgtagagctcattctgccagtgagccattatctttttgagctttttaaacggaagcggtgcaaggtcccatttctcgccgccctccttctggtcaagccctatgtgctcaaactggaacaccatagaaaactcgctgccatccggattgctgtaaagctttgcgcgctctgtgtctgcgccccatgcctcacctacagtaatcaggtcgcccttctggaaggtctccctgctcagttccttaaaatattcctgaagccttggtccgtttatggtgattctcttgtccggctcttttgctatctggtcgattacatcaagtctgaagccgccgactcccttgtccatccaccagagaatcatatcgtagattgctcttctgacctttggattctcccagtttaaatccggctgctccggtaaaaactgatggaaataatactgtccgatttccggcacatattcccatgcgcttccaccgaaacaagccttcatatcacttggcggcacgccttcatctccgtctctccaaatatagtagtcatggtatggattgtccttgctctttttagcctccttgaaccacctgtgctcgtttgaagaatgatttaagacaagatccatcataatccttatattgtgcttctttgcctcgtttatgagctcctccatatcatcgagactgccaaacgtcggatcaatatccctgtaatccgaaatgtcataaccgttgtccgcctgcggtgatttaaataccggcgacagccatattgcattgattccaagggtctcaagataatcaagtcttttgatgataccctgtaaatcaccaaagccgtctccgttagaatcctgaaagctctttggataaatctggtaaactaccgcctttttccaccatttttcgttattgtttttgctcattatgccctccttgtctcttcattatctcttttagctgtctctttttgtaaaaattcagcctagtttctttaatgctgtatcaaattatgctattttacaagcaccaccaaaacctcacagctttcaagcttaagctcggatgctcccactgaaacagtgctcttttcagcatcatttgcgttggacaaaagcacctttttcacactgccatccagcctgatttgtgcctctttactgccaaaatttgccacaaccagcacgcgcttattttcatcctctctgtaataagccatgatgccatctgtatcctcatatgccggaacacatctgccgtaggtgaacagctccttaaattcatctgactttctgagtgccacaagccttctgtaatagttcaaaacagatgaagggtccttttcctgcgccgcaacattgatagccttatagttttcattgaccttaagccatggctttgctgtggtaaaaccggcatttgcctcatcactccactgcataggtgtccttgcattatccctgctcatccttccacaggctgcaagtgcctgctcctttgataagcctgctgcaagtgctgccttgtactgatcctttgtgctgatatcgtcatactcatctatactgttccattttgcattttgcataccgatttcctgtccctggtatataaacggaatgcctcgaagcagtacgctgacagttcctaacatctttattccggcaggattttgagcatgctttggtaaaaatcttgaggcacctctcggctcatcatgattttctatgatattggccttaaagccgtacttttctgtctcaagctgtgaaccaagaatggtctttctccatgtgtcaaaatctatttccggtgcatcataccagccatgctctccatcacttaagcactgtgcacaaaaatcaaatatcgttgaaaaatgcccattctcaccgataaactccggcagctcctcaggcttcatattgaatacctcgccaaccgtaaatgcatcatacttcttaaatgtattgttctttaattcctctaagagctctccgacaccttctgcactttcaaccatcttgtagcaggcagccagtccgtcctctgcatccggctcaaaatcagggaaatcgagatttttctttatattgattatcgcatctattctaaatcctgacaagcccttatccagccaccagttaatcatctcataaagcttttgtcttagcttttcattctcccagtttaaatccggctgctccttcgcaaacatgtgcagataatacttgtccgtgcccggcaccttctcccagcagcttccgccaaaataagagcggtaattgctcggcggattgccgtttttaccttttctgaaataaaagtaatcagcatactctccatccggatccttaagtgccttttgaaaccattcgtgcttatccgagcagtgatttattaccagatccatgatgatgtgcatatcacgcttctttgcctcggcaaggagctcatcaaactcctccatagtaccgaactcttcagctatcgcatagtaatcagatatgtcatagccctgatccacaaatggcgatttatatatcggagacagccatatgatgtcaattccaagcgattttaaataatccagctttgaaatgatacctcttaaatctcctattccgtcaccgtttgtatccagaaagctctttggataaatctgatatgccaccttgtcatgccaccattttctctccataatgtgtacctcttatctaatcataaattttgcactcatttacatcttgagcacttcgccttgatgtattatactgctattatagaaagtgtttagtataaattcttgcaatattttttcattttataacacaatactgctcttataattttaaagggtataatttttaaagctatggagaaacaacaatatgaaaaacaataatccgcctgccctcgggcagaaagaaaacgcaaagcacggagaagtatttttccccgttcagaaatatataacaagacttgcagcagattaccctgtcatcactacacactggcacgatgaggcagagctcacactgattacaaagggctcatgcacctatcagattgatttgctcgaatatgaagcaaaggaaggcgatatcatctttatcccgccactgctgctgcattccatttcaataagggactgcgacgaattttactctgaaacgtatgtattccatatcaattttttaggtggaaacaataccgatatatgctcttcaagatatctgactccgctaatcaaccatgagtttgccatgccttacctgattgcaccgaagcatccggcatattcatccctttgcaaatgcttcatgcgcataacaaagctatactccagtcaggaattcggctatgagctggctctaaaggcatttctgcttcaggcaatatttctattgctgcaatacagtgaaaaaaatgctgatttcggtgtcaacacatcctccgataagctcaaaaatgtgctcgattacatcgaggtgcactatgccgaaagcatccaggttgcagagcttgccgggctttgctatttcagtgaataccacttcatgcgtttcttcaaaaaacacatgaacatgacctgcgtgcagtatatcaacaatgtgcgtcttgaaaaatccgtggaacagttcgagcgcggcaacacctcaattttagatgtctcactgtctgtcggatttcacaatctgagctattttcacagggcatttaaaaagaggtatcatagatcggaagagcggttcagc

SEQ ID NO: 248 - DNA, 17365 bp, unidentified
  source 1..17365: mol_type = unassigned DNA
tcctcttgaaaagactgtagacagtgtatagacaatcgccgacttcgcactctctgacatcttttgaagttttcgtttaatatccaccatataaaatgtactccttcaggtcatttcggagattttggattattccttccttcatgccatcttaattcgtcaaacaagtacaaccttgaaatgctggttttatagtaggaaaatatatgtggaaatgaggaaatcaactttcgctttgtctgcaaaaaccatttttctgcaaatttaatagtacatgccgactaagatgcctcagcgctaaactagtctctgcgaaacagatcgcgcgtgtatactttctcctgaacatcgtccaaacagctatcgtagcggttggcaataatggcttgactgcgcttcttgaattccgccagatcattcacgacttcactgccaaagaaggtagaaccattctccagcgtcggctcatagatgatgaccgttgcgccctttgccttgatgcgcttcataacgccctgaatggaagactgacggaagttatcggagttcgacttcatggtcaggcgatatacaccaaccaccacattgtgttccttactgggatcataagcctcgtttgcttcgtatgcgcccgcaatttccagcacacggtcggcaatgtagtctttacgagtacggttggattccacaatggcctcaatcagattctccggaacatcagcatagttggccaacaactgcttggtgtccttgggcaggcagtaaccgccataaccaaagctagggttgttgtagtggctgccaatgcgaggatccaaacagacgccctcgataatctgctgggtgttcagccccttcatctctgcataggtatccaactcgttgaaatagctgacacgcagggccagataggtgttggcaaacaacttaacagcttctgcctccgtgaagcccatgatcagcgtgtcgatgttctccttaatagcaccctcctgcagcaaacccgcaaatgtgttggcggctttcaccagacgggcattgtccacgtcagtgccaacaatgatacggctcgggtacaaattgtcgtacagagctttagactcccgtaggaactccgggctgaaaattatgttgtcgcagtggtacttttcacgcacagaagccgtgaatccgaccggaatcgtggacttgatgaccatgatggcatcaggattatactggatcaccagcttgatgacagcttctactgcagaagtatcaaagaagtttttcttgctgtcatagttggtaggtgctgcaatgacaacaaaatccgcatctttgtaggcggcttcagcatcaagtgtggcagtcagattcagatctttttcggcgagatacttttcaatgtactcgtcccgaatcggagacttcttgtgattgataaggtcaactttttccgggataatatccactgccatgacctcatgatgctgcgatagcagcgtagcaatggacaaaccgacatagccggtaccagcaactgcgattttcatagtcttcccctctcttcttattccatataaaactctttataccactcagcaaacttccgcaggccttcacgcagtggggtatggggcttaaaaccgaagtcacgctccaacggctcagtgtcagcaaaggtcacaggcacgtcaccgggctgcatgggaaccagttccttgtgagcctcaaagtcatagtccgcagggagtacaccggcacgcaccagctcctccgacaggatctgcacaaagtccagcaggttctccgggttggagttgccgatattgtagactgcatagggcggaatgggcaaaccatcctcgccattcttcttttcaggagctttcgccatcacacggacaacgccttccacgatgtcatccacataagtaaagtcccgcttgcagttgccgtagttgaagattttgatagtttcgccgttcaccagcttattggtaaagccaaaatatgccatatccggacgaccagcagggccatagaccgtgaagaaccgcagaccagtagaggggatattgtagagtttggagtaagcatgtgccatcagctcgttggacttcttggtagccgcatacagagaaaccggattgtccaccttgtcatcggtggagtagggcaccttcttgttgctgccgtagacagagctggaagatgcatacaccaaatgctccaccggataatgacggcaggcctccagaatgttgtagaagccaatcatgttgctctcgatgtaggcatccgggtttgtgatggagtagcgaacaccagcctgagcacccagattaaccacaatatccggatggtactgctcaaaaatgctgttgataagtgccttatccgcaaggttacccttgataaaggtgtagttctcgaacttctgaagctccgccagacgagcctccttgatgcggacgtcataataatcgttcatgttgtccagaccaatgaccttggtatccggctcagtggtcaggatacgtttggcaaggttggagccgataaaaccggatgcaccggtaatgaatactgttttacccatttttatcacccttacccttttctccacaccatcttattaacgacatttacataaccctgaatgatgcgaaccaccttcatggacacggtctcgtccacataatcggggcagggcttgcccaggacgcccttcttcttcatttcaatcgccatatcggtggcgttgagcagttcccgggtagtgatgccagctaggatgaaatcaccggcttccagcgcctcagggcgttccgtactggtgcggatgcacacggcggcgatggggtgaccgatggacagatagaagctgctctcctctggcagagtgccggagtcggagacgattgccagagcgttcatttgcagcttgttatagtcgttaaagcccagcggctcgttgacccggacacgagggtccagctggaagccgctcttttccagacggtgcttgctgcgaggatggcaggagtagagaatgggcatatcgtacttttctgccagtgcgttgatagcggtgaacaggctcaggaagttcttttcagagtcgatgttctcctcacggtgagcagacagcagaatgtacttgtccttctccagtcccagacgctccagcacgtcgcttttctggatcttctccagattcatgtgcaggacttccgccatgggagagccggtctggtaggtgcgttccttgggcagtccggtgtccgccagatacttccgggcaaactcggaatagcacatattcacgtcagaaatcacatccacgatgcggcgattagtctcctcaggcaggcactcatccttgcagcggttgccggcctccatgtgaaacagaggaatgtgtagccgcttcgcagagatggcagacaggcaggagttggtatcgcccagcaccagatagccctccggctgcaattcgctgagcagctcatagctacgtcccagaatgttaccgcaggtcacacccagattctcgccaaccacaggcacaagaatgtccgggccatattccccgaaggtgttcttcagttcgaaatcctcccaaaacacggtggaaaggtttctgtcccagttctgattgtagtagaccacgcagcagtcaaagtattcccggcaacgcttgataaccgcagccagtcggataatctccggacgggtaccgcaaccaatcatgaccttggtgcgcccatcatttttccatgtaaaattgtgttccataaaaatctcctaacgtcaaccagcagcttctctcacaccggctcgaagaaggtgtccgggtggttcgggttgaagatttcgttgcaggtcatcactgtcaccagattctctgtttcagacagattgatgatattgtgagtccagccgggaatcatgtggacagcctcgatcttatccccggaaacctcaaactccaccgtttccccggtgttgatattccgttcctgaatcaagccgtgaccggcgaccacaatgaacagctcccacttggagttgtgccagtgctgccccttggtgattccgggacggctgatgttgatgctcacctgcccgcaatcggcggtgtgtaccagctcggtaaaggaaccacggttgtccacgttcatcttaagggcgtacttaaacttgtccgtgggaagataggtcaggtacagggagtacagtttcttagcaaaggagccatctggcatcttgggcatcatgagcgtagtcggctgtgtcttgaactcctgcagcagatccacaatttcccccagcgtaaccttgtgggtcacgggaacgcagcagtagcgaccgtctgctttcagaacagtctccacaccgtcaaattcacagtgctgctccttgccttccagcaggtcaaacattccctctaccaaatcgtcgatgtacagcagttccaactcggtactgcggtcgttgacagtgaagggctcgtcattggcgaccgcccagcagaaggtgctgacggcactattgtacttgggacggctgtgacccatcaggttgacgaagcggtagactgcaacctttgcccccgtctcctgagcatactggaagaacagttcctcgccagcctttttgctgcggccgtactcgctgttgccaaaccgacctgccagcgtggcctgaatggaagaggacaacatgatggttgccttattgttgtgctttttcaggcaattcagcaggtcggatgcaaagccgaaattgcccttcatgaagtcttccgggttttccgggcgattcacaccagccagattgaatacaaagtctgctttccggcagtacccgtccagctcttctggggtggaattcaggtcatactcgtagatttcttcaatattcagcgccgggcgggtcttatttttcccatctcggatgtttttcaggttgttgcacagggcggttcccaccatgcccttggcacctgtgactagaatgttcatcctatcacctctttaatgtactgcggtgcagtccggaatatctgcgccatccggcacagttgcgttattgcagatggtgcagttgctgccgatgcgggtaaagttgcccacagtcgcaccagtgcgaatgacgctgttggtgtaaatcagggcgtagtcccctaccgctgcatcacagtggacttctgttccggcatttaacagaacgccgttaccaacagatgcaccattctggacacaggcattttgtagcaccacgcagccacagcccaactttgcgtacggactaatgtaggcgctgggcgcaacgatattgggaaaagcaaagccaaggactttcgccttctcatacacctgtgcccggaaccgattgttgccgatacccaccaccagcaagccgtactccttccgcagctccggcaaatcagcaagactgccaaccaccggaatgccacagatgtcagtgcccacaggttgcccatcatccacaaaggcacagtcatattggagcatcgcctgctccaccactatgcgcccaaagccgccggcaccaaccagcagcaacttttctttagacattcgggatgcccttcagtgcgttctggacatattcggtggtcaggatcttcttaacagtgccttccacatccagacgggtagtgttatggctggtgtaggactcgtctgccatagtatgtacctcgccgttgacgacaaacttatcgtagttcaggtcacggttatccgcagcaacacggaaataatggcccatatcctggctgcgcagacgctcctcacgggtcatcagagtctcgaacagcttctcgccgtgacgagtgccgatgatgttcgtaccggtatcgccgaacagctgctggacggcctttgccaaatcgccgatggtggaagcatcagacttctggatgaacaaatcaccaggatttgcatgttggaaagcgaacaagaccagatctaccgcctcgtccaggttcattaggaagcgggtcatattggggtcggtaatggtgatgggattgccagccttgatctggtcaatgaacagcggaatgacggaaccacggctgcacatcacgttgccgtaacgggtgcagcagatggtagtgccaccacgctcagcagctacacgggcattggcataaatgacatgctccatcatggccttggagatgcccatagcgttaatggggtaggctgccttgtcggtggacaggcagacgacacgctttacaccggcatcaatggcggcgtgcaggacgttgtccgtgcctatgatgttggtctggacagcctgcatggggaagaactcgcaggaaggaacctgctttaaagcggcagcgtggaagatgtagtcaacgccgggcatagcgtcacggatggactgcggattgcggacgtcaccgatgtaaaacttgaccttcttggcattctccggatgcttggcctgaagctcatggcgcatgtcatcctgctttttttcgtcacgagagaagatacggatttccttcaagtcagagtccaggaagtgcttcagaacggtagaaccaaaagaaccagtaccaccagtgatcataagggttgcattgttaaaatcagacatttttatttcctcctaaaatattgttttagtatctttttatcattttgggtaaattcatattcatcgagtaattctatatactttgaagccatcacccctcatttagagacatcgtagggatatcgaattgcttgaccaagtagaacaatagaatgtagtaaataagtaatccactgtatggttcgacattgatcagcgaaaaaaataaaaccagtaacagaatgcgggaagcaaggttaaatttttttaaatgtaaaataccaatcaagacaacaattgaaaatactattcccgcaattccaatcgctgcaagatgataggtcgttgttgatgtttgtgaatctaccgtccccaagctatttctcaaattaacgtaaatattcgttgcattttggtaacctgcaccaaagataggatagttagaaaaaattttcaaatttatgagcgggctattctgtctactcacaacatttacactctgacctgaaatcttatctattgcaccttgtattcctcccaaccattttgcacttaagtattcattctgacttaatcccaaaaagcagattcctgttccaagacacacaatcatgccctgttttatctttcccatttctcctgaattcctcaaaatcagcaacagtacaactattatcagaagtataattcctgcagaagactgtgtcgtaaaaatagtgaacgtgatcacaataaccctcacgatagaaatcttactttcgtacaggatgtgaagaactaatgccagaattagataggctgcaaaaagacctggctcccaaaaaagtccctgatttcttatgctgtaaatcgtccgatacgcaaatatataattgcctgtatacgactcggttccaataaagcattcatgagaaaatggtatttgtattttggcaacattgactgcaagataaagcactagagatattacgcttataaccagcattacatctccgtatattttttgaaacctattccattcaatctgttccgaaatcgcaaatgctgtaaaaaataacacgatgacagagacaagagaataaatggtttccgaaggaaaattcgccagcatcgaaactgctgccgtaaatatacagaatagcaaaaataaaccactgtgcttaggcaatttcaatccattctggtgcacatacatcaataatgatacacatgcaaatgggagcatcatatacaatgccacactggaactcgttaccatgtggtagtgtccgctacaatacaccaccataaaaattccgtacaggcaccacatattggacacaatctcatccagttttggccgaaggatttttttaggcatgaaatttagctccaatccaattactgattcggatatcagggtcgatacggaaagcttttcgtatcaaagctccgatattccttttggcaaaaaattcaattcgcatattcagtggatagagaattatcttcgatatttttctctcatactccgggtctacacatatctcatccacatattttaattgcaccggaaccgaatgcagcggcacctcacaaaaacgttttgtcatcactttattcaaggatgttccaccgtgagtggagttttcgtcggctccaatgtttcgaatcagattccctgaaggacttataccgtacatgccatttgctcgcaaagagagaatcatctggaagtcccaggatgtcggcactccgcgtcttttgaacgcatttatttccgactctatgcttcgtttttgctgcctaaacagtgctggaacatcatatgttttttgagcaatcttgagatactcgggagtgtacaaattgaattctgcgtcatagtacttcagaaacttctttgaccaagaggcccatccacaaggcaatagatgtgaggtaaacatgtagtcatcttgatttgcattatgatactcgccgaggtagtttgtgccgcaaatccataaaactttctcattttcacgatagtgctcaagcaattgcttgcagtatgaaaagaaagtaatatccggcaaacaatcgtcctctaaaaatatagcttctgcctcacgttcaaatacccatttggctcccaagccaatgtttttataaacgcccctgttttctgctgcgtaatttttaattacctcacacggccaatcgatttcagattcaaccatgttacggcaagctgctgccatttctttttcttgtgcagtccttccctgatccgcaagtatgtacattttcctcggctgtactttacgaatagcttctagcactcgtttagtcgtgtcagttcgcttgaagcagaatagcacgactggaatattaaattgttccatcttaacctctcatttttatcatgaatttaatagaaccgtttcaattgcattgtacagttttatctgattttcacttgcgcaatgatttttctcagccagacaccgtgcgttcttacacatttctgtaaagtcttcatccgacaccaaacgatttacacaacactgtagttcctctttcgcactcgccattagagctactcgattttgtaagaggtactcgaacagcttcatatcctgtggtccataaaacaaaattggtttttccgttgccagatattccgggattttggtggaaatcgaatatttgaaaaagcccttcattttttcactttgaacttctgtatgcacaaggacatctgctttttgatatacttcgttaatatgttcatggggcaccgcttcatggaaagcaacaggaagcatcttaaaattggaatgatataactctatactgtcttttgaggtaaaaatatccagtatacccttcccgtcggtttccttaattgcctcagcaatttcttttaacgctttccatcggtctaggtgtaatccacctgcatagacaaaatgggtgattccagtgggctttgaggccggacccttgaattttgataaatcaaccgtgttcatcagaaccagcgtttctttctggaatttctcatggtaggcctcagccatactagaactaatcgttaccactagcttgcaccgctttatacacgccagcattttcttttttaagctggatttgtacagtgataacagcgggttatcttcccattgaatgtgttctgcccaattgtccatgaagtgcattataactggaatattcagctgcatagacagctgattcaccaaacgcattattgaaacgctggctcccaacgtataaatcacctgcgggtgaaaatccctgatagcatcaatcgtagatttatccaactttaccgagatgctatcaagtgtgcaaactgcgaattgacgaagataggacttgatcttattgttgctactctgctgtgtgctcgcggcttttatattgctgttgattgattgagctactttccctcttgaaaattgaattatatggctaggaggaatacaatagctcttaatcctttgattacattgatccattaccaccggatccgaatacacttcaaaaaggcaatctgcatcccatccgctccatatgctttgcagcgttattccagtcgcattcttcttatacatactttgagcgttcacgatcaacactctaggacacttttccataatgtatctttctccattaagcagtacaaagtgtactttctttatcatacagcctttatattttgtatgtcattttctccattctctttaaacatcaaggcaattttttagcttcacttcttcttattttacccaataagcgcttctatgtttttcgtccactttcggtaatcaaataaatcgcacagttttctctcctttttttctctaggcattacggacgcaaattttgccatcgtttcttcaagtgtttcttcaacaatcataacattattagattttttagaatatatcttgagatcacttatatccgttgctataacatctacacccacagtaaccgcttccgcaaacttcgtcgggaaccccgcattgtttgttcttgttgaatcacgaatgatcaaagagcaatcggcgcccttcagatatgcaatactctgctcatgaggcactctgcctaaaaaggctaccgattctggcacatccgctgccgtgaattgaggattgcttttcaaaaactgctctttattaattcccaccacaaataatttgcagttgccattttctgcaactttggaaaacgcggtaacaatttcaccaattttgtcttttttccccggctgaccagaataaatgaaattaacaccctctccaaggttctctgcctccaccgaccacttttcttcgcagaaatcaaccaacgggggaataacgacaacatttttacatgatttgtagtaattcttcaaataattactgattgctataattccatcaagttttttttgaaccacagtcattctgtaccatgtatcaaatcctttgagtattttaaagggcaaagacgcaccatttgtattgtaccactctgtacaatccgaataaatctttattttatttgccctgcaaaattttctaagccgatcaaatgcaacagcctgataattatagcaaataacaccgtcaaatggtccacacactttcatcagcttttcagccggcttgggatctgttaaatatttcacccagtccgaatttccctggggatacggcactgaatatgtgataaacccctgcacttctgacttggtctttaatacgtcagtctctctgttatctttcgaaactcccatgaaaaccacttcattaccgctgtctcgcaatccttttgcaatggccaaaacacggtgtgcggctgcattcttatctggaagttcaaatccgccgatatatagaattttcttcattacattctctcacttctgttaatcttttctgaataattacgctgtcaggcgggtactctcctttgatgactgtcccccccgatgacagaattatccccgattgttgttccacggaggatcagcgtattggcaccaatccagacattattgccgatgacaactggcgcggtcttgaacctcattgcagccacaccgccttctgcacggtaatcatggtcctgatcgtagatcagaacattgggacccaacatcacattgtcgccgattttaatatgatcgtaggcagtaacaacgcacccattgctcattccaaaattctttccaatttccaattttccacctttgcgaactcggatctttgcaccattatgcattttcaactttttcgcaatgcgcaactcggattttccatctacggtgacttcggtcatcggcgacataatttccggaaaggctgcatgaaaccgtccaccattctcaatcttcagaatagcatacttgattcccccaaacggaacacaaaacagcgccttaatgtattttattcatctttcccctccaacgcctgaatctcttctaaatacgccttcaccacgattttccggtcgaattcccgttccatttttgcacgaccggccagccccatggctttccgctgctctggcgtcatctgcataaaccgttccagcgcatggactagagcttcctcatcctgaatgggaatcaggaatccggtcactccatcttccaccgtttcccgacagcctgcacggtctgtggcgatgataggccgggcgctggccgccccctccagaagcacgttgctcattccctccggatagtaggacggatgtacgatgcagcttgcctgtttcaggaacgggatcatatccttctgctggccatgatagaccacatctccagcttcctgtgcctgcttcaggatctcttcgtaggcagggtcgtcacagcctccacagatatggaacaccgtgttggggtactccgcatggatacgtttggcagcagcgagatacaggtcgattcccttttccttcaaaattcgggatgtaaactggaagtgtactgtctcaccttccggatatgggaacgctggatggctctccaaatctacaccggaccccggcaacaaccggatcttcgcatgcttcggcatcatcttgtgtgcttcaaagaagcgctggttttcgctgttctggaaaaaaatgcagcttgcaccggccacgcccatcttgtaaagccgggtcgtcagtgcctgcaaagggccgggattttccaccggagtaccgaggccggtaatgttggggatgtacttgatttttaacatctgacaggccagccctgcataaacattcggtttgatattgtttcccagcatcacatccggtttgtgcctttttaacgtctgatggtattttcggaagaggacaatatccttaaatgggttctttccttgtcgagcggtctcgatatcgataacaccgcaccccatctgctcgagctcatccttaaactggagtacctgacacattacagacacctcgtgtccttctgcaatcaagcctttcaaaatttcccggcgcagattatagataaaagtagtatcgtttgcagctaaaataattcgcatctttcactcacaccatttgtagtttttccgtttcacaatttgtatcatttaccgacaccagcctgctctcccgtagaagcacaatgctttccttccggaactccgggtcgatttttccgtctacaacgcccttgcggcccagcacgacctgaatgcttttccaaatgactttcaggtcaaatttcaagctaacattctggacatactcgcggtcgtagtaaaccttatcgtatacctccaccgtatcccgaccattgatctgtgcccaaccagtaatgcccggcgttacctgatacaccccgtaccagcggcgcagaaaacgaatctcacgttccgtatataccagtggacgaggaccaatcaggctcatttcaccacgaaccacgtttgccagttgcggcaactcatcaatgctggtgtctcgtagaaaacgtcccagtcgggaaatgtacgtctctggactttccagatcaccagttgccacattcttcggcgcagaactcttcatcgtccggaacttgatgatattaaagcaatgtgcgcctctgcctacccgcttttgtaaaaagaaaattggttcgtccggtgcgctgatcttctgtgcaacgctcaccaccaaaaacaaaggggaaagtacaatcagcgccagcgccgccagaatgcggtcaattacagatctcaccgcaaggtatttcttctgtttccgagtcagatggacatagaactgtccaaaatcaacgtggtaattcaattcttccatgttttcctcacactatcatcctgcttttgcaggttctacattttcttttaaattgagacatgatttttgagatttcggatttctggtttcccagctcatcccgatctcatccagctttgcaatccgttcctctgtcaggacagcgcagcttttttcaggattatggcgggtataccgctgccgtttgacccaattgccaaggttgtatccgttcggcgacacatattctgccgggatattcaggtcgccgtgggcatcaaagtagcgcttcgcttcctgatacccttcgttccactggcggtcattgcggttgccccagtacattccgatacggttcagccgctcgacctgttcgcccgtcagttttcctttcgggtatgcccattgctggcttgcgacccactgtcccagtcgttcaccagccgctgtcacataggagcgcggaatattcaggttgccgttttcctcatagtaggcggcagccagcgcataagccttttcccacttggcatcgaaaatgttccacaccatgctgatctcatcaagctgtgcgatgcgttcttccttcaaacggccattgagcttctgctgccgggtcttgatgatccactgtcccagtgggtagccgtccgggtctacatattttccgggcaccatcaggttcccgtaggtatcgtggtatttcttggcaacctcaaatccgtgctgccatgcaatttccttccggttgccccagaccatcccgatgctgtccagccgcgcaatctgctgctcggtcagatttccttggatttgtccctcgcgcacacggcgctgggtcaccagccacaccccaaggctcagaccatcgggcgtggtatacagtttcgggacgttcaggttgccgtgttccgcatagtagatgctcgcctcagagaagtagtgctcccagccggaagaaaggctcgcctgcagctgttcgaacagtacccggcaatcgtgtacctgttcgatgacctcaaaccgctcggtcacgatcttatcgctctcgccgttggcatacagacgatggactgcttcctgcacctcgctttgcagaccagatatgctggtcaggccttcaaagttgttgacaacatctaggataagtggtgtcgtattatcaccagcagtcagggcgcgaccaatctgctgcttgtaaatgatgggcgaaaccgtaggtcggaacaggatgaccccggaaatgccttccacatggacgccctcgttgagcatatcgatgcagaacagcagcttcagccggttggtcgtatccgtcttgaagtccgcaaacgccttgtcggtattcggatcatccgagtaggcttcgtacaccaccacgtccgggttgaccccggcgaaccactccgacacatgggacgccatctcgtccatgtgctccttgttggcgcagaacacgatgtacttgccagccttattcgtgatatgatgtgcaaagaccctatccagaccatccgcttgttccaaagcgcggcgcagggcgtccagatatttctgattcacatcctgaatgcccggtgcccgcaagttgtccacccgtgcctgatactttgcgagggctttctggtactgataaactgtggtcacatatttcggggcaggcaaaatacccctgacgactgcttcgccaagggtcatgttgctcgcaacacggctatcgaaaagttcttcggccatatcgcggttattatccagatatcggatgtttgttgccgtcagccccagaagctttgcatccgggcataactttaataaagccaccgtgctttcgccccaacattcagcaccggcacggtggaattcatcgagtataatataggcaggcttctgcgctgctatttcgtccagctgcgcctgcgtgcagcacatcagtttggcataggtataaaagtgaacgtttgccaacggaaaatccgggtcgttccttttcaggctctccagctgggtcttaaagatatattcactgggagaaagccagattacgaccttctctgggttgtcctcgatcagcttgaacgcaatgtagctctttccggtgccggtgggatgaacaatggcagccttgccatactggtccatcatccggactgccgcatgatatgctttctcgttgtgctcaaacaggcgcaatgccaccttgttcaccccttcccgcataaaggggtatcctccacagtgataatggaggataccaatctttcgacatcgttgtttgaattcttctcttattttatcatggttatatctgggaatcaatagaaatccttacaaatgcatcccgcctgaccttagaaaaaaactcgcagaagctaaaagttttttgcacattgcccagttctgcataaaaaatccagcaaaaaacgaaggtggacagaataagtggtcagaagggtgtccaagacgcaggaggaaacagaaatggcacgacggggagaaaatatacgcaaacgcaaagatggtcggtgggaaggccgctatatcaaagcgcgcacaccggagaggaaaatccagtggggctacgtctatggcacagtctacgcagaggtcaaacgggtgctgattcagaaaaaagcggaggcagggttctacaacctgaaaagaactgacctgacctttgacgcattggctgaggtatggctgcgttcccagcggaatgccgtaaaagaatccacctatgcgcattactcgtacacgctgcacaaatatcttcttccagttttgagtaaagtgccagttgcatcccttgaggaaagctttctggaacgggctatgcagcagattattgcgccgatagatgccgcacacaagccgctggggagctcctctgcccgggaatgcctctcgatgctgcgccgtatctgcaaatatgccgcgcacttgcgcctgatccgtccgatggagctagaagtagcgctgccaaaagccatcgacaaaatttctgtacccctctccccggcggagcagcagcggctttatcagtatgtacaggagaaccctacgccccgcaaaatcggcttattactagggctggaattgggactgcgtattggcgagatctgcggcttacagtggggcgatttcgacctgaaactcggaacgctgaaaatcaaccggacggtctgccgaatttcctgtgaaaatgggcatacaaaggtggtcatccaaacgcctaaaacccgcacctcccgccgggaaattccaatcccgaagcagctgcttattatgctgaaaaagctgcgcggatgtgtcagcaatgctgcatggtttctgtccggcaacgagtccaagcccaccgaaccccgctgctatcgaaaaagcatcaaatcatatctgaaacaggcaactgtccggcaggtacgtccgcacgcgctgcgccatacctttgcaacgacctgtctgcaggcggggtgcgatgtaa

SEQ ID NO: 249 - DNA, 16335 bp, unidentified
  source 1..16335: mol_type = unassigned DNA
cgccggaagcagtcagaccagcaaccaagctatactcgaacatataggagctgcggcgagtgtccttaccgatgacgatgcgggcaggctcgttgttgccgttacgctcgcgcagggcgttgtagtaccagccgaggaagcggccaaccttgtaggcgtggtcggcagtcagatcaataccagcttcaccacggaagccatcagtcccaaaatattttcccattatagtttttcctcattcaaagagtgaattgacgaatagaaatgtgcctttagccggatagttatccgttgcctgctgctcaccacggagaggtagcacacttaagcagcacagccatgctggtgcatggccgataggttttagttccgtctgattaatggttgttcaatcaaccgaatccgaaccatatcaattatcgtacacacggtataaattgccgccactgaaacgacggcatggattatcacattgcctccttgatatgccccaacattattgcaaacatccacccataaccagcgacgcatagtatcgctattagcatggatacaaagaacgccaaatgttgctgctgcgatagtattaattcccctactatatccaattctcaagttcttgaagaaaaggaacgcactaacaccagtcatcaatgcgaatactttattagaatctgccacgaaaaagtaacagagtcctattccttttccaaccatgcgactaaacatagccagaacaataatgcttacccatgaaagcagcaaagataccccagctatcaaaccagtgacggttacgttgctaaaccattttttgggatacagacgaatatacgacgctatcacatagaggacgctaaaccatgtgacataattgaacactacattcgcttttgcaaaggaaggcaggaaagcataaacgcctatgcaccatgccatcagcaagaggtgttccttctctgtcagtgcatgaatcaacttgtttaggaacggaatcaacagatagaatagcagaaagcaaccggtaaaattatctgctactgtaaaaaacggaaataccattttcatgaatcccttgacggaaaacgcctcatagccggtgaaaaagaaaagacaccagattgtcactgcgtaaaagtacctttctcccagcagcttaaagaatttcttctttgtaatctccgaggtacacataaagtatcccgttatcagcacaaagcaattaatacctgtcttgccgccccagccaaacagcagcagaaagtaatcctgaaaatgcaggctaacttatgtatcaatacagtcaatcaatccagaattcacaacatagtgatgcgccacaatcatcagcatcgaaaggatacgaaaaagttcaatgttagaacttcttccccccccccgaatttattggcctttaccgcaatttcgtccatttccaaacctctcaaaaaatctttcttgtcagcttttctatcacagatgcgctccacatctttcagtgatagattctcgtatccggattcacattgctttctcatgagtaacagattcgtattcttccttcgtcactgttcctgaattcgaataatctatcataccaaatgcgaagccaaatgcatatttcatagctctaataaagaatgggacaaatagcaggcatagcagaatagtaaaaagccttgggaagcctgtaacaagaagaataatattcaatatccctataacagtcatggtcgcatacgtaactgtgttagatacttgtttctcatcaatcttatcgttctttgtttttctttcttcaagcaaccttaccgaatcattaactagtgtttttgttgccgaatccagcgaagtcacagcaaatgcgagcatcgttaatgctgtcaacacataaatagcgagacctcgcgaaaaagaaagtgtatagcccgttgctgctgaaacgatatgccaaataaccgttaactcaatcaatgaaaatgtgccatacttaataacggattttactgaatagccattgctacagtatgctacgaaacgaccacaaaagacagaccacgaaacaactgttgcttcaaaataccaccaatacggattcgtcagccattctttccatggctctgcattcaacataccttgaaaaggaagtatcttgctggcatctaccatactgttatcaaatgtcgtaatcgtggtaaacaacgctattgatgtaatgataaacatccatatattaattctcgaatatcgcaccaatagattattttttattgaaatggtcgccaaaaccacgatcaatccaatcacagcaataattaaagccactcttttaattccttcaaggcttaatggtgctaaaatagcagttgcagccataggaattgacgtactgagtccgataataattgacaaaatattaaggactgtgcttctccgctctttatatgttgccaagctatatataccagctattaacattaacgaggtctgcccaacggtgtaaaacaggtctgcgttccaagttccatatgtgttctgcaattctgaaggaaaagatcccaccagatatacgcctgtaaatgtacaagcaagcatagccatataactaaacttgctttttatcactttatgctgatctggtacccaaatgattctttctccatgtctcgacaaacataacgtaacactagcaattgcgcatataacaaatattcccaaatagacgcacaacataaccgggtagtctgttgcatttccttcaagcccacccattgcatataaatgatcaaccactttatttataaattgcatccagctataccccttactgcatttcctttaatccgctatcgtattcctctaacaattcaccatagttatcatatttgagcagcaagtttttgccgtcttggtctttaatttccaagttactattgattatcctcaatttactgcaaagttcctcacaagactctgaagaaattcttattacacccaatgtcatgtactgctttactgattttccaacctcttttgtaatatcgattttaacaccattcaaagtcgaaattttatctattccttttatctcggagatcactccagaatgggttgcaaataacatatacgctgttgcacagccactataattatatttttccaccggcaaatctgttgtcttatgttcgatgccaagctcgcaatctatcatccaatttattgaatcaaatcctgaaatatccttatacggtatgtttactacttctccgccaaatctatatcccatttccaacagataaaaatgggaatccttgtcacgcatgcattcaacccacgccacgccatttgtcagttttgcttttttgaaaacctctatcaccttatcgttgacttcaaaaatatactgccttaaatgataatttgtcgtcgtgataatcgaatacaaatttgccaactctcccggttgatgatgttctgagctaaaaaagaatagtctgggttcaccgtcagctataatatagtttacagcaaactcagggccctccaacttgcgttccataatcaaatgtggattttttgaaaatgaatgtgctctttctattgcatgttcaacatcggcttcattatagcaataactcattccgcgattagcgctcatatcaacaggcttaatcacaaccggataagttatgttatagttttctttattttgtagatattcttcaatatcataatcttcagccactggagcaccaacgcttttacatagttccttaaacacatatttattagtcgcagctgaccatgcagaatcattctggctatacattggcagtcctaaccttttgcacagaactcttagatttccgccattaaagtcgctagcacctgtaattacggccgccacattattatctctacatcttttttctagtgtatcaaagtcattcgtgcttataagccacgattcgtcagcaattctttttgcaggcgttgtttcataataatcagcaactatgacccaacagcctctattatgcaactcatttataatttcacatgagccataatcgcttcctagcatcaatactttattcatttctacagtacctcttaaatatcatacaagcaacttatagtctctattccgtcttctgtacagattagtttgcaaaaccatatggaatttattttgtttttatcgtcacacaactttataagctttgaccgaccatggaatatttcaatagtagcgactaagcttatttctctttccgcaacatcacacattttaaaacttgcaactatttataacattaggctttctttccaataatgacattgcagatgcggtccacatcttccagagacagatccgcgtacaaaggcagagtcagcacacgcaatgccagatgctgcgcaacaggtgttttttcggtaccggcggtcggataatttcgatagcactcaaagctgttggtcagcggatagaagtattttctggccgtgatgccctgctcctgaagcatttcatagatttcattgcgggtgtacttatacccatcaaacacgaccgggaaatatgcatagttgctttctacattttcctgaattgcactaagtttgataccttccacgccggaaagtcgctcacggtaacgctccacgaccttcttgcgcttagcaatttcctcgtccagatgccgcaaattgcagatgcccatagctgcctgaaattcgttcatcttggcattaccgcctacaaagcaaaccgactcaggaccatggataccaaaattcttctggtcgttcaatagctgaacccagctatcatccttaaagcagactgcaccgccctcgatagtgttgaataccttagtagcatggaagctgaacatagaagcatcgccaaagcaagcagtagacatgcccttatacttcacggcaaaggcatgagctgcatcatagatcaccttcaggccgtatttctttgcaatcgtttcaatagcttccacatcacaaatattgccatatacatgtaccggaacgatcgccactgtgcggtcagtgataagaccttcgatcttcgtcacatccatggtatagtctttatcgttcacatcacagaacaccggaacaagaccattgcgaacaattgcatgagtggtagaagcgaaggtaaacggcgtggtaataacctcaccgccctccggcagattcagggcagcaatagcattttccagagccagatggccattggtataaagagccacatggggcacacccaaatattcctccaactctgcctgcaactgctggtgctttgcccccatatttgttagccaatggctttgccaaatagggcgaatttcttctatgtactcatccagacttggcatagatgaacgcgtcactaagatattatcagacataaactttcactcctcttttatactcatggttttcttaaccatttcagcaattcttttcatatcttcttttccgtatcgttggtcaatcggaataggaagaatatccgctgcgtaatggtattccagactatcagccgggcattccttttcgatatttatttttttgcagagatttggcacagaatcgcaaagaaaatacggcagatataacttccgaatcatcttcgcttcgcaaagatattccagcgctcctcttccgcaattcagggcaatagctttttcgtggagcattgcacctgtataagtatcaagctctatatacccgccaatttctttcatagcttcactccgtcgttaattgaacatcaatatgcttttctatatgggataaaatattttcagcggttgcaacatcaggaaatttcataaagataattccaagacattttgccgcattgtcaaaccgttccacatggtctccgggctttttgtagaaatgtacttcttgaagatatttttttaattcatcactaaatacaatctgcttatatattccattctttgtactgtgtaaattatgcgttgcataacagccctcgggcttttgtactgtagttaaaataggttgtcccattgcggcttggaccgccatttcaactaaatctgcgccaaaaattttccccaataagtctggtatcatatttccgccagctctcggtccaacatcgataggccatactcggttgttcttatcaataaccaattcaacattgaccgagccaaatcgaatttccagcttgtccatcatgctttgtagcgtttgttgaacaagttgtacatcggcttcctccagaatcaacggatagctttttccgacaggaactaatggattcacccgggtatctctatggcaattaagaagcccccatataaccacttttccatttaaaacaaaaatatcgccaccgataagatatggatgttttttctcaatatattcttcaacgatcactcggtgggcacgagaaaatgaaaaagcaaattctaatgcgtcgtttaccttatcccagctatgcagtacggtagctccttttgagccagaagaatctaccggcttgacgatgaccggcaaccgaaatcgagaagtatctgccatcgcatcctcaatagtttgatatcccatagatactggcgcattaaatccattgtcttgcaaaaatgcacgaaaacgatctttattgcagaggatatctaccgcgtaataagggtttgttggcagttttaatttttcacccacataagctgctgtgggtgcagcggggtcagatgcataggccaaaacgccattaactttttccttctgcgctacctcaagtactgcatccttatctgtagtacttacaagatagaacttatctgcgacatactgcccggggttatccgtcaggaaatcgcacagaacagtgtagtaaccgagcctttttgcagtttcaatagctactacttgctgcgcagaaccacctaataaaaggatttttttcatttttatcgcctttactttcttgcaatttttttcaagacagggcgaatcaagcccatcagatattcataggattccagatgcaaggcagccgatgctccaatgtaaattaccgcacccatcggaatctgaatcagtaacgtgacagcatttgacaggtgaagcaggccaacaagattcacgcagcatcccataaagattgctatagcaatgctcggcagaatatccttcaactgatcccaatatcgataattcaaaagtttccgattgggccatgagttgatgatttggcttgtaacactgctgacaagcaagctataagccattgccataacgccaaaccacatagtagaaagcagcaacgtcataccaacaatcttcttcgcaatttcaagcttcaaaaacaaatcgctgcgccccattgctttgattgcattcaggtttgctgtgtggattggatagaacatataagtaatgcagaaaatgcgtaaaaacgggacgcatggtagccatttatccgtcaagaccaaccgaacaatcggctctgcacagaatgccaagcccatcatcaacggagccataatataggtgctggtttttatagcccggcgggtcatggactttactcgactagcgtcatcttgcacgcctgccatcgttggcagaagaacgctgtcaatggacgtattgatattgtttgcaatcacacttgggaacttatcgccttggttgtagtatgccaaatccgcagacgaatacaatttacctataatcaggctgcgaatattcgtgtagatggtatccagcaatgatgaagccagcattttccagccaaaggaaagcagtccttttagtctttcccaagagaacatcttctttggacgccatttaaccgtcagccacaatatcaaggtatcaatggctgtattggatagttgctgggccacaatagcccacacaccaaaacccgcgtaagccaaaccaatgcccagaaacgcagaaaaaatcgttccgcctagcgttgcgtaaaaaaaccgcttgaacagcatattacgcgacacataggattgctgaataccttttacaccagaaattacaatggtcaagctaataacacggattattggagtcagagacaaatcattgtagaagttggcaatcaccgacgccgccataaacatgatggcgtacaaaaccaagcaaaccacaaaattgaaatagaacactgacgagaaatccagatcatcagcatcctttttctgaattagtgcggtacctaagccactatcaacaaacacttgcatgatggtggtaaagaccgtaatcaaagcaatttgaccgtagtcttctggtgcaagaatgcgggcaagtacaatagatacgataaaggttacaagttgggcaccgcagcgttccgcaaagcgccagaggaagttccctattacttttttatttgacatatactaatcgatttttcctttaatctttcgatttattttatttatagcgattttcgcaaccatagaaaggcaatcatcctgtttagtaatcacttcccatgcatggctccacgacgcccctttccgatggtataagcaatcaattacaacctctgcagccattgcggcacgtctttttttcagtgaaacctcgataccatattccttgcggaatgccttttcaagttcttgataagccatccagttttgatacccttttctagctccaatattcctcgatgaccatgaatttcctcctactttgcgtacaaacctatatgcagaatatgtctgaggaagtcgatatatggaaccatgtgccaataaatataaatagatttttatatctccctgaatatctactgcattgaagctctccggatagctctctccctgatttctaaaaatattccgacaaacgagacttgcaagttggctaggaagttctttttcttcaaagtctttcaatgtataacgttcttctttttcgtaatatccaaaagtttttatattctgaatattttcatcttcatcaacaactatatatttatggacacagccgatatcttgcggatgttgctccagccaatcaacctgaaattgcagcttattagaatctatccaataatcatctccctcacagaaagcaatatactttccttttgcacgagaaaactgaaaagcttgcgttacatacacacctttagtcgtttggttttctgtctgtaaaatcggcttaattatattcggatatttttccacataggctctgataatatcaggtgtagaatccgttgatgcgtcatcatgaactagtatttcaaaggaaaaatctgttttttgcatcaaaaaactctctagcgcatgcgcaatatacttttcgtggttataagtattgcaaattatgctaacgcatatattatcctgcatttcggtttcctcttatctatcatcgctatttaaagacattattcatccatatgtcgacttcacaacaccgatcttgtataatttagctccggaaaatccgttgcctgctgctcaccacggagaggtagcatacttgagcagcacagccatgtggctgaacacatggctgctgtggagaatcagtactttctccacaccatcttattaacgacgtttacatagccctgaatgatgcgaaccaccttcatggacacggtctcgtccacgtagtcggggcagggcttacccagaacgcccttctgcttcatctcgattgccatatcggtggcgttgagcagttcccgggtggtaatgccagccaagatgaagtcaccggcttccagagcctccgggcgctcggtggaggtacggatgcacacagcggcgatgggatgaccaatggacagatagaagctgctctcctccggcagcgtgccagaatcggagacgattgccagagcgttcatttgcagcttgttatagtcgttgaagcccagcggctcattgacgcgaacacgaggatccagctggaagccgctcttttccagacggtgcttgctgcggggatggcaggagtacaggatgggcatatcgtacttttctgccagagcgttgatagcggtaaacaggctcaggaagttcttttcggagtcgatgttctcctcccggtgggcggacagtagaatgtacttatccttctctagccccagacgctccagcacatcgcttttctgaattttctccagattcatgtgcagcacctccgccatgggagagccggtctggtaggtgcgctccttgggtaggccagtatctgccagatacttccgggcgaactcggaatagcacatattcacgtcagagatcacatccacgatgcgacggttggtttcctcgggcaggcactcatccttgcagcggttgccagcctccatgtgaaacagggggatgtgtagccgcttcgcagagatggcagacaggcaggagttggtatcgcccagcaccagatagccctccggctgcaattcgctgagcagctcatagctacgtcccagaatgttaccgcaggtcacacccagattctcgccaaccacaggcacaagaatgtccgggccatattccccgaaggtgttcttcagttcgaaatcctcccagaacacggtggaaaggtttctgtcccagttctggttgtagtagaccacgcagcagtcaaaatattcccggcagcgcttgataaccgcagccagtcggatgatttctggacgggtgccgcagccaatcataaccttggtgcgcccgtcatttttccatgtaaaattgtgttccataaaaatctcctattgacaaccagtattttctcttacaccggctcgaagaaggtgtctgggtggttcgggttgaaaatctcgttgcaggtcatcaccgtcaccagattttccgtttcggacagattgatgatgttgtgagtccagccgggaatcatgtggacagcctcgatcttgtctccggaaacctcaaactctaccgtttccccggtgttgatgttacgttcctgaatcaggccgtgacctgccaccacgatgaacagctcccacttggagttgtgccagtgctgccccttggtgatgcccgggcggctgatattgatggacacctgaccgcaatcggcggtatgcaccagttccgtgaaagaaccacggttgtccacgttcatcttcagggcgtacttgaacttgtcggtgggcagataggtcagatacagggaatacagcttcttagcaaaggagccgtccggcattttcggcatcatgagcgtagtcggctgtaccttgaactcctgcagcagatctacgatctcgcccagtgttaccttgtgtgtcacagggacgcagcagtagcgcccgtctgctttcagaaccgtttctacgccatcgaattcacagtgctgctccttgccttccagcagatcaaacataccttctaccagatcgtcaatgtatagcagttccaactcggtgctgcggtcgttgacggtaaagggctcatcgtttgccactgcccagcagaaggtgctgacggcactattgtacttggggcggctgtggcccatcaggttcacaaaacggtagacggcaaccttagccccagtctcctgagcatactggaagaatagttcctcgccagccttcttgctacgtccgtactcgctgttgccgaagcggcctgccagcgtggcttgaatggaagaagacagcatgatggttgccttgttgttgtgctttttcaggcagttcagcagatcagatgcaaagccgaagtttcccttcatgaagtcttccgggttctccgggcgattcacgcctgccagattgaatacgaagtctgctttctggcagtactcgtccagctccgccggggttgagttcagatcgtactcgtagatttccttaatatccagtgccgggcgagtcttgtttttcccatcccgaatgtttttcaggttgttgcacagggcggttcctaccatgcccttggcacctgtgactagaatgttcattctctcacctcttagtgtactgcggtgcagtccggaatatctgcgctatctggcacggttacattgttgcagctggtgcagttgctaccgatgcgagcaaagtcgcccacagtcgaacccgtgcgaatgacgctgttggtgtaaatcagggcgtagtcccctaccgttgcatcacagtggatttccgttccggcattcagcaaaacaccgtttcccacagatgcaccgttctggacacaggcgttttgcagcaccacacaaccacatcccaacttggcgtatggactgatgtaggcactgggggcaacgatattggggaacccatagccaagggcttttgcgttctcatacacctgtgcccgaaacttgttgttgccgatgcccaccaccagcaagccatactctttccgcagctccggcagattagcaaggctgccaagcaccggaataccacagatctcagtgcctacgggttgtccatcgtctacgaaagcacagtcgtattggagcattgcctgttctgcaaccatgcgtccgaagccgcctgcaccaaccagcagcagcttttccttagacattcgggatgcccttcagtgcattctggacatattcagtggtcagaatcttcttcacagtgccctcaacatccagacgctctgtgttgtggctggtgtaggactcgtctgccatggtatgtacctcgcccttgaccacgaacttatcgtagttcaggtcacgattgtcagcggcaacacggaagtaatgacccatatcctggctgcgcagacgctcctcacgggtcatcagggtctcaaacagcttctcgccgtgacgagttccgatgatgttggtgccggtatcgccgaagagctgctggacagccttagccagatcgccgatggtggaagcatcagacttctggatgaacaaatcaccgggatttgcatgttggaaggcgaacaagaccagatccacagcctcgtccagattcatcaggaagcgggtcatgttggggtcagtgatggtgatggggttaccagccttgatctggtcgatgaacagagggataacggaaccacggctgcacataacgttgccgtaacgagtgcagcagatggtagtgccaccacgctcagcagctacacgggcattggcgtagatgacgtgctccatcatagctttggagatgcccatggcgttgatggggtaagccgccttatcggtggacaggcagacaacacgcttgacgccagcgtcgatggcggcgtgcagcacattatcagtgccgatgatgttggtctgaacggcctgcatggggaagaactcgcaggagggaacctgcttcagagcggcagcgtggaagatgtagtcaacaccaggcatagcgtcacggatggactggggattgcggacatcaccgatgtagaacttgactttcttggcagtgtcaggatgcttggcctgaagctcatggcgcatgtcatcctgcttcttttcgtcacgggagaagatacggatctccttcaggtcggaatccaagaagtgcttcagaacggtagagccaaaagaaccagtaccaccagtgatcataagggttgcgttatcaaatgcagacatttttgttttcctcctgttatttcaacaaatagtgtttatacttgaagaacagctttcgtctgttctcttcgactaattctcttcaactcatttttcatgttcaaaaacacatcagcagtttcatgatacacatccatatagattcgatggatctatatatttaatcgttagacttgaagtcgagtcaaatcactaataaaattcagttcattgacttctgagcttattttcaatcctaccaaattatgatatcttttctactactgtgcagttctttagcattgcatgttacactttccaaaacaacttatatggcacaatatccagcgggtctggaattaatgtaaactttatgaaatatacaattgccaggctgtatagaatcatcctaaccatcattcttgatttttggtctaatctcattatgttattgggtatcaaaatcaagatgaaaacttggaagtattgcgccatgcgtgtcaacactgtgcctgcgccaaaaagctgtaagacaattccgacataaatcattcgcatcgccaaaccactatccgaaaaatcagtagccattgcactggagcgtgaatcgtcttctgtcatttcagagtaacttttatgtgtttttttataataaatccaaacatatattgttagcacaacactcatgatgtatatgagcaaatttccacccaacgatgttcttgattcctgtacacttttcagataggtgttaatgaacccatagaattggctcttaagcagtaacaatgccatggaaccgccaatatagaataccgatgatttaacagaaaaatggattttaattataaagtaagcagcaacaaaaatatatgcagacttatgaatttgtgctgcaataataacaatcaaaaagaacttcaagaagtttttgattccaggtttctctgcatatgggatagcatataagcatattgcaacgcctataaccgtcctaacagccgacatgtcaaaagtcaaaaaagtaaagcatatataaaggattacagatgtcgtataatcttgagagtatctcttaataaatctgtaatatgaataatacacaaatccataaacgcagaccatgaatgtttgaaacgatgccttgaagatgtgcgtaaacgccatcatcaaaaactcgtatccccactccatccatgtagtatcgtaattatcccatgtctgatatttcatggaatcatacacacgtttatatcccgcaatatccttacccacacttggagcctttaacgcagttagaagaaacagacacagaatagatattattagaattgcattttttcttttttccaggtttcttatcccacaacaagcaaccggtagaattaaaaccatgccgataagggcaaaatatatatccatttattaacctctaccatcattttctgagtgcattgatttataaagatctatatactcgagaaacctatcttccataatatactctttcgccttgcttctaaacgcctccgagctcagcctcatgttttcacatatttttccaatttcactcatcattttattgacatcatccacaggaacaaccctgccaaccttttcatttaacatctccggacttccacctgtatcaaaagtcacaaccggagttccacacgcaatagcttccatattgactgttggatagttttcctctcttgtcggcattgcaaacacatccgctgcgctataaatctcggcaagttctttttgattttgtgttcgatgaattgaaataatattttgcggcagattcttgtcaatctcatcatctgtaccgacaaggacaatttgatattgctcacctaatttttccgccatttcaacaaaacagtccagtcccttacgatacccccatgcaaaagaaactcccaaaacaatgtgtgtttctgccggtatcccatagcgttctctaaaattgctcggagttggcttaaaaacgtccaaatcgattccgttatttattacttcaattggatactctttcaaatacgattcctttgccagttccgccaaccactttgacggtgttacaattgtcatattcccaatgccggtaaaccattttttcttcagcttccacattcttttcgtattatcgtaaaacgaggcaggatattccttatactgtgggcaattatgacaaccagtcttccacttgtcgcaccttactatagtaaagtacgggcattgcccagtgaatgaccagcaatcatgcaatgtccatactgtcgggacattatgtttttttatatatgaaaagagcatcggtaaattgatatatgaatcgtgcaaattatgaaaatgaatgatatcgggcttaaattcatctatcttcttcaaaagcttatacgtctcgaaccatgcgaagcaaccattaaaacctgtaattcgagcaagagcgacatttactcggcgactattgaatgttccgattcggtaatagccgcaatcctcacccgcatcacgatttgttgtggtgataggcgatgcgcacatcacctcgtgtccctgcgctcttgctacatcggcaatccccatcatgatttttccggtgctacctttcgctccaccattgatctgcacaatacgcatcactcgtactcctcactgattatcactaaagaacttatatcctctacgcctcatgattgcctttgagagattgaacagcggcttcggaag

SEQ ID NO: 250 - DNA, 16161 bp, unidentified
  source 1..16161: mol_type = unassigned DNA
  misc_difference 15071: note = a, c, g, or t
  misc_difference 15072: note = a, c, g, or t
  misc_difference 15073: note = a, c, g, or t
  misc_difference 15074: note = a, c, g, or t
  misc_difference 15075: note = a, c, g, or t
  misc_difference 15076: note = a, c, g, or t
  misc_difference 15077: note = a, c, g, or t
  misc_difference 15078: note = a, c, g, or t
  misc_difference 15079: note = a, c, g, or t
  misc_difference 15080: note = a, c, g, or t
  misc_difference 15081: note = a, c, g, or t
  misc_difference 15082: note = a, c, g, or t
  misc_difference 15083: note = a, c, g, or t
  misc_difference 15084: note = a, c, g, or t
  misc_difference 15085: note = a, c, g, or t
  misc_difference 15086: note = a, c, g, or t
  misc_difference 15087: note = a, c, g, or t
  misc_difference 15088: note = a, c, g, or t
  misc_difference 15089: note = a, c, g, or t
  misc_difference 15090: note = a, c, g, or t
  misc_difference 15091: note = a, c, g, or t
  misc_difference 15092: note = a, c, g, or t
  misc_difference 15093: note = a, c, g, or t
  misc_difference 15094: note = a, c, g, or t
  misc_difference 15095: note = a, c, g, or t
  misc_difference 15096: note = a, c, g, or t
  misc_difference 15097: note = a, c, g, or t
  misc_difference 15098: note = a, c, g, or t
  misc_difference 15099: note = a, c, g, or t
  misc_difference 15100: note = a, c, g, or t
  misc_difference 15101: note = a, c, g, or t
  misc_difference 15102: note = a, c, g, or t
  misc_difference 15103: note = a, c, g, or t
  misc_difference 15104: note = a, c, g, or t
  misc_difference 15105: note = a, c, g, or t
  misc_difference 15106: note = a, c, g, or t
  misc_difference 15107: note = a, c, g, or t
  misc_difference 15108: note = a, c, g, or t
  misc_difference 15109: note = a, c, g, or t
  misc_difference 15110: note = a, c, g, or t
  misc_difference 15111: note = a, c, g, or t
  misc_difference 15112: note = a, c, g, or t
  misc_difference 15113: note = a, c, g, or t
  misc_difference 15114: note = a, c, g, or t
  misc_difference 15115: note = a, c, g, or t
  misc_difference 15116: note = a, c, g, or t
  misc_difference 15117: note = a, c, g, or t
  misc_difference 15118: note = a, c, g, or t
  misc_difference 15119: note = a, c, g, or t
  misc_difference 15120: note = a, c, g, or t
  misc_difference 15121: note = a, c, g, or t
  misc_difference 15122: note = a, c, g, or t
  misc_difference 15123: note = a, c, g, or t
  misc_difference 15124: note = a, c, g, or t
  misc_difference 15125: note = a, c, g, or t
  misc_difference 15126: note = a, c, g, or t
  misc_difference 15127: note = a, c, g, or t
  misc_difference 15128: note = a, c, g, or t
  misc_difference 15129: note = a, c, g, or t
  misc_difference 15130: note = a, c, g, or t
  misc_difference 15131: note = a, c, g, or t
  misc_difference 15132: note = a, c, g, or t
  misc_difference 15133: note = a, c, g, or t
  misc_difference 15134: note = a, c, g, or t
  misc_difference 15135: note = a, c, g, or t
  misc_difference 15136: note = a, c, g, or t
  misc_difference 15137: note = a, c, g, or t
  misc_difference 15138: note = a, c, g, or t
  misc_difference 15139: note = a, c, g, or t
  misc_difference 15140: note = a, c, g, or t
  misc_difference 15141: note = a, c, g, or t
  misc_difference 15142: note = a, c, g, or t
  misc_difference 15143: note = a, c, g, or t
  misc_difference 15144: note = a, c, g, or t
  misc_difference 15145: note = a, c, g, or t
  misc_difference 15146: note = a, c, g, or t
  misc_difference 15147: note = a, c, g, or t
  misc_difference 15148: note = a, c, g, or t
  misc_difference 15149: note = a, c, g, or t
  misc_difference 15150: note = a, c, g, or t
  misc_difference 15151: note = a, c, g, or t
  misc_difference 15152: note = a, c, g, or t
  misc_difference 15153: note = a, c, g, or t
  misc_difference 15154: note = a, c, g, or t
  misc_difference 15155: note = a, c, g, or t
  misc_difference 15156: note = a, c, g, or t
  misc_difference 15157: note = a, c, g, or t
  misc_difference 15158: note = a, c, g, or t
  misc_difference 15159: note = a, c, g, or t
  misc_difference 15160: note = a, c, g, or t
  misc_difference 15161: note = a, c, g, or t
  misc_difference 15162: note = a, c, g, or t
  misc_difference 15163: note = a, c, g, or t
  misc_difference 15164: note = a, c, g, or t
  misc_difference 15165: note = a, c, g, or t
  misc_difference 15166: note = a, c, g, or t
  misc_difference 15167: note = a, c, g, or t
  misc_difference 15168: note = a, c, g, or t
  misc_difference 15169: note = a, c, g, or t
  misc_difference 15170: note = a, c, g, or t
tcccttttaatgtagtgtttcacccggaggcagcaaatgagcatacatctttacaagcacaacgaagatgcatacagagcagtcgagaccatgctggaggaaaagcagatggcagccgtcatccatccgacaggcacgggcaagtcgatgatagcctttaagctcgtggagcaacatccacacaagcactttctatggctatcgccaagtgagtacatctacaagacacagcttgagaacatagacacacagttctcaaacatagaatacatgtcgtacagcagactcatgaagcatgaggacagcatagacaccctgcaccctgattatatcatactcgatgagttccaccgctgtggagccgcagagtggggcaagagtgtgagaaagcttctggaagcatatccgaaggcaaagcgcctggggctctcagcgacaaacatacgctatctggacaaccagcgcaatatggcagaggaactctttgagggcaatatagcctcagagatgacactcggagaagcaatcgtgagggaaatacttccggagcctaaatatgttatagccatgtattcatacaagaaagagctcgaacaactgaaaaaacgaatcgagggcttatcaaacccgggacttgtatcggaaaatgaaaagcttctagagcagctaaagcgtgcactcgagcaggcagacggcctcacagaggtctttgccagacagatgacgaagccggatggcaaatacatagtattctgctcaggcagagagcacatggatgagatgaaggagcaggctaccgactggtttagcaaggtggacaaaaagccacacatatacacagcgtactacaacgaagcatcgaccagcaaagcctttgccgaattcaaaaaggacacaggaagccacttaaagctcctctactgcatagacatgctgaacgagggcatacatgtggacgatgtggacggagtaatactgcttcgccctacagtgtcgccaatcatctatctgcagcagataggcagagccctgtcagcaggaagcaaaaatcagccggtcatatttgacctggtcaataacttcgacagtctctactgcatagattgcctgaaaaacgagatgcaggaagcatttttgctgtatccggacactcactcgccaagagagcactttgacgacagattccgcattatagacgagaccaaggacagcagggaaatattcatgcgcctgcaggagaatctgggaagtgcttgggatacatactatgaggcagcaaagcagtggtatgaggaaaatggcaatctcaagataccaaagagctatgtcactgagtcaggactcacactgggagcatggataaacacccagaggcgtgtgaagtcaggcaatatatccggaaacctcacctgggaaaagatacaaaagctaaacgacataggcatgatatgggatgttacggattcaagctggcaggaggtaattgaagagctgaaatgctaccgcaatacttacggcaatctggacatcaaggccaaatacgtatcgcctacaggcttcaggctcggctcatggatcaataacatgcgcttcaaggtgaaaaagtacggcatagagcaggcactcaccgatgagcagagaaaagcacttgaggagcttggcatgatatgggaccacaacaagcagaagtgggaagagtactacagtgcagcaaaggcctactacaaggagcatggaaacctcgaagtacctgcaaaatacgtcacagcagatggcataccgcttggacggtggctgtcaaaccagaccaatagccactcaatgacagacgagcagctacaacgcctgcagagcataggctacaggtcagaaagcaagaccactatacagtggaacagaaagtttgagcttgcaaaaacatattacgagaaaaacggcaatctggacgtgccggtatcatattccacagacggagtgaagctgggacgctggatatcaaatatcagatgtaaaagaaaaaacccgaaggccagcggcatggtgctcgacacagagcgcatagcaaggcttgacagcatagggatgaactggaaatagggtaatcaggaaatacagggagacacagaaaaaatgtacagaaagaaaggaagaggctggaccaagcatatagactttatgctcttagatgtcctgtgtatgcagatagcattcatagtctcatacatatggcgctttggacctggcaatccatacatagataaagactacaggatactggcagtagcatttctgctcatagatttcttcgtggaaatagtatccgatgccttcaaaaacgtattgaagcgcggctatctcgatgagttcatagctacatgtaagcatgtggcacttgtggaaataataacgaccttcttcctgtttaccacacagatgggcgagatatattcgcgggcgtcatattacattatgattccggtctatgtgctaatagcgtatataggcagggtagtactaaagaaaatcattaaaaaaagaagctttgccacatccaaaaaatcactcttagtcgtagcgccggaaaagctccttcgggagacacttcacggactaaaggaaaagagctttggatatacacagattgtggcagcggcaacagatgcagacttgaagggcgaaacaatatgcgagataccaatcgttacaaaccatgacgggatagtggactacgcctgtgaggaatgggtggatgaggtgcttatcccgccatgcgcagaaagcgaatatcccgatgatatggtggcaagctttatagagatgggtatagcagttcacagaggcatcactaaaaacaaagccatgtcaggcaatttcaatcagatagaaaaaataggtgactacacggtcatcacagcaagtatgaactatgcgagcacgtcacagcttgttgcaaaaagagcaatggatatacttggtggactggttggctgtcttatcacaatgcttgtaaccatatttgttgctccggcaatctatatagcatcaccgggaccgattttcttcgcacaggagcgaatcggcagaaacggaagaaagttcaagatgtacaaattcagaagcatgtacatggatgctgaggagcgaaagaaggagctcatggcacaaaataaggtgagcgatggaatgatgtttaagatggacttcgacccaagaatcataggcaacaagatactgccggatggaacaaagaaaaccggcataggacagtttatcaggaagacatcaatagatgagctgccgcagttttggaacatcctcaaaggagatatgagtctggtaggaacacgaccaccaacactcgacgagtgggagaagtatgaaccacaccacagagccagaatgtcattcaggccgggactgaccggactgtggcaggtgagtggcaggagtaatatcacggactttgaggaagtggtgagattggatacccagtatattggggagtggagtgtgaagggggatataaagattatttggcagactgctgtaggagtattaagaaatgatggagcaatgtaaggaaaagcttagtattgcaatgtttggacaaaaaaggattccttcaagagaaggcggagttgagatagttgttgaggagctttgcacaaggatggttgcccaagggcataatgtgacttgctacaacagaggtggtcatcatgtaagtggttcagagtatgattcaaaacgacttaaagaatataaaggaataaagcttaagacagttccaacaatagaaaagaaaggtcttgcggctgtttcgtcttcattttttgcagcattatgttgtgcttttggcaagtatgacattgttcatattcatgcagaggggccggcattttttgcttggctaccaaaaatgtttggtaaaaaagtaattgttacaatacatggattggactggcaacgtgaaaaatggaaaagtggatttggttcaaagtttattcatcagggagaaaagaatgccgtaaagtatgctgatgaaattattgtacttagtaagggagtacaggattattttgaaaaaacatatggcagaaaaactgtatttattccaaatggtgtaagtaatcatatagaaagagaaccgcagattattaaaaataaattcggattaggtaaagatgaatatattttgttccttggacgattagttccggaaaaaggaatcaaatatttaatagaagcatttaaacaggttgatacagaaaaaaaattggttattgctggtggcagttcggattcaagtgaatttgaaaatgaaatgaaagaacttgctaaagaagataaacggattttatttactggatttgttcaagggcaagagttagaagagttgtatagcaatgcatatgtgtatgtactcccatctgacttagagggaatgcctttaagtttgttggaggcaatgagctacggaaattgttgcctggtatcggatataccggaatgtgttgatgtggttgaagataaagcaattatatttcaaaaatcagatgtaaatagcttatatacaaagctcgttgatatatgttgtaactcgtcaaatgtgcaatcatttaaacgtacagcagaggaatttgtatgtaataaatatagctggaataaaattgtaaaagatacttgctgcttatacagataaaaataaaaaaggttggaaataaaatgtcagaaaaaaaattaaatggaacagtcatagtaacttatagatgtaatgctcgctgtagcatgtgcaatagatataaagcaccttcaaaaccggatgaggaaatcagcattgagactataaaaaaacttcctaagatgtattttacaaacattacagggggcgaacctttcataagaactgatttgaaggatattgtaagagaattatataagaaaagtgatcgaatagttatatctactaatggattttttacagatcgaattgtggatttagcaaaagaatttcctcaaattggtataagaatatctattgaaggacttgaaaaaacaaataatgagattcgtggcttggaaaatggatttcagagaggatatagtacgttaaagaaattacgtgaaatgggaatgaaggatgtaggctttggaatgactgtccaggataaaaatgctccggatcttgtccctttatatgagctttctaatgaaatgggaatggagtttgctacggcgagtctacataatagtttttattttgttgaggcaaaaaatattataaatgatcgtccgatggttgcaaagaattttgaaaatcttgtgaatgaactgttgaagagtaagagtccgaagaaatggtttagggcatattttaatcatggacttattaattatatatatggacagaaaagattattgccatgtgatatgagttttgacacattctttattgatccttatggagatgttatgccatgtaatggaacaaaagataaagaggttatgggaaatctcaataatcaatcatgggatgaattatggaatagtgtggaagccgagaatgtcagaaaaaaagtacgttgttgtgatagagattgttggatgataggctcagtttctccggctatgcacaaatatatttggaaaccggcttggtgggtatttacgcataaagtaaagagtatttttggtggaaagtattctatgtatgaaaataaaatatgcagagaatatcgtgatggtaaagtgacaaaagatgaattggatgaatgtagtacgtgtgataaaaactgcattgtcaataatggcttaagtgaagctagtaaggcacagttggttggaaaaactggtgaagaaatagttgatgctgatattgcactacagatgggagaaaagtcatgataaaagttttaatgacattacctgtaaaaataggatttgatggtatgagtaaacaggtattatcttatggaaaatatatggacaaatctgatgttattattgatttggtttcttgtagaggatttgatcctaaaatgaaatcttatgttgatgaggctaattttcataatatctatagattagaatatagagatacaaatcagataaaatattttttagatctttataaaattatgaaaaaagaaaaatatgatgttattcatgtaaatggacagagtgcgactatgtcagttgagatgctggctgcgaaattagctggttgtaaattgagagttgcacattctcatagttcgagatgtttacataaaaaagctcataatatgctgaaaccattatttaatgctacttataacgatgctattgcctgtagtaaggaggcgggcgattggctttttggagataaaccatattggattttaaataatggaattgacattgataaatataaattttcaacaacaacaagaacagaatttaggaaaaagttaaaattatcagataaagatatagcagtatgccatgttggagcatttgaaccatggaaaaatcataagtttttaatagacgtttttgatgagattaaaaaggaaaattcaggatataaattgttcctgtttggaattaatggaacaacacaagaaagcatattgtctctgattaatgagagaaggcttgaggatacgattagatttatgggaactgcagatgatattaacaattatttacaagctatggatttaatgcttcttccgtcattatatgaaggatttccagtaactgtagttgaatggcaagcaaatggtcttccatgtattgtatccgatacaattacaaaagatgtaaaaattacagatttggtaaaacagttatctatagaggatggaactactatttggaaaaatgaaatacttaagcataataatgaagtagatgttgaaacaagaaagtcatattatataaaggtttctaaggcgggatacaatattaagaataatgtgtcatcgttgaaagaacactacatagaaagattaggtgataattagtggttaatatggtagtagacattattgtgcctgtatataatgtgtcaaaatatttgaacaaatgtattgagagtttactggctcaaacttataaatatatcaaaattatattagtagatgatgggtcaacagatggctcggaaaaaatatgtgataactatgctagaattgatgatcgcattaatgtaattcacaaggaaaatggtggtttggtatctgcgtggactatgggcataaagaattcaaagtcagaatgggtagtgtttgtagatggagatgactgggtggaatataagcatatagagttacttgtaaaagagcagatagaatcatcggcagatattgttgtaacccgaatgaagcaaatcgataaaggaaacgaggagtttattgaattttgtgttccagaaggaagatacattggagaaaaactaaaaacggaattacatccggttatgataaatgcaggtggatttgaaagaaggggtgtaccattttctagatgtagtaaacttattagaaaaagtattataattagaaatcttaaatactcatatgaaaaagctacctatgaagaagattttaatattattgcgccatgtcttatggatgcaaaagcaatatcaatgctaaaagtagagggagcagcgtattgttatagaaaagttgaaagttctatgcttcatggatatgatcgtaatatgtctaattcaatatatcatatatatccaacattgttgaaagcatgtaaatcaaagaatatgggaggatttgtcagacagattcaatttgaatatgtttctgcggttgtcagattgtttttaaacgaaacaaaaaattctgaaggctatataaatatgagtagaattataaaaaaatatttgactgatagattatttcagcaatctcttgaaatagttgatgcgagaatgtatcctgttaagtttcgtataatactatatttcttaaaacattatgacagttttatgagtgaaatcataataaaattgatctgtttgattagaagacaaggaataaatcatgcatagatttcagattaaaattagaactatttttttagagctattgttagtatatccaattataaatataatgggatgtgttttttttcatggagacaatatgacaacactttcattgagttattgttctatattgatactattatatgtgactgatgttaaaaaattatcacgaaaaaatatatatattttaattatatttgcttttatattaattttagagatatatagagatcaaaatatgtttattctatttgtgacttttatttttgctaacataatgctaagtatatattcttctaataaaatcatggtaaaagaatatattgaatattttgtgaaaaaaaagaaccagttttatatagttcagttggtgtttttaataatcctttttttatttgttatgaaaaatggccttacagcgggatggaatacttgggttttacagggaccttacaattatccacatacattggcatatctttttttatttatgatgatgttagacactttttattttatagagtttcgagaaaagtttgtaattctatttatagcagtaagctttgcttgtattattttgacagcagtaagatcagtcttaatagctagcattatagtaattgggtatatattttatagagtgttttcaagaaagcaatttataaaatttattttgtattgttttttattatttgtttgtatatatatagcatataattatggattgtttgatgcgttgcttacaaaaagtaaattggcattgggaaatggatctatatctaatggtagaagtagtattcttattagctcattatatgcgttgaaacagggaaatgaatatgtaaatacaatttgtggagtaggaatgacaaatttattaaaatggaatggaataaatataaatgcaaatattcatgcacataatgattttgctgacgccttagttggttttggattaattggtttaggaatatacgtctataattttgtgaaattctgtaaaaatagttttatatggatgatgggaacagtgggatttttagcgtacgtaaatggactttttgtatatagtgacattattccaattttaatatacgctaagctcttattttcatatagtaaaatacaaaaaaatagaatagggaaaaatttgtaattatgaaaagaattttttatttaagaacatattatcaagtaattgttgcacttcaaatggtaaatactatatgcatagatgatcaagttgtttttttgatttcagatgattcagaaagcacagaaatgcttgttgaatcgttgggaaaattaggaatagtttataaaagtatattagttaaaacaaaaaaacttacttatcaaaaaagtatgatagataagatcaaagattttgttgaagtttgttttttgaaaaaaaatagatatgttatattcttaaaagaagtactaaatgaaaagtttgatgagtttattttttttaattatggagttgatacggttgctttctataatttaatggttagaaataatattaatcttagagtgtcttgcatagaagaaggaattttgtcatataatagtcaatttgataatgatcatgggaaaatagctgaaatttcacattatacaagaaaaatattaaaacgtaagacattaaatgataatttacataatttttattgttattatcctatattatatagaggaaatttagtacctgtacagataccaagaataagtgtggaagctaaaataacaggtatacttcggaatatttttaaaccagataatagcatctatacaaagaagtatattttttttacttcagtttatgattttgaaggtggaaaccctattggggaatatgaacttgtgtgcaaagtggcaaaattagtgggaatagataatttgttagttaaaacgcatccacgtgattcaagaacaatatataaagaccatgggtttaatgtagatgtaaattcatctataccatgggaagcaatacaattatctggtgattttagcgataaagtatttttaacaataaattcaggaagcgtattgtcaggaagtacaatgtcagaaaaaccggttaaaactttttatatgtataaattgtgtgatattaaagagaataagagttgtcaaaaaaatgctcaagatatagaagcattactttgcgaaagttctatgaaagaagtttttagaaacgtaagaattgcagaaaaaattgaggatattttatgagtaaatccagctacttgataaagaacatgggaattttaactataagtaatttctcatctaagattttagtttttttattagttccgttatatacgagtgttttatcgacaaaggagtatggaacatatgatttggcagtatctacagcaacgttactatatccaattcttactttgaatattgttgatgctgtaatgagatttttaatggataaagaaagtgataaaaaagcaattgcatctattggcttgaaatatgtatctataagttcagttttatttggttttattatgttgtttttttatataacaggtatttggtcagaaattaatggactagagggatatattttttcttattatatatcgtatgtgattaatcaattttttattcaatttgctaaaggcttagaaaaagtaaagaatatgggggttgcaggtgtattaagtacaatagtaacaataattgctaatttattctttttattggtaataaaatggggactaattggattctttttagcaaatattttggcacaaattgtatcagcaatttatctgtttatgaaaactgaaatatataactatatagaaataaaaagacaacctattgcacttcgaagagaaatgcttatttattctgtaccattgattgcaactgttgttggttggtgggtgaatagttgtgcagataagtatattgtaacttttattttgggtatttcggcaaatggcttactttcagtttcatataaaataccgcaaattataaataccattcaaggtatttttactcaagcatggcagatttcggcaataaaagaatatggtagtagtgatacagcagacttttatgggaaaacttttatagttataaatcttatgatgtgtattgtatgttcgtttctgatttttatgacgagaccattagcatatattttatatgctaatgatttttatgaggcatggaagtatgttccgtttttattggtatctagtgtgttaaattgtgcttcaggattgttaggaccaatattatcagcaaaaaaaaattctaaagcaatgatgtggtcggcaatagtaggtgctgtcgcaaatattattatgaatattgtatttgtaaatcttacaggaatccaaggagctacatttgctacgttagttagttcatatattatttatataattagaaagtatgcagtaggagaagatatatatatcaataattattatgtgattattgtaacgtggcttattttagtagtgcaaggtattatagaaagtaattttatgaattattatttggaaatattatgcgtagtagttattattattatcaataaaaattcggtgtggcaagtacttaatttggtaaaaaacatatataaaaatatcaagtgaaaagagggtaaaaaaatgaaaacagtagcatttgttccaattaaattaaataatcaaaggacaccaggaaaaaatattaaaaaatttgacgatggaagttccctaattacagtttttttaagaaatctaattaaagtaaaatcatttgatgatgtatatgtattttgcagtaatcctaagattaaagaatatattgtaccaggagtaaaatacttggaacgaccagtatatcttgatacacaggaggctacaccacaagatattatgggagaatttattaaaagaattgatgcagatatttatgctgtatgtcattgtacgtcaccttttgtttctgtagaacattttgaagagtgtgttgctgcaacaaagagtagcgaatatgattcttcgttcacagccgaaaaacttcaacatttaatgtggacagataaaaacgaaccattaaactttgatccgacaaatgttccaagaacgcaagatttgccagtatattataatgaggtttcagcagcttatgtttttaaaaaggaagtttatgaaaaatataaacgaagaataggaattaaacctcatattacggaagttagcggagttgaatgcgttgacattgattatccagaggattttgaaattgcaaatgcaatatatatgtctatgataaagggaggaaagtaataatgaagcatcatacaatgttgttagattgtacattaagagatggggcatacttattagataaaaaatttggtgatagtaacattagaggtatagtttctggtttggtaaaagctggaatagattgtattgagataggtttctttcaagatgaaggggctggtgatggaaaaacagtttatttaaattctgaagacgctaaacgatttattcctaaagaaaaaaatggatgtttatttactgttttagctgattgtagcaggtattctgttagtaatctggataagtgtgatggtacatctatagatgccgtaagagagtgtttttttaaaggagaacgttcaagggcagtagaaaattgtaaagtaattaaagataaaggatataagtgttttgtacaacctgttgatattttaggatattcagatgctgaacttatagatttcctacaggaaattaataatgttgaaccatattgtctatcaatagttgatacttttggctcaatgtatcaagatgatttacatagaatttttgaaataattaatcataatctaattccgacatgtaaagttggatttcattctcataataatatgcagatgtccaatgctttatctcaagagtttataagaatgacctatggtaaaagagagattgtggttgatggaacaatatctggaatgggaaggggagccggaaatactccgacggaattaattgctcagtatcttgtttcgcaaagagaatataattatgatatagacgctattcttgatttaatagatgattatatggataatataagaactaagtgttcatgggggtattctacaccatattttatcgcaggatgttatggtgctcatgtgaataatattgcatatttaacccaaaagaatagcattagatctaaagatataagatatattttaaataagataggtgctattccaagaaaaagatatgattacaatctcttagaaaaaacgtatgttgattatacatcgtctgaaattaatgattcgaagacaattaagaagttgtatgatgaattaaatggaaaggatatattaattctagttccagggagcagcgtgacaagtgattatattaatgtgcaaaagtatattgaggaaaaaaagccggtaataataagtgtaaattttattcatgataaaatcgattcagattatgtttatatgagtaatgtacgacgttattcgttgatgattggaaatgaaaaattacaaaaatgtaaaaagataactacatctaatattaagacaaaaccagatgataatgaaatgattatttcatttaatgatttaataaaatgtggttggaataatcttgataattcaacaattatgttacttaggttattggataaatttcatttagatagtattgcattagcgggttttgatggatatgatgttaatattaagagtaattatgctactaataatttagagttatctaatgtaagagataatccaatggagttgaatgaagaaattcatagtatgcttgaggattataaagcaacgagaaatagtcatactaagattcaatttattactccttctaggttttcagaaatatttgacgaggggatacaatgattagatatttaataatggatgttgacgggacattaactgatggaaaaatatatatgggagcttcaggagaagttatgaaagcttttgatataaaagatggatgtgggattaaagatattctgccaagatgttatattactccaataataattactgcgcgagaaagtaaaatacttacaaacagatgtgaagagttgggcattaaacatgtctatcagggaataagaaacaaactagaaaaacttcattctcttgtagatgatttaagtgaatgcgcatatattggagatgatatattagatttgcaatgtatggaaccaataaaagaggcgagaggtatagtagggtgtccagcagatgcagctaaaaaagtgttaaaaattgcagattttatttcaaaaaaagatggtggaaatggagctgtaagagaatttattgaatggttggagataaataaatgaaaaaatgtactatttttttaaaatcattcttagtgatatgcttagtttgtatgtcaataggatgtacaatggtaagtgcgagtgatcttggattagcaaattctaagattgttgaattgggatcttttggttcaaatggggaaaatatatcttcatcgaatagagcaagaacaaaaaacatctataaaacatctgagcaggcatttaagtttgaaagaagcaaagcagcgggaatgagatatgcagtcgtaggatttgatgcaaatggcaagagagtgcttgattcaggctggcagacaggagcaacatacacacttggaaaagaagtggtaagctacagactgttattttcatatacagataacagaacaatgacgtcggcagatacattaaaaattgagagcagcataacatttagtgcggtggaaacaaaaagaagtgttattgaggtgggctcgttcggaacagatggaaagaatacagtgtcatcaaaccgggcaagaacagtaaatagttataaggtatctgaaaagacattcaagtttgaaagcagcaaagcagcgggaatgagatatgcagtcgtaggatttgatgcaaatggcaagannnnnnnnnnnnnnnnnnnnnnnnnnnnnnnnnnnnnnnnnnnnnnnnnnnnnnnnnnnnnnnnnnnnnnnnnnnnnnnnnnnnnnnnnnnnnnnnnnnnaagaagtggtaagctacagactgttattttcatatacagataacagaacaatgacagtagaggatacattgaaaatagaaaagagtctatctattataccagctagcgcaattgatgattgggaattacctataatgtagatatatcaatttactatggcgattacattgaaaaaataaatcaatgtaatcaccatcatattaatatctgctatgattatagtttgttatagttatattaatagctagattttgaggtattaatgtagtatataaaaagtgagtacataatttatatttgagaatagataaaaagtatgaaggagaacagatgaaatacaattatttagtagtaggttctggcctctacggagccatctttgctcatgaggcaaaggccaaaggcaaatctgtgcttgttgtggacaagcgtcctaacatagcaggaaatgtctatacagaaaagcaggagggcatcaatgtacacatgtacggagcccacatattccacaccaatgacaagagggtctggaactacatcacacagtttgctgagttcaaccgcttcacaaacagccctgtggcaaactacaagggcgagctgtactcaatgcctttcaatatgtacaccttcaacaagatgtggggtgtggtgacacctgaggaggctgctgccaagattgatgagcagaaaaaggaaatcaccggtgagcctaaaaatcttgaggagcaggctatctcactcgttggccgtgatatctatgagaagcttgtgaagggctatactgagaagcagtggggccgtgactgcaaggagcttccggctttcatcatcaagcgtcttccggtgagacttacctttgacaacaattacttcaacgctctttaccaggggattccaatcggtggatacacaaagatggttgaaaatctgcttgacggcattgaggtcagattgaataccgactatcttgagcacaaggctgagcttg

SEQ ID NO: 251 - DNA, 7634 bp, unidentified
  source 1..7634: mol_type = unassigned DNA
cagccggaacatgataataaccacctaaatagaccggaggcttcttttgtagaaaagagaagtcatcctgcctgccataagtattattacccaaattgaaatatttcttcttatagacagacaaagccagtttagaagcggacttcacttttaagtaaggaaaagccttcaacaaatcgaagttacgtacaaactggtaattcatatctgttccccactcttcatagaaagacaaatcatagagcactttatgtcctccattttcaaaaattctacccagcagatattggtgcatctgagaacaaactccaccatccataagtactatcacttgaggggctatcagtctatgttttatagcctttctatacaggcttttcttccacctttctatgattttcatttctctataatttatttttccaattataataatacagtctccaatatcccaacaacgatgataacctataagtagtaactatcttcttctcacggcgtgacagtaatttccaaaattccggataatccccaagctctatcatcaaccgattcatttctttattaacatcctttacctttttccaatggagtcgcgcttgagtattctttatatggaacaaagctaattctcttgcaaattcctcatgcaatccgttccgttctatatagtcatcaaaccagcgcacataaacattgaaatcaagatatgctctctctcccaaatcgtgagataccgaagaggaataaacataataatcaagaatcggagtatttatagaaacaacttttcccgaacgaactaaaatctgcgtagacaaagcaacatcttctccaaacgagatgccgagcctttcaatcccctcatcatataaagaacgtaaatgaaacttggtccacatagcccaatatgcccttgaacagaggatacattttaaatattcaatcccggacatttgttcaaactccatgctgtccgattcctttcttcctccatcttcacaaaaaaagaaaggagcaacaacaacatcggcttgagtctcctcagcacggttcaccaaacatcctatcgcattgctcatcaaaacatcatcacaatccaaatactgtatatatttcccccgtgcccgattcacacctattcttctcgcttcggatgttcctccattctgtttgtttataacaataatacgacaatccaactttacataattttctataatgactggagtattatccatacttccatcattgaccacgatgatttctatattcttgtaggattgggacatagcactttgaaggcatctctctaaatatttctcaccattatagacacaaattataatagagactaagggagaaagggtatcgttcatcatatttacaattacattctacaagcccaacaaagtacagaaacttgatgcaaagttatcaataccatacttttcctctattgcaatggaatcgatgtttttggagagcatttttctaacgttttcatcccgcaacatttctatcttttctgctaattccgcaatatttcctttctggtaaaggagcccattcactccatcctcaatgcgttccggatttgcccccacatcagaaaggattaatggcaacccacatttctgagcttctacagcaaccctaccaaaagtttcaaaagtggaacaaaccaacacaacgtcagccaaagcataataagaaaccacctgttgcgtgtaagagacaatttttacattgttatccagaccattatcttgaatatatttttggcatttgggcataaagccaacatccgggccaaccagataacaaagaatatccttcccttcagccactattctctttaccgcctgcaaaagttccatctgtcccttattagagtcaaaagcgccgaccaacaagatagtataccgcgtatgtctatcacatttcacatccactccaaccgtcatcggcaattctacagcttgggtgatgctgcttatttttgcgcttgtcatcaccttttgataatgaaactctgcatatctggaagttaccaatatcttatttgataatttatcaatcgctctaaagataaaacgaaattcaaaaataggattaagattcagccaagtcacatcaggtatctcatggataaaccaacagtgctttatccctaacatcttacatgatattgccaaatgaggaaaaaccacagtatttgtcattccatagtccggctttatccttctcaagtaacgggttaatttaatggaatacttcaatagtttacgaatataagaaagcttctctctcgtgccgatatccatgtccttacctacaagccaccattccatttgtaggaacctatagccatcaagataaggggagcaggcatcaagcaaatctcccggaccaggaagaaccatatagagttgccaatcagggtgaatacgcttaagcccccgcaatagatccaataaacatctttgtgctcctccggcacaatcactaacatgtgataaaaaaaccaatttcatagcaaccacaattagcttacaagatatttgtacacatatttaatacagtgctgtaaatgtttccatgaataagggtaagctaaaaagtccttcagcaccaccttcgcctcaggatatcccactttcaataacttacgcaaaaagacactgaaggtatattcttcctgcttcctcatttctttttctcccaattcaaatccctctattttcattggaagcatcttattccacttcaatttgtgcattttaatcgtatcttgataccaactttgattaaaattcccttgtgaagaatgctctatcaaaacctcagaagaacaacatacataatttttataacaacgatccgcagctatttgcaatgtaaaatccaagtcataacaatggaaacccgtcaacaattcctcatcaaaaggatatttagcccatacatccttacgcacaaacatggcaaagccatccaataccagcacttccttaaaaggatgctccatagtaaccgatgctacacgaaattgggtttcagttccaacgctctgataatagaatataacatcccacttatacacatctccccatcccgaatagcatttcaatttcaccttactaccggcaaaacctatcaccccacaatccggttccttaagtttcttctcaatgcactttccccagcctaccgaatgaaactttacatcctcatggacaaaaaacagaaagggataatgtgcccgagaagctccctcattatacgcacgcgctatcggccattgtttttcacgattatcaatagcaatgatttcataatcaacaccaatagtatcatgaatattccgggttacttgctccaaacgttcgggagataccgaacaaattatgattgaaagcataatctgatgctattagtttgtattattttgcaatatctcatcataaacagccagtcttctctccaacatttcctgaggattataaagttcacgcaaacgcttcaatgcttgcgtcgccagcctgacttgcaattttttatccgcttccaaacgaatgactgctgctgcaaaatcagttgcgctatcagcaatcaaacactcttcattgtgacgtaggtcaattccctcaactccttttgtcgtagttacaaaagaagccatagaggaaaccgcatccaatattttcatcctcataccactaccaatacgaattggcaccagaacgatgctcccattcaagtattcccgcaaatcctccacataacccactaactccatttccggacatactgcctgaagacttttcacgtaacggctcttccatgtcccaatcacttgaaaaacaaatttaaaaccctgaacacgcaaacaaggggctacttcatgacaaaaccaatctactgcatcctggttcgggtaatgattttcacttccaacaaatgtcagacgaacagaggctggcttcacaattctgtcataagcagactctatctgtaccactgccggagaaacatgaatattgcattcttgtccaaccaagtctgccaacaataaacggtcaatatccgtcaatgcaattacatgcttatattgacgtaaagcggctttctccatatccttagcaatgccatagagcatcttgtcttcatctgttacatgagtaaggcattccatttcattttcattacgtatatacctcagttcatgatgcacaaacactgtttgtacatctttaggcaatagataccccaatgttatcaatggatagaactcaacctgaataatatcaaatccacgacgtgagatgtcagacacatactctacgtatgccttgggaaaaggtttaaaacaagaattcttcaacgtcatattcttatacggacgctcttgctgaaaagaatacagttgccgttgcatcttgcgggaaatggattcagacatcttttttaaccaacggtaatatcgggggcaacgagtcttaggttctgcatcttcttccctaaaaagatagaaatcaacatttgtccataaagcccttaaactttcgacatcattcatctccttattttccggagaaagcaacaaagacacagacattttgtgccggatatattccaccatattgaaaaaggcctgattacctccagcagtcaacggataaggcacacaaggaagtataaaaagaattttcttcattatctctttcgatttctaagtttcaacttacacatgcggaatgccacacttaatgatacagaagggcaaatataccataaactacgacaaatacccataagatcatgtaatttataacgatcttgcaaactataatgcaatatcgtatgggcatatttctttatcgcatgttgtagttttctatcttgaagtctgtccgagtaaaaaactgaaacccattttataaattgccttgtagctgctatcttctcttcatcataattgaaggaacaacttatattctcgcccatcacatttcgccaacaaaccggcttaccaggcaaaggaatcattccacctgcattttcacctatgcttgtccacgttgcatcgtctgaacaccacgccaatggaaacttcacaaaaccgcctatccgttcatatatatcacgagtaaaaacatattcacaagcagccgaataaattcttccttccaatttatccaacaaaaactgatagcccgaaaccggatattcctgcaatgaaggatttttatgtattatcttgccattttcatctatcacagcaaggggaaaacggaacatcccatgcctcgtaccatagcattctaatgcttttataatacgctctaccccgtcctgcggcatcaaatcatcatctgaaaagaaccaaataaccggttcttttgcaagtgctatacaacggtcccaatgccccggcaaatccactccacccagattagtatcaaaacgtcgatagacaatattcattttatccgcataatcagaaacaatttccttcagattctgaggacttgcatcatcacctatgtaaacagtaaaacttcgacaagtctgtacgacaatagaatccaatgtctgccggaggaagcggcacttatatgccggaataacaattgctatcttttcttccatagaaatcatccctctacaacattcttttttatcacttccagataacgttttccataatgtaaatccggttccagatagttcccttcagcccattcattccatgattttacaaatgcaagccgatggtctaaaggcttattctcaatacgctttatcgcttctttcatatgtcgggcaaaataagaaggttcagcgtgattcaagaccaacgatttaccacgggaacgtggagaatgatcccagttaggaataatggtaggtataatattctcttcatattcttcatcacctacaaagaaagaactggccttcttatactccacaaccttaggaatacgaaatattttatgtttccatttcgcatatttataagtcagagcagctttcttctcaaagtcaaacaagcgtacaacattaatagcatcaaaccccattttcataagtctctctttttcttctttcaaatgataggtttgtcctatgaaataaacccccttcaagccattctgcacagctaaagtacgccagagttcaatgaactctttcatctccggatgatccaaaggatgataaaccataaacaacggtttctcatccactgtaatatagcgatggtctttaaaagcaggtaatacctcgtggaaatgagctatataatcttgttctcccggataaagctgatttatcaaagtatctttgctctttatgccgtgataaaagcccctccatgactcattagcccaagccagacaaaaaggaaaatccggttcatcagaagacaatacttcattaaacgggcgctctaagagtctctttccatttccaaaccaataatgccagtaacaaaagccttcgataccatattcttttgccatgtcagcttgcgccttacgtgtttccggcactcgcaaatcataatatcccaaatctgccggcaccttaggctgataatgtcctggaaacaatggacgtgcttttcctacattagtccattccgtaaaacctttcatccaccatctgtcgttttctggtattggatgaaattgaggtagataaaaagctataacccttgctttattcattattgagattcaattaaagttataatgtttggaatttataccgtttagatttgaagaatgtcctcactaaacggtaaatacatctataaacctttagatgacaatacatcatacggcgcttaaatatatgcataacatccaattgcggccacgacacattatcaaactcctgcattctggctaatacatcattgataacatcatctatcaaagaagattgaggaagcatcatcaaatggtcaatcaaatgaattccccgttcatgtacacaataaggagctttatcccatatttctttttctcgcacaaatttcacttgttcatagacagtttgaaagagcagatattccttttcgtaattatacaatttaccttgagtagtacttccttcacgtttcaaataatgatatttaggacagtcttgcataacgactttctgcgttttataaaatatctgataagaaactgcaatatcttcaaaaactctatttaccggaaaatatattccagcaaataattgacgcttatacaacttatcccacatataatttcttatacgcttatcttctaccaatgttcggatagcttcttcacgagaaaagctggagaattgcccagaagagtgcttcactctggtctttacggcagtttctatataatgcgagcaaatggatatatccgccccattctctttcagtaagtgatacaagaattcgtacatatccggttcaatccagtcgtcgctatccacgaaaccaaggagttcaccttgagctaccgccaaacctctgtttctggctgcactctgacctgcattcgtctggtggataacctttatccgcccatccctttgggcaaataaatcacaaagctctcccgaaccatcggaagagccgt

SEQ ID NO: 252 - DNA, 12483 bp, unidentified
  source 1..12483: mol_type = unassigned DNA
ttatttgttgtcccgtaagtcttttaccctgacggcttttccttcgctctgcggcaaggaacctttctttaccaaccgtaacttcggagttaccagaatctcgtctttcagctggcgggtaatggctttgctaatcttttgtagctcgatgtaattgtcagtagagaggtcgctaagttcaacttccacaatcatctcatcctggttattgaccgtttcgagcgtgatgaggtaattgctgcccaattcggggaattgtaccagcaccttttccacctgcatggggaagatattgactcccttgatgatgaacatatcgtcgctacggcctttgatgcggtctatacggatgtgggtacgtccgcaagggcacttgccgggcaggatgcgggtaaggtcgcgtgtacggtagcggatgaggggcatcatctctctgtccagcgttgtcagtaccagttcgccgatttcaccttccggtacgggttcgccggtttccgggttaatgatttcgaccaggtagcaatcttcccagaagtgcatgccgtcttgttcggtgcactcgaaggctacgccgggaccgttcatttcagtcataccaaagctgttataggctttgacgccaagcatgcgttcaatctttctgcgttgctcgtctgtgtggggttcggcaccgataacaagcgttttcagacttgtgccggcggggtccatcccttcttcctggaatacctctgccaagcggatggcatagctgggaatggcatgcagggcagtggtcttgaagtcggtgatgaactttatctgacgcttgctgtttccggcagcggcaggaacagtcagcgcacccagacgttcggctccatactgaaagcccagtcctccggtgaacatgccgtaaccggagctattttggaaaacatccgtcttacggatacctaccatatagaggcagcgtgccactaagttagcccaagagtccaaatcgtgttgggagtgtacgatgaccgtcggcgtgcccgtagtgccactggaagaatggatacgtactccgtcctcacgcatatcgcctgctactaatccaaaaggataattggcgcgcatatcggccttggtagtaaacggtatcttacgtatgtcttctatagaccggatgctgtcggcagtgatgccatgctcttggaatacctttttataataaggagagttggcggcaatgctgacagtcttttttaaccgttgcagttgcagttcgcgcaactgctcacggggcatcgtttcaatctcttcttcccagtatttgttattcatggtatgttgaaatttagagtcaattatagtttacatcagtttttcagcaatctctttgccggcagccaacgctttgaggttcagctctacaatggcgtcgcccttgcgttggaagatttcgcggatgctgtcttgcacctttgcgtagtcgatgccgaggaaggggatggtggcgcccagcagtacgatgttcgctacgcggggagagccgacttcttttgccacttcgtttacgttcagcatgattttatgcggcagcttgttgatttcggccttgatgtcttcttctgccggatagttgggaatgttgatgaagggggcttcattggtcaccagccaaccttcggggctgaggtaggggaggtagcgcagtgcttccatcggttccagggagatgatgaggtcgcattttcctgtgggaatgaggtccgaagcgatggattggtcgctgatgcgcaggttggactgcacgtcgccgcctcgctggctcatgccgtgtacttctgcctgcttcatgtagagtccgtccttgagggctgctttgccgattacggtggcgatggagaggataccttgtcctcctacgccggaaagtatgatgtcttttttcatggctttacttgtttctttttttgcgtgctaatgtttggatgcattctctgcgggggatgatgacggatacgccgtggtgctcgatttcttcccggatgatttgcttcatctcttcgtagttcttcttcaagggcactacgacgcggatgtgttcgggagctacaccgatgccggcgcagatggcttccagacgtccggtgccggcagagtcttgtcctccggtcatggcggtggtttcgttgtcggagatgacgatggtgacgtcggcgttttcgttgacgcaatccagcagtcccgtcatgcccgagtgggtgaaggtggagtcgccgatgacggctacggcaggatgcaggccggcatccgaagcacccttcgccatggtgatggaggcgcccatatccacgcaagagttaatggcgttgaatggggcattggctcccagcgtgtagcaaccaatgtcgctgaacaccttataagtgggatattcttctttcaatacttgggtcagcaccgtgtacatgtcgcgatggccgcaaccctcgcacaaagcgggcgggcgcatctctaccaaagaaggaacgctgaattcagccttgttctccttgcctacggcacgtgccacgctgtccgggttcagctctccgtcttgtgaaagagtgccgtccaaacggccttttactttgatgccgatgcccagatagccttttagctgtttttctacgaacggttgtccgtcttccagtaccagaatctcgtcacatgcttctaccagctgcatcagctgtttcttgggcaacgggtattgtccgattttcagtaccggatattcgcaaccttcgggatagttctccatcaggtagttgtagccgatgccgcatgccacgatacccagctttttgttggggccgtcggtatatttgttgtaagcggagttttcagaagctttgataaattcgtcctggcgttgcagcaatgctttgtaacgtttgcgtgcattacccggcaggaggatgaactgacgcgggtcttcgctgaaggaaatctcattctgcggttgttgctccttgcgctctacgccggaacgggagtgtgccaggcgcgtaaccatgcgcatcaggatgggttcgccggtctgttcggagaagttgaatccgttgtacaccatgtcgtatgcttcctgctggttgcttggttcgtacatcgggatgagggagaagtcgccatagaagcggctgtcttgctcgttttgtgaggagtgcatgctggggtcgtcggcagcaatgactatcagaccaccttttatgccggtaatggcagagttgatgaaacagtcggcagctacgttcatacccacgtgcttcatgcacaccaatgaacgcttacctgcaaaggacatgcccagggcagcttccatcgcagttttctcgttagagcaccagcggttatggatattcttttcggcagtaatcggtgccatctgaatatattcggtgatttccgtagaaggagtgccgggataggcatatacacccgaaagtccggcatctaatgcagcttgtgcaatggcttcatcgccaagtaagagttgcttgctcatatctgaatatttaagtgttagtcatggattaatatttgacgcaaatataggattttgcttttattttatcagcagattacttgaaaatctttctttcgtttaatgcattccaatattttcttgcatttttcatgtgctcggcataattggatgcaaagttatgggtgcccgagaagtcctctttggcacacatgtagaggtagttgtgtttcgtatggttcagcacagcatccagcccgatgggtgaggggatgcgtatgggaccgggaggtagtccggtgttgagataggtattgtagggggattctactgccagatgggcattcgtaattctccgcaagccgaagtcctgcaaggcaaatttgatggtagggtcggcttgcaggggcatgccggtgtgcaggcggttgatgtagagccctgccaccattggtttttcgggagtgttgtttgtctcttcctcgacgatggaggcaagggtgcagacttccgtcggggtcattccgatggcggtggctttgtctaagcgttcctggttccagaacttctggtgctctttttgcattctttcgaagaactcttctgcactcatgtcccaatagacttggtaggtttcggggatgaagaggcagggcagggtctctttgttgtatcccagtttttgttggaatgcggagtcgttcatcaatccggctatttcggcggagtctatcatgagctgtttgcctacgctgcgtgccagccggtccagtgtgcgtacgctgccgacggtgagattcgtaggttcttgatatccgcggtacagacggctgaatacgtgatatacgttttcccccggccggatggtgtagcgtccggtgtgtatattttcggaatatttcttgtattgggccatccagcggaagccggtgaagcttcgaggatggccttgttgttccaccttattatatatggagtcggcggtgtcgtcgcggtctatatagatatagactgtctttttcggatggaattgcggggcaaacagatagtagtatactgttcctgcacaagctgctccaataagaatcagtgcgacgaatgttccgataatgattttcttcttttccattttgttttactgcatctttagtcgggcaaagttagtaaaaaatggagtgaaaaccatcaagtcatatcagttaattcgatagctgacaaaggctatgcgtttgctgtccggtgcccatgagttgacattgatggtgccttgtccgccgaaaagctttaacaatgtcttgggttctccaccgtttgcgggcattaggcgcagctctacgttcttgtttgccaggtgctctcccggttccaggtcacctttgtagtaggtgatgaatacaacggattttccgtcaggggagatgtgggggaaccaggagttacgggtttcgtcaaaggtcatctgggtctgttcggagccgtctgccttcatgcgccagacttgcatgagtccggtgcgtacggaattgaaccagatgtattgtccgcagggggaatattccggtccgtcatccagaccttcggcagtggtcaggcgggtttcttcacctccttccgccgggatggtatagacgtcatagttgccgtttcgttcggcgcaataggcaagctctttgccgtcggggctccaaccgtggaggtagctgggagccataggtgttattaaacggggagtgccgcccgtgatgggaagtgtataaatgcgcgatttatagtcttctttcgtcccgtggctgatggctatctgctgtccgtcggtcgagaggacgtggtcgttgttgcagttttgggcaaatccggtgtttatcagttccggttcggcaggcgaggtgggggaaaggcggtaaagctttccttcgctgttgtatagcagccattgcccgtcgggcgtccaattgggagcttcaatccggtagggaaattcttttacgacggtccggttaccgttggttacatccagtatttcgaggacgctggtaatctcgtttttttgttgagcggttgcggtcagtgcaacagttgcaaagaaggggattagatagggtttcatgttcatatcgtatttaataaatctccgcaagatacattttttattggaaactacatagtcggagcatgcttttttcagagagaatctgtagtgatggtcgaatgcgtagtgcttatcatatgaatagtctccgggattcttgaaatagttgtccacatactgccagttgtcggtgtcgagcggcgtgtgcgaagtcatgtacgatagggagcttttgtctctactatctcgctgtccagactaatcaggtctttgcccaagcggacaatgcgggcatgtagtcggtgccgacttccctctttccgcctccaccgaatgacaaccatcctgtaccttcgtcatctatcacggcacccgggtcgaaaggagccctgcagtggcctaatccttgggtgaactggctcaccagcatacgtcttaccgtccgattccacccgcgatacgatggatggcgcccatgaggctataccccatggcgagagggcctttacgtcaatcagtccgtgataagtccaatttaccatgtcatcggtggacagcatgaccagtgaatgggatgtattggtatgtgtttttgccgtattttcccacactgtccagttgctgggtgtcattggttccatacacatagagccttccgttgtattccaccgatgtcgggtcggccacaaaaatgaaatccaacagcgggttggcgtttccactgaagaattggggtgattctaccggacgcgtgtctttctttcttgaatcggaaagcgcccacacatcatttcctgcggatatagccgccagcagcaaagccgctgtaaataacttgattctttccatttttttatagtatgttatagaaacctatggtagccttttgattttggcttgtgttcttcaatcacctcaatcctttatttaagattgaaaaatcgggttattgaaaagttgccgcaaatattgggaattactatgtataatataaggtgtattatgtttttaataatgtgcctatatgtttcaagttatcattgtaatcagatggtgctgttttaaactagctttacttgctttgggataattatgcggctatggattaaactgtttggaagggcattgtgttttatgcaaatatattcgtagaagagcgttttttattctaacaattcttgaaaagaaaaagcactgattattccagataatcagtgcttgaatatcgagccgctagccagacttgaactggcgacctacgcgttacgaatgcgttgctctaccaactgagctatagcggcaataagcttttgtttacggggtgcaaaggtacatctttatttgaaaaggcaaaaagaatctctgttttttttagaaatattttagtgggataattttctatttgaatgtcctgaactttattgccataaaaattggataataaaacgaaaagaagcatctttgtcgtaggtcctatagcaaataagtctgatactgattatgaatttaagaatctattataaatatctttcttcacgcatagcgtccaaatggacggtgttgttggtagatgtaattatcgttgtgatttccatgctttctgcatgttttttgcaatataggctttcgtccgtatcttatgaaatttctttgtatgtatggctgaccattttggctgtcttgtgtaatgtctgtttctttcatattctccgtacttatgtgggtgttatccgtttttcctcttttgtggatatttatcgtgtgctttggagtcttacgataagctatgctgtactgtttttagggaattactgttggtctgtttcggggcttggagaaactttgccgaacagcattctgtttatggcatatatgttcaccttctctctgatggcttgtatgcgcattgctgtgaagatgctttatgaagctattgcttttgatgcacgtcattgcgtgaatgtttttatttatggattccatgggactggagtcaatgttgcaaaatccttgagagttagtcgtaataatcattatcgcctgcgtggctttatttcggacgaacctgatatgataggtaaacatacgatgggatgcagggtatatcccaatgatgagcagctgtttgaccgtctaaagaaaaagaaagtggatacaatcattatctctccaagcaaggtgtcggatttggaaaattccggaatgctggataaactgttctctcatgatattcatgtaatgaccgttcctcccttaagcgattgtatggacgatggactgataaaggacattcaaatagaagattggctccgtagagaaccggtgcaagttgacatgcgtaaaattacggcccatatcgaggggcgtagagtaatggttacgggagcggcgggagctgtaggaagggaaatcgttcgccagttggctacactgaatccttatcagttgattctggtagatcaggcagaatccccattgtatgatgtacagttggaattgtctgatcattggaagaatctggaggtccgtgtattggttgcagatgttgctaaccgtacgcgtatggaggctatatttgaagaaacacgtcctcaacttgtttttcattctgctgcgtataagcatgtacaactgatggatgattttgtatcggaggcaattcaaacgaatatatcggggacagtgaatattgcggacctggcggcaaagtatagagtgtcccgtatggttatgatatctgctgctaatgcacgtcatccggagaatgctatggaatatagtaagcgtgtggcggaaatatatgtgcaatcatctgattgcaggttgaaacgcgacacaagggaaactgatatgttcatagtacgtttgggtgaggtgtatccgacgaatactcattgtttgattaccttgtctgaagcttgtatgctcaccctggaagtgggagtcatgggggatgggggagaagtgtacattgtgggagggcctggggatggacttttggattctgtaatcggtgaaaagataaagcgtgaaaaggcatctgttgatgattatgaacatgtgcgggaagaagtgctggccttggtgcaacatagttatactgaaaaaaaggctattttgattggactaatgaaaaaaatagtgccaatttttccgctttcttctacccgatgaaaagacgtgaaagtgacagttttttaatgctttttctgaaacttagaggtggaataaatgtatattataaaaataatatattacctttgtgcccgatttatatttattacaagaactcaaaagattaatcagaatatcttatgcgtagattaataacactattctttttggtatttactttgtcaggggtagcttttgctcagcagatgtcagatgatcaggttgttcagtatgtaaaaagcgctcagcagatgggcaaaaatcaaaagcagattactactgaattaatgcggcggggagtgacaaaggaacaagttgaaagaattcagaaaaagtatgaaaactctaaatctggaagtccgcagagcaatacccaagatgagaagcgttctcgtcaacgtggtgaaatgagtggcgtagtcaaagggctgcgtacaacttcggaaacttattctgccagacaaacggatgttgcaggggattctttacaaatgatggataatcgttccttgtctcaagagaaggaaacagaggatccgacttcgcaaatttatggtcataatatttttactaacgataatttgactttcgaacccaatgtgaatgttgctactcccgagaattatcgtctggggcctggtgacgaggtgattattgatgtgtggggagcttctgaaacaacgattcgacaaacaatctctccggaaggaagtattcttgtgaataatttaggaccggtttatctgagtggcaaaactgtaaaggaagccaataattatttgaaacaagaatttgccagaatatattctggagtaaccggaaatgttccgtctacccaagttaaactgacattaggagaaatacgttctattcaagtaaacgttatgggtgaagttgtggtgcccggaacttataccctctcatcatttgcttccgtatttcatgctttatatcgtgcaggtggtgtgaacccgattggtagtttgcgcagtattaaagtgattcgcaatggaaatacaatagcggatttggatgtttatgatttacttatgaaaggaaaaatgaaggatgacatccgtctgcaggatggtgatgtaattcttgtggatccttaccagtcactggtacagatattaggtaaggtaaaacgtccgatgttttatgaaatgaaacccactgaaaccgtaggtacattattgaagtattcaggtggttttacgggtgatgcttataagaaagcattacgtataatccgtaaaagtggacgtgagcatcaaatttataatgtggatgagatggattattccgtattccgcgtagatgacggtgataagataacggttgattccgttttacagcgttttgagaatcgtgtggaaatccgcggtgctgtatatcgtgaaggtttgtatcagttggacggtacgatgaatacagtgaagcagctgattaagaaagcggaaggacttcgcggagatgcattcttaaaccgtgctataatcgatcgtgaacttgaagacttgtcgcatgaggttatacaagtagatgtgaaaggtttgctgaacgggacggctgcagatattcctttgcagaagaatgacattttatatattccaagtattcatgacttgaaggaagaagctacacttaccattcatggtgaagttgccaatccgggtacatatctttattctgataaaatgacagtagaggatttggtgttgcaggctggtggcttgttggaggcggcggctacaacaaaggttgaagttgcacggcgcatgaaagatccgaagagtacatctttcagtactacagtaggccagaatttctcttttgatttgaaagatggcttattggtgggagaaggaagccaggatttccatcttgagccttttgatgaaatttatgttcgtaagagtccgtcctattttaaacaacagaatgttatggtgggcggagaagtcctttttagcggtaattatgcactatcgaaaaagaatgaacgtttgagtgacttgatagctaaggctggtggagtaactcccgatgcttatataaaaggagcgcgtcttatacgtaggatgaccgaagaagaattccgccgtaaggaagatgctctgcgtatggcgcaagcgggaggcggagattccatatctgtaaaaagattggatttgtccgatacctattctgtaggtataaatctgggagaggccttgaaaaatcctggttcagatgctgatatggtgcttcgcgagggagatgtattatttgttccggagtacgtaagtacagtgaaaatcaacggtgctgtaatgtatccgaatacagttttatataaaaagggtgaaagcttgaaatattacatcaaccaggctggtggctttggtaatgacgccaagaaacgcaaggtctatgtaatatacatgaatggtacagtttctcgtttaagagcaggaaacaagaaagccattgaacctggttgtgaaataattgttccaagtaaagaacagaaaaagaagatgactactgctgaaattctgggaatgggaagtacgacagcttctattgcagcgatgattgcgactatggttaatctctttaagtaatttgaattatgagcgaagaaagaatacaaaacataacttctccacaaccagaggaacaagaaatagatttgatagaactggcccagaaagtatgggctagtcgcaaattggtttttaaggcgtgtggtatcgctgcccttgttggactggttgttgcatttagtattcctaaggagtactctacaagtgtgacgttggctccagagagtggtggcaaatctggtggcggaagtatgggagcccttgcagccatggcgggtatcaatttgggtacttcttctggtgaagatgctttgtcacccgaactttatcctgatattgtaagttctactccttttctgattgaactgttcgatgttaaagtcaaggatcagaaagcaaaagtagacacgactttatatgcttatttgaaagaagaacagcgttctccttggtggagtgcaattttctccgctccttttaaggtgttgggatggacattgtctttgtttaaggatgaaccggaagagggggatgcaaagctggatccttttcgtcttactaaagatgagtctgccattgcagatgctttaagtaaacgtatctctgtttccgtagacaaaaagacaggtgtgacaaccttgtctgttactatgcaggatcctttgatatctgcttcgctgacggataccgtgatgcattgcctgcagaactacatcacagattatcggactaataaggctcgtcatgatttggcatttaccgaaaaactttatggagaagcaaaggccagttatgagtctgcccagaagaaatacgcaaattttgtagatgcaaaccagaatataatattgctgagttatcgcgcagagcaagagcgtttacagaatgaaatgaatttagcctatcaagtatatacacaagtgtctcaacaattgcagatggcaagagctaaggtgcaggagattacaccggtatatacggttgtccagccggctacggtacctttgaagcctgcaaagcccaataaattgatgattttgatcggcttcatgttcttggcaggtgtcggcagtgtgggatggatattatttgtaaaagatttattaaagggatggaaaaagcaaacaatatga

SEQ ID NO: 253 - DNA, 10591 bp, unidentified
  source 1..10591: mol_type = unassigned DNA
atggctttgaacaatgcgtatcttgaaagcgtttatgagaaggttgagaagagaaatcccggcgaaaaggaatttctccaggcagtatatgaggtactggaaagcctcattcctgttgtagaaaagagacctgaccttgttgaggcaggtataatcgacagaatagttgagccagaaagacagatcattttccgtgttccttgggtagatgacaacggcaaggtacaggtaaacagaggtttcagagttcagttcaactctgctataggaccatacaagggcggtatcagacttcacccttcagtatgtgcatcagtaatcaagttcctcggcttcgagcagatcttcaagaacagccttacaggtcttcctatcggcggcggtaagggtggttcagacttcgatcctaagggcaagtctgacggagaagttatgagattctgccagagctttatgacagagctttgcaagcatatcggtgctgacacagacgttccagcaggcgatatcggtactggtgcaagagagatcggctatatgttcggtcagtacaagagaatcagaaacgagttcacaggcgttcttacaggtaagggtctttcatacggcggatcacttgcaagaacagaggctactggttatggtctttgctactacacatctgagatgatcaagtgcatgaagaatgaaacattcgcaggcaagacagttgttatctctggttctggtaacgttgctatctacgctacagagaaggctacagagctgggcggcaaggtagttgcactttctgactctaacggttatgtatacgatccaaacggcatcaacctcgatgttgttaagcagatcaaggaagttgagagaggcagaatcaaggagtatgtaaacagagtacagggtgctgagtaccacgagggctgcagcggcatttggactatcaagtgcgacatcgctctcccatgcgctacacagaacgaggtcaacgaagagtcagctaaggctctcgtagctaacggtgtatttgctgttgctgagggtgctaatatgccttcaactccagaggctatcgctgtattccagaatgcaggcgttctctttggaccagctaaggctgctaacgcaggcggtgttgctacatcagctcttgagatgtcacagaacagcgagagactttcttggacattcgaggaagttgacgctaagctcaagaacatcatgacaaacatcttccacaactcatacaatgcagctaaggagtacggtcttgaaggcaacctcgttgcaggtgctaacatcgcaggtttcctgaaggtcgctgacgctatgaagtggcagggtatcgcttactaatataagcgtataaacaaagctatatacaaaacggacggtttttatgccgtccgtttttttatatcatatatgatgcggcaaaaatagaacatccccctgttagtgtcacactgacagggggatgtttgattataatttattttcaataaactcttttatttcattgtatattttagaaacattaggatcattttcatctacatacgatcttgttttatagttccatatccacaaaacgttatatttaactaaatatccaataccataagcaccattaaaataccatattatttcattaagctcattatcacttgaaataagcttacaatttatcacatctttgttaaagctttttttgcgaacaagcttaaatctatcaatattcttaattattttattgacctcgctttcttttaatggtttgtatctatcgaattcatctaaaatagtagttttatttaatgcattaataaacttatccaatccgtttccgccataccaatgcggacaagtagggtgagataccgcacatatttcagaatcagcaattaaagtttgatctaacttatcaaatgctttttgtgatagaaaaactatcaatctaggctttataatttctacaactgatttaacaacatcatttgcatgttttacatcacaatcattaaaattcaacgattttcctgctgacatttccggtcgctgaaagaaattcataaatgcaaacgctgagaaagcttcactatcagttatattttcagaagttagatctaatgcattaagcagaccttttgcgggatttctaaacatactatgtgcttttgacctgtctttatttaggaatctttctacaacatatcttgtattaaaattatttgtgttatttgctaaatcactcggaataccttcgttgtaccaatcacaaacattgtattcaatattgttcacataatgactttctcccaccagcaaaattctcgcttgcttatagtgtttgccaatgtacggcaacatttcattgtgtttcttatagtgttcaattttttttagttcatcatcataatctttaatggatttccaattattgatctctgccatacctactcctccccatatttcaaaataatgtccctagccactgatacaactctgtccgccacgctttgaggcttgattattttaacaaactgactatactgcatagtccaataaaacagggcgttttcattgacctttagtgatattacgcatttgtcattgctttctgacaacacgttaaagcccttaccaaaccaatcgattatctgcccaataaggaaacgatctatctcaagctctgcattcactgtctccccactgaacatataaatatggtctttcatgtattttgaaaggtcaaagccatggctgttgcctgccgtttttcgtatatccttctgcggcatatctatcaactgtatttccagtattttatcggcccgaaaatttgcgatattatcatatttgtcaacattgcaaataaggtagtacctgccgtttgcggtcactgtgtaatatggattaattatatatttgtcagttttcttcgggtgcagttttttatctgttccatattcgcagtataaaaattctatctgctttttctcctctattgcctgattaagcaactcgacagtataaagcacctgtgcattttctgtatgcccaatagtttcataattcactgaacctttaattctgttttcggcaaatggacttgactgtttttcaattttgctaataagtctctccgtttctctacccgtaacataccttgagaacagcaagccgtcagaaataagctttacctcactcggctccaatgtgtgattataatatatatcggtgataatcacattcacatcatcaacagatttctgcgaaccatttttgcgctctatttctgtatattcaatatcgaacccaaattcgatcaaattcataagatttcgctttacagtttttctgtcacaggtaagttcaaaatcagtttgcaagtattcctgtatatttttctgcgtcagtctatgatcaacgtcagaatgccgttttattacttccagcgtcattataagattattttttacaggctgtcttcccatacttatcatctcctgtcgacgtatttaatgccaaatatgatgcggtattagttactcatctttattatattgtaccgagttgcgtaggacaagtcaatggatatgagatgtttttcagaataaaatcaatgattttgtagacatttacaaatttgcaaatatgtttttggctactattaaaatcacagaaaactatcacagccttttcccatactatcgtatatttctttatgaaattctctaagtttggattaacatttggtgatactgttaatgtatggagattttactttaagttcatttgtaatatcattaattcgcttttgaagttctttattccgctcttgtattttgtctgctgtttttgcaaatccttttaagaaattgattattcttcgcatatttctgttggctgatgatcccatttctatgtaaaaaggaacgttatttctgatcaagcagatcgcatattttgacttttcaaggttgcttccgtcatattcacgctttttaaaccctgcaaaaattttgttatatgcctcttcaatttcccatattctgtcctgatctgacagtgtgtttgctatactctttttgcaagatcggatggtttttttgctgtgtgatatattaaagcccgtgggcttccatatcgaagaaacccatgggatttgttgtgcgttttttacagcgccttttttatatcatgccagacttatgggaatgttcccgtgggtctatttgacctgattttcctttatgataacgccacgctcaaaagcacaagcattctcaagcgttgtgcggcttatggcggctagggcttcttcggtgaaaaagccctgatgagaggtgacgataacgttaggaaaagacagaagccttgcggtcacggagctttctaggatatcctcctgtcggttttcaaagacgttctctgtttcttcctcataaacatcaagacccactccgtggaattttctgcttctgataccttttataaggtcttcggtattcacaagtgcacctcgggaggtatttacgaaaacaacattctctttcataagagagatagtttcagtattgataagatgatagcttgcctctgtcagggggcaatggagcgaaataaggtcgctttctctcaggacttcgctaaggggataatatttcacaaaatcaaggtcggggttctgataaacgtcataagctataacacgcataccaaagccgtggcatatcctgcacattgccgcacctatcctgcctgtgcctattataccagcagtcttgccatggaaatcaagtcccataagaccattcaggctgaaattgttctctcttacctttatatagcccttgtgtattcttcttgttactgcaagcgcaagcgccatggcgtgttctgccacggcttccggagaatacccaggcactctaagcactgttatgccgtatttatcggcggcttttatatcaacattattatagcctgcacatcgcataagaagaagctttacaccatgttcatggagccgtctaagcactgagcctgttatcgttgagcttacaaaggcacacacgccctcacagccctcggcaagccttgctgtgtcttccgtcaagtcggcttcaaggtagacgctttctatatcgggatagttttttcgctgcttttcaaatgaatctatatcatactgctttgcgtcatagaatattattttcatgaaaactcctccaaattttaaagtatttcattttacgcttgtattttttgcagctgtttataaaaatatacggtttttgccttaataagataaaattatcaaaggttgacaattgtgcgtaaataggatataatataggtatcggtatgtaaaaatatactttaaatatactttaaatgcctgttttctacagaaaggatatgatgccaatgtcacaattttcggaacttctcagagaatacataaagaaaaaagatattactataaaagcccttgccgaaaaatgtggtatcgacagaacatatcttcataagatactcaaaggggaaaggaaagtgccaagcgtagattttgtagaaaatataagcttgcagctcatgctttccacagaggataaaagcaggctcatggagctttataacatttctgagatgggggaagatgtctacaatcgccgcaagcaggtgtcaaagataatacacgatatggcaaacaccaacatggaagagcctgacgctctgaatttcaagacagaagttgatattgactctgtgcctgagatatccatctacaccgacaaacgtgagcttagaaaaaacctgcaggtacttatatgcagcgatgttcataatggttctgacattcaggtcatcgctcagccaacagagtttcttaccaatctgctgtccattgccgcagaaggcagcgagtctaccataaatcatctgttcttctttgacaacacctcaggtgaaaaaaacaccgcaaaatacaatctggatatttttccgttcatatgtcaccttgcgcaaaagcatgaaaaatatgaggctttttattattatgagggtgcgtcggcatatttcaactccacgaacatcatgccaaacataatgataacgaataattttctgatcagaacagacagcgattattgcgagggagttatatacagatctaagcctatggtagaattttatatgcggcagtttgaaaagttcaagacaaaatgtgcaaagcttctcgaccacgcagtggatattttggaatatgtttacttttggtacgatgacaacgcaaatttcatcggcgtagattttcagccatgcaccatgctttgtcttacagaggatatatacaacgcccatgcacttttgccagctgacgcaaagaaatttgtaaaagcaaagctcaccatgggcaagaaggctctttctgaacacaaatttgtaaatctgttcagtgaaaaggggcttgcagagtttatgacgacgggagagatttttgagcttccgagaaattcatatacttttcccactcttgcagaacgcaagataatgctacagataatgatatcgctttgtgaaaacggcatggcagactacaggataataaagaacgactattttgcggtgtcgaaaaatctttgtatcaacatttctgacaacacaagtcttaacatcattgccagaaacaactgcttctctgatttttcttatttgaagataagcgaaacgagccttgttcaggctttctgggattattttcagcactttatagattctgacgctgtttgctcgcatgaagaaactatcgagatactcaggtcttatttgtaaaaaatgggcgaccaaaagccgcccattgtaatgatattatttaagctgttcacgcattaaagtgagcagctttttttctcgccttgacacctgcacctgcgacataccaagttgttttgccgtttccatctgagttttattctgaaaatatctcaggtatataagctttctatcctccgcttcaagggaagctatgacctggcggagagagagcctgtcagcaatttctatgtcaggagcatcaacagggatatctatttgtccgtggcggtcgtcttcatctgagctttcagtaagactaacagggggcagggcgacgttcatggctagagtaacggcttcttcgctttctcctgacagctcacaaagctcgcttactgtaggttctctcccctgctgtatggaaaatcgctcacgctctcttacaaggcgcatggaaagctcttttatgctccgtgacacttttatcgtgccaccgtcacggaaaagcctttttatctcccctaatatcactggcactgcataggtggagaatttcacaccacggtcgctgtcaaaggctttcgcagcttttacaagacctatacagcctgcaccgtagagatcgtcatactctatgccacggttgcggaagcggtttgcgcacaggtgaacaagccccagattttcttctgcaagaggggtctcgactatgctgctcattttatactctttctttcaaggttttttcaaggataagggtagttccttctccaagcttgctgcgcaccttcactttatccataaagctttccatgaccgcaaagccaaggcctgctctttcctcctcaggtgcagtggtgaaaagcggctgcatagcctgctcgatatcagcgataccgcagcccttatcccttatttttatgtagacgtgtctgttctcgaatatccttatctgcatgaatatctcccctagggtgtttcggtatccgtggacaatggcgtttgtgactccctccgacactgcggtcttgacatctgcaagctcgtcgatctgagggtcaagctgagtaaggaaaccgctgactgcaactctagcaaagcgctcattttcagaatagctgggaaaactgactttcatttcattaaggggttttcgtttcaattttatcactctcctttgttttgtcatcggggctttcattctgttcctgagctgctttcttctcttgtatatacggggtcatatccgtgactatctttgtgagtctgtgcatacctgcaagctgcaagacctttcggatataagcaggaggcgacgccactatcacctcgccacccatttctgacattatcctgtatctgcccataacaagtccgatgcctgagctatccataaaagtcacctgagaatagtcgaggataagggtaagagggttatggcttctaatggctttatctatctctcccctgaaatatttcgctgtatggtggtcgatatcgccgcatatctctgccacaagagttctggctgacggatagttttttatctccacattcatgctttatcattcctttcattttttcgttttatccgctgaaaatatattatcacttacagtgggatttttttgtcgcattatcgtatgggtgaaaaaagcaggaacacacttttttgtgtgtccctgcctaggaaaattattatgttctatgcttatgtattaaagtccgttaggattattcttaatgaagttccagctatcttctgtcatttcatcaagaccatattgtgcttcccagccaaagaccttctttgcctttgctgtatcagcatagcaggttgcgatgtcgcctgcacgtcttggctttactacatatgggagcttctttccgcaggctttttcaaagctgtgaagaacgtcataaacgcttgagccttttcctgtgccgaggtttacggcttcaacacccttgttttccattacatacttgactgcgcaaaggtgacccttagcaaggtcaacaacgtggatataatctcttacacctgttccgtcaggagtatcgtaatcgtcaccaaacacaccgagcttttcaagctttcctactgctacctgacagatgtaaggaagcagattgtttggtataccgttagggtcttcgccgataagaccgctcttatgtgcgccgatagggttgaagtatctcagaagtgaaactgaccaatcgttgtcggaaacataaacatctctcagtatctgctctatcattacctttgtatagccataagggtttgttgctgatgtaggcatatcctccgtatatggagctttgtttacagggccgtaaactgttgcggaagatgagaaaactatcttcttacagccgtattttctcattgccttgataagcatgagagtgcctgtgatgttgttatggtaatattcaacaggcttctgaacagattcgccaaccgctttaagacctgcaaaatgtataacagcgtctatcttgttttcttcaaatatcttttcgagcgctgcaaggtcaagaagatctgcctcataaaaagcaaagtccttgcctgttatcttctttattctgttaagagcctccggctttgagtttgaaaagttatcaactataactacttcatagcctgcttcaagaagctcaacgcaggtgtggcttccgataaatcctgctccgcctgtaacaagtatttttgccatattctttacctcccaaatatgtcaggttttttcttacacttacattataccatattttcacgtttttgcaataccatttttgtttcaaacacatggatttttgttgcaaagagaataaaaatatgctatcatatctataacagaccatctcgcagaaaggaacacacagaatgaatacagaccgccattcctttaaatcagaccagacggacgcactttcgctgtcagtatacaacgtgggctatgaaaaatgtcaggggcttcacagttggggaagcggcgttcgtgaccattatcttatccaccacatcataaatggcaagggcatatacaaaacaccgcagggagagtatcaccttagcgcaggggacacttttcttatttacccctacactgttataacatacactgcagacaagaacgacccatgggaatactactgggcaggcttcaacggctctgacgctgaatttatccttgatcgtgcaggcttcacaagagagtgtcctgttatctccgcagactttggaagcgagcttaaagacagtcttgaacgcatttatcgtcttagtggaaacagaagctcagaccttgtgaaaatgacaggtcagctttacatcacgctgggcattcttatggaacgctcgggaagtcaaagccgttcggggagcaccgcaaaaggatatgtcacaaaggcgaaaaactacattgcacacaactacacccttgggataggggtcgagaatgccaccgatttcgttggcgtgagccgtgccacgctatatcgggctttcatggaatacgaggggctttctcctgcacagtatataactgatttccgtgtgaacgccgcctgccgtttgctggaagaaactgagcttcctgtgtcggctgtggcaaggtcggtaggatataatgacagcctttatttttcaaggatattccacaagacaaagggtgtgtcacctacggaatacagggctgacgctttgtgtacaaaaggtgaaaacaaggcgttttcggttgacaagggtatataa

SEQ ID NO: 254 - DNA, 17565 bp, unidentified
  source 1..17565: mol_type = unassigned DNA
tcaatccgcatccactacgacaaattcatcatctgcttttaggcgtaagcgatggctgagaaattcttcgatcttgaattcatttcttttgtcatagtctgcggttaatttgaagttcggatgttgcgtgagatcatatttgtccgacaaaaatggtcgcacaccacgcaactgcaagatgcacttgctgccatcgagtaccgcaagttcatccacggaagcaaggtctttaccgagcttttgataattcattccgtaagacggactgttacctcttgtgtttgatgtgttaaacgtatcaatggtttctttcccaagcgcctgattcagctctttcagagtagtaggttcagagccaccaagaaagatacgggaatccatgttgccaatgatggtatccgcattgtccttatagattgctttcagctgagattgtgcctgtaataccagacaagcggaaatttcacgacttcggattgtggcaaccagtttttccagattgggaatctgcccgatattggcagcttcatcaatcagacaacgcacatgaacaggaaggcgaccgccgtacacgtcatctgctttctcacacaacaggttaaaaagttgggtgtaaatcatggagatcaggaaattaaaggtactgtccgtatctgacatgatgagaaatagggcagtctttttatcacccaaagtgtccagctgcaactcatcataggcagttacatcccggacttcctgaatatcaaaaggagccagacgagcgccacaggaaatcaaaatactttttgctgttttgcccgcagccaatttatattttttatactggcggacggcaaaatggtcaggctttttcttttccaatgcttcaaacatcatatccacaggattttgaaactcctcatcgtcctcacgcacctccattgcgttcaagaactcaatcaaagtagagaagttctgctcctccacaggtgcttcatagtggatatatccgatcaacgcacagtagagcagggtttctgcctttgtccaaaactcatccccggcttttccatctccttttgtattggcgatcagtgtagtcaccaatttcaaaatatctttttccgagtggatatacgccatcgggttatagtgcatcgactttttgaagttgatagtattgaaaatcttgatgttgtagttgttcttcaaaagggcattgccacattcgatgacgatactgcctttcgggtctgtaactacatacgaactgtgcatctgaagcaggttcggtttgagccaaaatcttgtcttacctgaaccggaaccgccaacaatcaaaacatttttatttctggcattggcaggatttttcggacggttactcatcatcaatcgttctgtttttgtgagaatcacattgtcctcaaactttggagccataaaaggttcaatatctttggcggttccccaacgtgcagaaccatactcaacattgtggcggtacttttttgcattttttcctcgcagatatactgcaagccgtaaactggcaccgcagacaataccaatgagcaaatcaagtgggtaaaagctcggcagaggattcccgaatgcaacagagagcgtagaaaaaaggctgaggagttttgcagaactgtctgcaccctcagccatacgccatgcttctccgatatttgttgcaatcaatcccacaatgatatatgggatattcagaatcaggagctttttgatttttcttgtatctatcataaatcacgctcctgtttcttttcacgaatcttcttgggcagcgacgccaccagattcttaaatttactgagttgtgccagcacactcggctttttatccttggtcatggtccttgcctgatgctctttgcagattgcatccaaagcatccgaatcctttgcacgaacaaacacaaaatagcggggaggatcaactgttttatcctttcttacagcaaaatccacgccgtattttttggcaagacgttcaaagtctttgatgccttctttttcaatttctgcattggcagccccctggttctgtcctaacagctttttgaccgattgtttgccgtgaacagctggatctctaccttttcgggctttcaccttttcacggtgctgcaaatatttgcggatacccgcaataatcgtccgcactgtcaaccgagaagtgctgattgccaaattgactgttctgttttctacttcttcctgcaattcttatcacctcctcataatgagaattccagcatcaacgaacctgttccttatgctcataatgcaaattgccatttctgacattggcatgactgataattttaatctgacctttttgctgactctccaaagccttctcataaccggtctgggaaagatacagcctggttcgctcgcctttccaacccacaggcgaatcattcgtgagaacatcaaaaataatcatgtgcctggtatcatcggcaaatcgctgcaagtccatataagaatgtccatgatattctttggcacctgcctttattcgcatttcttccattaactctccaactgttttccccggcatctcatacctccttaaagaacatccctgtcaggactgcttttttgcggaatggcttctgatttcagaggggcatccgcagctttcaccttgtcatccggcaagggaagtgccataatactgcgccccatacggacaaacatttccggctgatggaactctttttcaaatttctccattagttgaggagagagggaagcaaagttctcctcacccaaaccgacaaccagaaaatcaccggcgacaatgtcataaatctgcccatcattatcccgtaaagcccggttcagttcgctgccattcagctttccttcgtcattaacgatcaatgccaccggttcattgtagggatagaccgcttctatatcgccgccaacagctttctgcaaatcttccagctcgccgcctatctgaaccgcctggggatacattcccggcttgacgagcaaaacatccagctgttctttctgttcctgcacaatttcacgttcagcttttgccgaaaaatccacaccggtaaaattttcagaatcgaggatatgttcggaattgtaatattcctcctcaacttttgcttgtgcagcttccattgattctgcttttacagttaccgtcttttcgagggtttcggtgattttgatgtcatattctttcaaatacatctacctccgtttctttcggatataacaaaagcgactatccacaagccttacagctcataaatagtcgcttcgttttcccactggggaatacacatttcttccagttcctcggtcagactttccggtgtaaagaacaggtcgtctctgtccttcagcagtttcacaatcgagcgatactccgtagcatagtagaagtcaccggacttgatgaccatgctgacgttgtgtaccagagcaaaactcatatcttccagcagccacagctcccgattataggaagtatcggtcatgtcgtaaatgccgatttccatatccgaataaatcagacaagctctctgcatgaacagttccttgccacggtactcgaatccacggtcgatattggtttttacgacatactcatacggtgtttctgccttatctcgcagagccatacaaacttccggcagacacaaggcagcacagccgacttcttcttcatcatacgcttcatagtcctccggctgaaacagatcaaacagccatttcaaagcatcgctcatttctttttctgtaaacatttatgtgtcctccttatctctccatagatttctcacgttttcgttgccattgttcgagcagtttgataatggtgtcctccatttgctttggggtataagatttggggaaatacttacgaagtacatcatgtttaattgttaccctatctaattcaccctttttttcctcagacatgatcgcacacatggcatccaaactgcattttccttcctggctaaattttttcagacgttgcgcctgggacagagaaggggtggattgtgcatagtccattgcttccagaaagtcttgctgttcctctggtttcagataagaaatttcgaccgcagggttaaaggcgatcttcttttcatctaccatatccaacagctcaggaatgagatttgtgagtcgaatatagcgttttacattgtcactactcattccgctttcttcacctatgatggcggtcgttaacttcggtgcaacttgcaccgaagttaaatcagtgcgcataccctggcgcttcattgcatccaatttcattttgaaagcaaaagctctctcactggggaggagtgtttccctttgcagattggaatctaccatcaaaattgtggctgcatcatcgtccatatcccgtacaatcaccggcatggtgtctttgccagcaagctcagaagcatagtggcggcgatgtccagcgattatctcatatccaccttccggacggggacgggcgattgcaggagtcataacaccaaactgtgcgatactttcgacagttttctgcatagcttcatcatccagcactttgaaggggtgtcccttaaaagggtggagttcagaaagcggaatttcctgcactcgttcctgttgagcttcctctcgtgactggtcggtctggaaaatatcatcgtagctgctcaagctgatgtttccgccttttttcggcattgctcaacacctccttcgtcaatactcgataggcatcagctactttgcctttcggatcatgcttgaaaatactggttccttctgcactgatttcttcagcacgaaccgaacggggaatatctgtcttataaactttgagtttgccaccataattttcccgaatcagattactgatgtctttggagtaattcgtgcggctatctaccattgtcagcagaatgccctcaattcgcagcttcggattgatttggcggcgcaccttattgatagtctgtaaaagctgctccaagcctttcgcagggagatatgccgcctgaactggaatcagtacgttgtctgccgcagccagtgcattaactgtaagcatacccaaagagggcatacagtccagaagaatgaaatcatagttctgttttacggtatccaggtattgcttgagaatagtttctcgactcatagcattaaccaacgatacctccaaaccggataactcaatgttggcaggcatcaagtcaacaccttccggatgatgcagaatgccttcgccaggagcaataggctgctctgaaaggatttttcccatcatatccgataatgttggagaaagctgatcaggaacaggatgaccgaggcaaatagtgagcgatgcttgtggatcagtgtctaccaaaagcacttttttaccttccattgccaaaccaacccccagattctcgcaggtagttgtttttcctgttccgcctttctggttaactactgccatgacagttgcttttgccaaaattcatcaccttacctttcctaattgtttctctcatttctatatcaccacctttcaaattaaaccagaagccatatcatgccgcacatcggcgtcaatttttatatctatcgtgactggagcattatacaaagcagcaagagcatattgtttggggttgcggattttggttgtgttgtccttaaagcagtctagtacatagcgaatgtgctcggaatttaacttcatcaaacgacttcgtacaacctcagctggcttatcatcactggctacccgaattaactttcgtttgctacatacggtttcaaccaatatttccaaaatgctttccaggacttctttatcatagggaaattccctgaaaagatagtccatttcaagttcttcataaaaatactgatagtagctctgaaattcctcatccttttccacatcccttccagaaaaatcggaagataggataggatcagtatcactatactcagtatctttaatatcagtattattaccttgtgcttttgacaactcttgaagtgttttatcgacagttccagaattgtccttttgacaattcaagaattgtctttccacagagttatccacaaagttttttacatagatataattgggcttccccagtccaatacgtttgcgttcgatcaagccacatttgttttccagctcatgcaagagctttactgcttttttctctgcacatccaagtgcgcctttaatttcttcaatcgtgaatatgatgtagacccgaccaagttcatccacccatccgttttttgccgataaattcatacggtcaagcataataccatagagcagttttgcatcagaagatatattcgagaatttttcgtctgtaaacagaactttgggaacccgatagaatgaaaatagctctgcctgctgtccatagaaataatcatacattgctcctcctcaccgcctttttcctgaagaatctttctgtgcttagaggagccattttaagagtgccatccctgatacgataaggacagcgaacaaggatcatcgccagtaatcgcaacttcattttccatcacccctttccgatgacctcacgcaagagctttttcgtacaccacccaatgcaaggctgcgctcgcccataagggcatccgtcacaatcacttttagatttaggtggcgatgaaatccgatagtaacagtttgctttgcccagactgcatccttttcttgtgtttttccagtagtagcagtatcgacagtcgcttggtttatcagcggcatattgtgttttcatgattcaaaatacctcctttcttccagtcgcttcagaagcagtctggaaacaaaaaaagagtgtctattcactccctaaaagggagaaataaacactctatgtaaacgaaaaagtattagattgtatttggtataacggcttaggacacgcaacatccacctttttaattagcaagtttttttgcagcaatttggctccaattagcaggaatgcctttctgattagcaaaaacaggctttttcttgctaatgattagctggaaattttgttttttcaccagagttcgatgtctgtttgtggtgctacaaaaaatttttttaagtaatcacagctctaagattagatgcggtgctcatctgcgactgaaaacaaataaagccgaaaacccttgaaaataaaggctttcggcgttatgagctggcgtccataagaggatttgaacctccgacccctcgcttaggaggcgagtgctctatccagctgagctatatggacgtgtctaatatatgattatagcccgaccaaagtcaaactgcaatcccttattcaattttatccagttgagcgttataacatgaccttaggaggcggacgctctatccggctgagctacgaagacgtgtattaaatttacgattattctaccacattaccatacactttccgatcaaaagtgtgtgttgcaacatattcttaggaggcgaacgctctatccaactgagctattggcacataacataactattgtatatgatggcttgcgatttgtcaagaaattgggaaattttcttattttactgaatattcaaaaaaattaaaaataagtgttgacaaatggagaaacttgtgttagaataaatcttgctgaaatgctgaaaggcaagatgagcatacggagaggtgtccgagtggtttaaggagctagtcttgaaaactagtgatcccgcgagggaccaagggttcgaatcccttcctctccgccattttattttatagtgaatttaaacttcacacggaggattactcaagtggtgaagaggctcccctgctaagggagtaggtcgctaacgcggcgcgagggttcaaatcccttgtcctccgccaagaaaaaagcacttgcttttgcaagtgcttttttcagtgaaataaatccaaaaggatttgtgaaatacctatcggtgtgaaatatggattttccatgtgaagtgcctgacggcgtgaaaggatttattttatttcactttctgcgtaagcagaaaatttcacaatacaatagtattatttcacatacgaagtatatttcacttgttataaattaaaagaggttcgtatggctgaatcaaagcttagagaattatcaattgatttatataaccggtgcggcactattcgcagaatattggttgcatctattaatactgcaaaagaaaatttacaaaaggaaaagattaattcaaaatcaaaacccaatatttccgtataatagcattaccccgattgacaccaaacttaataactggtaatataaggctgtgagaatatttgtattcttgcagcatatttttttaccaaaaggaggatggattaatgggatttttattaggaaagaccgctgttattacaggcggaggaagggctgttctcagcgacggaggttgcggttcaatcggctacggcattgctgttgcttatgcaaaagagggtgcaaaccttgttattacaggcagaaatgtcaaaaagcttgaggatgccaaagaagagctcgaaagactttacggagtaaatgtgttgcctgttcaggctgatgtcagcaaggacggcgataacgaaaaggttgttcggaatgttgttgacagagctgttgaaacattcggcggaattgatgtcttgattaacaacgctcaggcttctgcgtcgggcattacgcttgctgatcatacaacagagcaatttgaccttgctgtttattcgggattgtacgcaaccttctattatatgaaggcttgctatccgtaccttaaaaagtcaaagggaacggttataaactttgcttcgggtgccggacttttcggaaacttcggtcagtgtgcatatgcagccgcaaaagagggaataagaggtcttacaagagttgccgccaacgagtggggcaaggacggaataaatgtcaacattgtctgtccgcttgcatggactgctcagcttgaaaaatttgagcaggcttatcccgacgcattcaaggcgaatgtaaaagtgccgccaatgggacattttggtgatgtcgaaaaagaaatcggccgtgcctgtgttgcacttgcatcacctgatttcaagtatatgagcggcgaaaccatcacccttgagggcggaatgggactcagaccgtaactttatttttaaaaaattcttttgttccgttattcggtaaatcattaaataaaatataaaacatactaatatgagtattgaattttttgttcatatgatgtaatatcaagttacggagtacatacaaaaattactttgaggtgattgtatgggaatttttgatataaagaacacagatattttcagcaaggattatgactctgcaaacgcatggcttgagtataacatttttaatgaatgtacaaaggacgaaaacggagagtcatttgatgagtctgatgaaaataatttttgggattatttaaagaaaaataaataaataataagttacaaacagcgaccgcagagtgatatactttgcggtcgcttttatgtgttgttcacacacaaggacactcggcataatatgagggtgtagagaataacttgatttacgggtgttgtgtatgaaaaagagcgacataagaacatttggcataatcggcggtgacaagcgacagctttttcttgcaaaatcaatttctgacagttgttacgatgttttgctcggcggatttgacagtcttgaaagctacggttcattgagcctttgcaatgttaaaaaggcaatttcggaaagtgacgcattgatttttccgttgccgtcaataaggacagacggaagtcttaacactccgttttcaaacgagaatattttgcttgacggtgacgatattgaaattatccttaaaaagcctgtttttactacgatgaaaagcagatttttaaaggcatatccaaggctttccgacggtgaaatttttgattacggagcaagagatgattttgcaattctcaacgcattgcctacagcagagggtgcaattgaatgtgcaatgagagaatatgagggtacgatttcgggcagtaagtgtcttgtgacgggattcggcagaatcggaaaaattcttgctcacaagcttgttttactcggggcaaatgttaccgtgagtgcaagaaagccgtcagaccttgcatatgtaaaagcactcggctacaatgcacttaatacggaaaatctcagaacggtaaagcggtttgacattgctttcaacacaattccgaggttgatttttgacagggaacttcttatgaataccgacacaaacacccttattatagaccttgcgtccctgccgggaggggttgattttgataccgccgaaaaactcggaatttatgccgttagggcattgtcgctacccggaaaatgtgctccgaaaacggcaggagaaattataaaaactactgtatttgacatcatcaaggaggtttacaggtgacaaaagcaaccataggatttgcaatgtgcggttccttttgcaccttttcaaaggcttttacgcaaatgcagaggcttgttgactcaggctatgatgttattccgataatgtcgcaaaatgccttttcaacatcaactcgtttcggaaaagcggaggaaacggtaaagagggcagaagaaataacgggcaaagctgttctgcactcggttgtgcagacagaaccgataggacctaaaaaaatgtgcgacttgcttgtgattgcaccgtgtacgggcaacacgcttgcaaagctgtcgctcggaattaccgacacggcggtaacaatggcggcaaagtcgcatctgagaattttaagacctgtgctgttgtgcgttgcaacaaatgacgctctcggtgcgtcggcacagaacatcggcagacttctcaacactaaaaatatttacttcgttcctttaaaacaggacgattgcatcaagaaaccaaattcgcttgtggctgattttgataagcttgaagattgcgtaacccttgcgttgcagggaaaacaacatcagccgatttttttataacagaacaacagccgtcttgaaatgcaaattttcaaaacggctgttattttatgtttggattgtctgtgcgacaggtcagataatcaaggcttgtgccgtagcagtcggcaagtttaatgagcagggagaggggaatttctctttcgccccgttcatattttgagtacagcgactggtcgcacataagaacctttgcaatttctttttgcgtaaggtcattgtcctcacgcaaatcttttattctcagtttcattacatcaccgaataaattataaaatagtacatagtagcctattgacttttaggacaaattgtcctaaaatataattgcctgaaaaatgagaaaacaaacggcattgtctttgcggtactcatattcatataatcgtatttatcataaattgtgtattattatttgcacaagtgtccaatgagtcgcaaatacgagttgatgattactttgaaaaatttaattcaccttaaataagagcgttgcttaaataaaaataatattttatctgtatatatattgacaaataccgcaaaatgcagtaaactaatggcataaaatatcataaaaatcccgaagagcatcttcgggacgaatagcttgccgatttaattgtgcgtataattcggtaagtctttgttgtcagtcagccccaaaatatagtcggtgctggtgtgataatgttttgcgaggcaaatcaaaacaacggtggggatatcacgctgaccaagttcataattgctgtaaacctgttgtgaacaatgcagaattttgctaacttctttttgcgtgaggtcggcatcttccctcagttccctgattcttttatacacagaattcacctcgcatacagtatagcataccgcagattgttgtattgcaatataccgcaaaatgcagtaaaacagcaatggtattttgggttaatttttaaataattattcagaggggaatggtgtttaaaacaaaaatattaatcttgcatatcagataaaacaataaaatgatggaggaaattatgagaaaacattcaaaatttattacgattttgctgtctgctttgttggcggtatgtcttgtgcagacagtatttgttcaggcatttgcaaccgaaaactcagcaacacctgacgaacctacagaggatttgtatcctgtttcaatggaagttgttaaagaacccgaaagcgttactgttaataaaggtcaaattaccgatagcactttctggagcaatgttgtgttgcacattgtttacagcgatggcagggaatttgatgtgaactgtgacggcattaacagcgagggcggtattgttccgcccattgcagaaattgacggctataagggaaaaatatactatggtacaaattctgaaaatgaggatacaatcagtttttatatagcatatgattatgccgaagatgatggagtgacatgtatagtttcagcggatttttctgccgagaaaaaggtagatccacatactattgtcagatatgaattaacaaagcttcctgatatggtattcacaaagcccctttacacaggcagtcgtgatgatatttcgtctggggaggaatggaatgagtggatgaaatctcttgatgtcaacaattctatttctaatcatattgacggtatggaaattacatactattatgcaaacggcgaaaaacgcagtgtggtagttaatagttcaaatctcaagagtattgcttttatgccgtggtttgcaatgtatagagtagagaattacggtgaatttgtcgatgaatacggaaactatttattgtttcaggtagacgatttaggtgattacaaattttcggtatctttgggttcttctgatactgaaatgatttacacagcaaaatcggtagataatcctaacccgtcaattaagcctgtaagcacagaggacactcctgcaaagccgagcgataacatttcatccgcaacaagtgatgttgcaacaaatgacaatgcaaacactaacaacagcacaaacggcacagccaacaacggtgttgttgcaacaggcaactttgcaactcctgcaattatcacagtagttatgctttcggcagttgcagttatgtttgtatttaaaagaaaaagaatgttttaattttgtgtgattgtgtgaattaattttattgccatacaatttttcaaagcacctggcattaatttgtcgggtgctttttgtatgatgaatgatgcggttcgccgctacagaatggcattatctttgcggtatttatataatcgtatttatcataaattctgtgccgttactcgcgggcgcccaatggtgtgcagtgtagtaacatagtatacaacagtgcaaagacatagtatacagttttatgataaaataaatggcaagaaaatagcaaatgaaggagctgtttttatgccgtgggagtgtaaaactgtggaaaaacaaagattagaatttgttacaaaagcattagaaacaaataattttagtgctctatgtcgggaatatgaaatcacacgcaaaaccggtcgcaagtgggttgatagatttaaacagggactgcccttaactgatatgtcacgcagaccattatgttctcctaacaaaacgcctgacgacattgaagaattaatcgtttctgttcgtttcgataacccgggttggggtgatgataaaattaaaatttttcttgaaaatcaagggtataaaaacattccttgtccaagaaccattactaacattcttcataaacaccaactcatatctgaagatgaatctctcaaaagaaagccttttaaacgctttcagaaagaacattgcaatgatatgtggcaaactgatttcaagggagagtttttaactgccgataatcgttattgctatccattaactattctcgatgacagctcacgatactcaatcaaaatagcatgctttcctaacactaaaaatgtcgttattaacgcttttaagcaagctttttatgagtttggtatgccatcaagcgtactttctgacaatggttctcagtttgcaggttttaaacatggatttactatgtttgaaaaattccttatgaacaatgacattcttcccatacattgcagaattaaacatccgcaaacacaaagaaaaattgaacggtttcatggcagtatgaaaagagaacttttaaatcataatctattcaagaacttggattacgctgacaaggctctgcaagagtggcgaactaagtataattgcctgcgacctcatgaagcacttgggaacaaatgtcctgccgatgtctatactcacagcgaaaggatttttgctgacaaggtggagccgtttgaatatgaacccggctttaaagtcataaaagtaaattcgtggggatatgtccgttttcagaattttcaattatatcttagtgaaactttcatcaatgattatgttcaattcagacctaatccaaacaatgattcatttcttgtttgctatcgcaattttgttattgctgagtatgactcgtcatccggcaagcgtattcaccgcaagatttcaagattgtgaatttgtataccatgtccttgcacaggtggttaccatgttgcacttgacaaatgggacgcccctacagaatggtattatttttgttccttttataaggtttgtattaccgtaatgtttgcacttttactttttggcggtcacagaccgttgctacaaaattaaatttataacaaaactgcacaaaaatttatggataaagacagtgtggggtattgctcatgctgtctttttgtgttaaaattgtagataacaaaatgaaataacgaaggatttgtctatgaaatattgttcaaaatgcaagcgactgcataatgatgaagaaacagtctgcaaaaactgcaaggctcagcttaaaacaataaccgatgaaaacactcccgtgtatctgctcacggcatcgggctttgaattgcagagagttaaagccgcacttgaggacagcaccgttccgtgtgacgctacaatcaaaaaatgtatggaaaataaatacagtaaaagcattaaggcatacacaggctatgatgatttgacctatgatgtctatgttccgtattcggcttatgaaaaggcattcgacacctgtgtcggaatcggcgcaatcaagcttgagggcgaagaaattcttgacgaagatgttgaatacaaagaaaatgacggtgaaacgcttgacgagcagtttgagaaaatgacgggtgcaaagcgtacaaccgtaagaattgtcagcgcattactgcttttgcttatagttgcaggcgttgtgttcggaacagatgcaataatgaactttattaaagaatttttcggataattcggtatccgattttgagttaatatttagttaaaatgaatgaaattacggaggattttttacaatgaaacaggaaacaaagtgtttgcattccggctatgtgcctaagaacggagaaccaagacagatgcccatttatcaaagcaccacctttaagtatgattcaagtgacgcaatgggcagactttttgaccttgaggacagcggatatttttatacccgtctgcagaacccgtcaaatgatatgactgccgcaaaaattgccgaccttgagggcggtgttgccgcaatgctcacatcaagcggtcaggcggctaacttctttgcacttttcaacatctgcgaaacaggcagtcacattgttgcatcatctgcaatctacggcggtacatataatctgctcggtgttacaatgaagaaaatgggcattgatgttacttttgtcgatcagaatcttcccgaagaagagcttgcaaaggcattcagaccaaacacaagggcaatgttcggtgaaacaataaccaacccgaccgtgtctgttcttgacattgaaaagtttgcaagacttgctcactcacacggtgttccgcttattgttgacaacacttttgcaacccctgtcaactgtcagccgattaagtggggtgctgacattgttactcactcaaccacaaaatatatggatggtcacgctgtttctgtcggcggtgcaattgttgacagcggcaactttgactggctgaaatatgccgacaaatatccgggacttacaactcccgatgattcatatcacggcattgtctatgccgaaaaattcggcaagctcggctacattacaaaggcaacttctcagcttatgcgtgacctcggttcaatccagtcaccgcagaacgctttttatcttatgaacggtcttgaaagtcttcatgtgagaatggaaagacattgcaaaaatgctcttgaaattgcaaaattcctcaaagccaatgacaaggttgcatggattgattatcccgaccttgaagatgacaaatatcacgcacttgctgaaaagtatcttccgaacggctcatgcggtgttattgcttttgcggttaagggaggcagagattgtgcggttaaatttatggacagcttaaagctctgcggcattgctactcatgttgcagatgcaaagagctgtattcttcatcccgcaagccacacccaccgtcagttgaccgatgaacagcttgttgaggcaggcattgcgcccgaccttatcagactttcggtaggtcttgaaaatgttgatgatcttattgccgacatcagtcaggctcttgataagatttgattttctttaaaagaaattatatataaaattgcaaaataaaattacggagggttgaatatgtcagcttttgtatctgcggttattgttgcggcaggcggttctgtgagaatgggaattgccgacagcaagcagtttattccgcttttgtcacgacctgcaattgaatacaccctgaaagcattccaaaaatgccaccttgtcaaagaaattgtaattgtctgccgtgaacaggataacgacagaatcaataaaattatcgagcttaacggtttcagcaaggtttcaaaacttgtcaagggcggtgacagccgtgccgacagcgtgcgtaacggaatcggtgcgtgcagtgaaaacgccaaatactatgctattcatgacggtgcaagaccgcttattaccgttgaagaaattgagcgtgttgttgaggcggcttttgatacgggtgcggcaactctcggaacttccgtaaaagatacaatcaaggttgttgacggtttcaataatatagaaagcactcctatccgttcacagctccgtgcagttcagactccgcaggtttttgagcgtgatttgtaccgctttgctcttgaaaatgccggcgataatctcatcaactttacagacgattgttcgctgattgaaaacatgggcggcgaggttcttgttgtaaagggcaatgaggaaaatattaaactgacaaccccgattgatattgtgattgccgagagtattctcaagtcaagacaacagggttga

SEQ ID NO: 255 - DNA, 21002 bp, unidentified
  source 1..21002: mol_type = unassigned DNA
ttgcaaaggcggatactccgactctatgtcggcccgtgtcgtagacttgtttgctcccatcggcaaaggtcagcgtgccttgattgtagcacagcccaaaaccggtaagaccatcttgatgaaagacattgccaacgccattgccgccaatcatccggaagtctacatgattatgctgctcatcgacgaacgcccggaggaagttaccgacatggcgcgtaccgtcaatgcggaagtaatcgcctctaccttcgacgaaccggcagaacgccacgtgaagattgccggcatcgtccttgaaaaagcaaaacgcatggtggaatgcggacacgatgttgtcatcttcctcgactccatcacccgcctggcacgtgcctacaacaccgtatccccggcttccggcaaagtgctttccggtggtgtggatgccaacgcattacataagcccaaacgcttcttcggtgcagcacgtaacatcgagggcggcggttcactgaccatccttgccactgccttgattgacactggctcaaagatggacgaggttatcttcgaagaattcaagggtacgggtaatatggagttgcagctcgaccgcaacttgtccaacaagcgtatcttcccggctgtcaacatcgttgcctccagcactcgccgcgatgacctgctgcaagacaagcagacactggaccgcatgtggattctccgcaagtatcttgccgacatgaatccgatagaagccatggacttcgtaaaagaccgtctggagaagaccaaagacaacgacgaattcctgatgagcatgaacagttaacaacaactgcatacagatattgtacaaaagcttccatttacgttcataaacgtaggtggaagctttttttatatccgttttttcatacatttgccaccatacaataaccttgaacaaataaaatccaaatctgatgaaaacgattcactcttttatgggaatggcattgtgcagctttccggtaatggcacagcaatcgcccaattttcttattatccaatgcgaccatctgacccagcgggtagtaggcgcatacggtgccgaccccagctgcactccacctatagaccgaattgcctcccaaggtgtaacatttgccaacgcatacgtgggatgccccctcagccaaccgtcacgcgctgccttatggagcggactgatgccgcatcaaaccaatgtacgttccaactcggccgaacacatcaatcctccgctgcccgacagcattccgaccctgggaagcctcttcaccgccaacggttatgaggccgtccactttggcaaaacccatgacatgggttccctaaggggattccgccacaaggaaccggttgccaagcccttcaccgaccccgaatttcccgtcaacaatgacagctttctggatgtaggaacctgcgaggatgccgtggcctatctcagcaatccgccgcaagaacctttcatctgcatagccgatttccaaaacccgcacaatatctgcggatatgtaggcgaaaataaaggggagcacatagatagccccatcagtaccccactcccgctactacccgaaaactttgaagtggaagactgggaaaaacttccgttgcccattcagtacatctgctgcagccaccggaggatgatgcaagccgcccactggaacgagggcaattaccggcactacgtcgctgccttccagcattacacgcggatagtggccagacagatagagagtgtactggaagccctctactccactcccgccggcaaaaatacaattgtcattgtactggcagaccacggagacggaatggggtcacaccgcatggtaaccaagcaggtcagcttttacgaagaaatgacaaatgtgcccttcatcatagccggtcccggtattcatccccgtcaaaaaccggtggaagatttactgacccaacccactatcgacctgctgcccactctctgtgaactggcaggcattccggtgccttcctccaagcccggcatcagccttgcccctttcctgaaaggcgagaagcaaaagagacagcacccctatgcagcctccgaatggcacagtgaatacgaagtgaccgtcagcccgggacggatgatacgcagtcccagatacaaatacacacactatctggaaggcaacggggaagaactgtatgatatgctgaaggataaaggagaaagacgaaaccttgcccatgaccccaaatactcaaagattctggccgagcaccgggcactgctggacgactacatccgccgcacacaggacgactaccgaagcctgaaagttgaagccgacaagagatggcgcagccacgcaccgggatatcccaaccacgaaggaccctgcgccagagacattatcaatagaaagtaagcaaaaagaactaaaaaaaacagaataatatagatgattatcagtgccttgaccggcacttccattcttttcgcccatcccgctgcaagtcttcaataatattctgcttcaaaagaaggcagttaaagggattttttgtacttttgcgcctcaataagagtaatttgtaatttagtaattgtaattagatactatgttcgataatttaagcgagagacttgaaaggtcgtttaaaattttgaaaggtgagggcaaaatcaccgaaatcaatgttgcggaaaccctgaaagacgtacgtaaggcacttttggatgccgacgtgaactataaggtagccaaaaacttcaccgataccgttaaggaaaaagccttgggacaaaacgtgctgacagccgttaagcccagccagctgatggtaaaaatcgtgcacgatgaactgacccagctcatgggcggcgagacttctgaaataaacctcgactccaagcctgccattatcctaatgtccggtttgcaaggctccggtaaaacaactttctccggaaagctggcccgcatgctgaagagcaagaagaacaaaaagccgttattggtggcttgtgacgtgtaccgtcctgccgctatcgagcagttgcgtgtactggctgaacagattgacgtaccgatgtactcggaagcggacagcaaaaatccggtagccattgcccaaaatgccatccaagaagccaaagccaaaggttacgaccttgtaattgtcgatacagccggtcgtctggcagtggatgaggagatgatgaacgagattgccgccatcaagaaggccatcaatccggacgagattctgttcgtagtggattcaatgaccggtcaggatgcagtgaataccgctaaggaattcaacgaacggctcgacttcaatggtgtagtattgaccaaactggatggtgatacccgcggtggtgccgccctttctatccgttcggtggtaaacaagcccatcaagtttgtaggtaccggtgaaaagctggatgccatcgaccagttccatccctcacgtatggccgaccgtattctcggtatgggtgacatcgtatctttggtggaacgtgcacaggaacaatatgacgaggaagaagccaaacgcctgcaaaagaagattgccaagaaccagttcgacttcaacgacttcctgagccagattgcacaaatcaagaaaatgggtaacttgaaggaacttgcctccatgataccgggcgtaggcaaagccatcaaggatatagacattgacgacaatgccttcaagagcattgaagccatcatctactccatgactccggaagaacgcagcaatccggccattctgaacggttcacgccgtcagcgcattgccaaaggtagcggtacgaatattcaggaagtaaaccgcctgctgaaacagtttgaccagacccgcaagatgatgaagatggtcaccggcagcaagatgggtaagatgatgccgaaattaaaaagataagataatagcctatgacactgattgatggaaaagcaatttcagagcaagtaaagcaagagattgcagcagaagtagccgagatagtggctcgtgggggtaaacgtccgcatctggccgccattcttgtaggacacgatggaggtagcgaaacctacgttgccgccaaagtaaaagcatgcgaagtttgcggattcaagtcctcacttatccgttacgaggcagacgttaccgaagaggagctgcttgccaaggtacgcgaattgaacgaggatgcggatgtggacggtttcatcgtacagcttcccttgcccaagcatatctccgagcagaaagtgattgaaaccatcgactaccgtaaggatgtggacggtttccatcccatcaatgtgggacggatgtccattggtcttccctgctatgtatccgctacccccaacggtatcctcgaactgctgaagcgctatcagatagagacttcaggcaagaaatgcgtggtattgggacgcagcaacattgtaggcaaacccatggctgccctgatgatgcagaaagcctatcccggtgatgccacagtaaccgtatgccacagccgcagcaaagacctggtaaaggaatgccaggaagcggacatcatcattgctgcgttgggacaaccgaacttcgttaaggcggaaatggtcaaggaaggtgctgtcgttattgatgtaggtactacccgtgtgcccgatgcctccaagaaatccgggttcaagttgaccggtgatgtgaaattcgatgaagtagctcctaaatgttcattcattacccccgtaccgggaggcgtaggtccgatgaccatcgtttcccttatgaagaatacattgcttgccggcaagaaagcaatctaccaataacaacgtaatgaaaacgctcgccgtcttcattgctgtcttactgtatagcgtaatcctttcctcccaggaaaggattacgctattatttgtcggtgacctgatgcagcaccaggcacaaatagacgcagcacatgtatctgaaggaaaatatgactactcctcctgcttctccctcataaaagagcaaatatcccaggcagacctcgccataggaaatctggaagtcacattggggggcaggccctatcggggctatcctatgttcagcgcccccgatgaatatcttcaggccataaaggacgccggattcgatattttactgacagccaacaaccactgtctggaccgtggaaaaaagggaatggagcgtaccatacaattgcttgactcctccggtattcgttacgcaggcacctacaagaatctgtcggagcgcaggcaacgctatcccctgttcatcaacagaaacggctttcgcattgccctactcaactatacttacggcaccaatggtatcaaggctacctctcccaatatcgtaaactatattgataagaataccatcctgcaagatatccaaagtgccaaggcacgccaaccggatgccattattgcctgcatgcattggggagaggaatatcagtcccttcccaaccgtgagcaacgcgaactggccaactggttgctccaacaaggcgtaacacatattatcggttcacaccctcacgtcattcaaccgatggaactacgtaccaacggtaccgaacagcacatcatagtctactccttgggaaacttcatttccaatatgagcaaggccaacactgacggcggcctcatcttcactttgcagttggagaaacatcctctcccccaacccatccgtccctcttacaccggtcagagtcagacgcccctgccagactccaatcctctgccttttccatactgtcgtgtttcctattgtggatataatctggtctggaccggccggccggaacttactaaagaaaaaaattacattctttatcctgccagttttcctacagaacatttaacgccggaagctcgtaaacacctggaaatctttgtcaaaagctctcgaaagctgctccagcagcacaatataggtatctacgagaagaaaaaataatgcagaaatctcaaaaattttcgtctcattctttgcaatattaaagattatccctatctttgcaccgcatttaagaaatgcactaacatggtggctgtagttcagttggttagagcgtcagattgtggttctgaatgtcgtgggttcgagtcccatctgccacccgcaaagaagaggaaattcgaaagaatattcctctttttttgttattgtccaaacaatcccccaaagggaggcaacgtggaatcaatgtaaaaaattgtagggatactcctcacagagtatccctacatcataggaaggaatcaattacctaaaccagtccttgtacaaaagagtttactttctcaaaatgttcaaaatagcaggaaacttattccgatattttgcattctgtatcaatcacacttaatagtacttccttccttactttatcaagccagtgataagacaacccgttatcaccttatagaaataagaatacaaaaagaatatttcatctttcaaaaaacattctataccaataactctactattttcgatttccgacatgcaaatataaccctttttgtttatacgaaaagcaaaatcagttatctttgcaaagatgaaattcaatcaaatatgaaaattctctggatagacctcaatagctcgtatgcacactcttcgttggcactccctgcactgcacgcacaaatagcaaagaacaattccgtaaaatgggaaatcgtatctgccaccatcaatgaaaacgtaggaatgattgtcgacgaaatataccggcaccaacccgacatcattgccgcaacgacatggttgttcaaccacgaacaactgttgcacatcacagcgagattaaaagcattgcttcccaatagctgcttcatcttgggtggacctgaattcttaggaaacaatgaagactttctgcataaaaaccctttcatcgactgtgtattcaggggagagggagaagaagcattcccccaatggctgtcttgctggaaccagccggaaaaatggaacagtattccgggactctgctatatgaatcctcaaaagcaatatatagacaacggcatagcccgtgtacttaacttttcacggctcgtaccaccggaaaacagctgttttttcaactggagcaaaccattcgtacaactggagactacccgaggctgtttcaacacatgcgcattctgcgtcagcggtgaagaaaaaccggtgcgcacactgtccattgaaagtatccgtgaacgccttcaaattatccacagtcatggaataaaaaacgtacgcgtcctcgaccggacctttaattataatccgcgccgtgctaaagaattactgcaacttttcctggaattcaacccggacatatgctttcacttagaaatacaccctgcactattatccgaagagctgaaaaatgaattgaaaaagctacctaaaggattgctccatctcgaggccggtattcaaagcctgcgcgaaccggtcctccagaaaagccgtcggatgggaagcctggaggactcactgcaaggtcttcgtttcctatgttccctacccaatatggaaacacacgccgacctcattgccggcttgcctctataccgcctatccgaaatatttgaagatgtgcgtacacttgccggatacaatgccggcgagatacagcttgaatccctgaagttacttcccggcacagaaatgagaagaagagcggaagaactaggcatccgatattctcctctccccccttatgaagtgcttcaaacaaatgaaatcagtgtcaacgagcttcaaacagcccggcaactgtcacgtcttctggatggattctataacacaactgcttggcaagccatcacccgcaagctgattctggatgacaacgacttcctacgtcgctttctggaatttttaatcgataaaaatcttatagaccagcccatgagcctggaaaagcgaggcctcgtactctatgaattctgcagtatgcattatccggcctataaaatcatggtcaccattgcctggatagaggcaggcatgtcattaaagaaaaaaccagcagagaaagtcaagaccaagcgccagatgccaccggaatattgggaagtcatctatggaaactacaaagaaagcctccgcttatgttttctacccattgacgacaatacccaaaatggttattggttcggcttcgaatcggaaatacaaaaagcagaaccagtattcaaagccaaaggaataatggagaggtatcaaaatacacaatcaccgcagattaacacagataaaagttcttgattatcagaaattctatagcaatctgtgtaacctgcggcgagttatgccctcatttcttctcctatccgcagtggaaatacttctcgaccagtttcagcatctcctccggactgtcttgtatctctgcacgcaaggttctatcctcgtaagaacgcagtttggaaataaccccatcaaccattgcaggactgaacacatgatattgctcaaagacagcacgctgtctttccaaacaatcggcagaagcggcacaactgtcaggaagctgttccagttgtttcaacttatcttcattttctttcttgtggatatttacattgacatatgttttttctgcaattcctaaagcatcgtctatctcaaatccataacggcaagctacagcaagtccggcaatcaattgatacaaatcggccgaaccgtcaggcgaacgcatttccaccgtctgtttctgtgtagtatcataatgacttggggtctccaacggatttgccaacatgcacatatccgtttttgccgaccagcccaacggaacgcgtaccaataccgaacggttgcggtcgccccagcaaatattggtcggtgcttcctgatgaggaaccagacgaaaataggaagtaggatttgtattaccgaaagctgtaatggaagaagccagcttcatcatgcccgcaatggccttacgggctgtttcagaaagtgccccatctttcagcatctggttctgcccgtccttcatgatacgcatatgtatatgtaatccggaaccggcttttcctgccgtgattttcggtgcaaaagtaatgttatatccatactggctagccagattacgaataacccattttgctatcaccagttggtcagcagcctcctcggcacgcaccggcaggaattctatttcattctgctcataaatcttatcgtccagcgtaaaattaccgacttcagaatgcccatactttatctgtccgcctgcctgcgcaatatatgacatacattccgtacggaaatcattgaacttggcataaggggccgattcgtgataaccacgctggtcggtagccgggaacaatccgtcattttcagaaatgacataatattccaattctcccatagcctgaaattccatccccgtaaccgtagtgaatgcctgacatgccttacgcagggtatattccggagaactttccagcggttcaccatccttattgaaataagaacagagcattgacagtgtgggcaattcagaaaaagggtctataaaagcggtccggaaacgcggcactacatacaaatcactgctaccggcctctataaacggaaacaagctggaaccatctacgcgttcaccacatgtaagtatggcatcaaggtatgcttcattattgatgacaaagttcagtgtcttcagtctcccgtctgccgcaggatacatgaagttcaccatacgaatgtcgttctcctttatataggaaacaatgtctgctttcgtaaattcggaagccggtttttgaagggcagccaccaatagattggggctcatggataattcctggttcataatacgctgattgtttttagttttctatatggttaacaaaacacatgcaattttctgtcacaataaaaaactgctgtttcgcaaagatactaaaagttgtatcagaaaaaaaacaaacaacctaaatcttatcagagagcctcaaccttttccgtcgtatccccacttcacgtaaatagccccccaagcaaatcctgctccgaatgctgtaaaaatcagtttatccccctttttcagcttatcctcgaaatcccatacacacaatggaagcgtgccggcacttgtatttccataccgttctatattgaccattaccttttcaggagatactcccaagcgttgcgaaacagcagtaattatacgcatgtttgcctgatggggaatcacccagtcaatgtcctccttcgccaagtgattcctctccatgaccgcctcacaagcatccgccatattggccacagcatatttaaagactgtacgtccttcctgataaatataatgcatccgattgtccagtgtatagtaagatggagcacatacggagcctcccgctttgatatgtaaaaagggcagacctttcccgtctgttctcaatacggcatccattactcccatatcctcccgggtgggttccagcatgaaagcggcagcaccgtcaccaaaaataggacaggtagcgcggtctgtataatcaatcaccgatgacatcttatcagctcctactatgacaaccttcttatattttccggaacgtatgaaattcgcccctgcctccattgcatacagaaatccactgcaaacagcctgcatatcaaaagcaaaagcattgttcaggcccaatttgtcacataagatggatgcggtagaaggaaagtgataatcgggagtagtagtagctacgataaccaagtcaatgtcattcgggctggtctttgtgcgctgcatcagttgtttcacagccttacgagccatatatgaagttccaagcccctcctcatgcaaaatgcgtctttcctttataccaatgcgccccataatccattcatcattggtatccaccattttagatatttcatcattagtcaagacatagtccggaacatatcctccaactcccgtaatcactgcattcaaattctccattaatcctatccagtttagtgtaaaatcaggaataaccctatttaaatatgttatcagaatatcacacttttttcagaacagtcgtgtgacaatctttaattaatgggcgcaaatatacgaaaagagaatagaaatcaatgaatctgacaacaaaaagacattaactgtctacaaataataacactttaaaacacaacgggattcactactatccgaaccctgcaggagtacttccgtataacctttctgcaaacaagaagaatgaatacgtctttccttattctttgatgcatatacaataaacaaagctataaagaacaaaaaatccgctgcctgcaacgatggcgcacgattggccgcacaaccggccacatttccttttccagcgaatggagcatcgcaggatgcggtttatgcattatatacgatttctttttcatctgaactaacaaactcaccccctaccccaattcctccctctccctcttgaagtagcccagcaccgtggctagcgtgagacggcagcgttccacgcttttcaggtggccctaaaaggtgtagcgagagcacagcacgaggtagaacctatagttcaagctacggtgcaagcggtgctgaaggcaggctctgacatcttcggcggagagtttcattcctttgtttggggttactttcattgtaatggttattttagaattgactgttgatgtgacggatttgcaaaacgcatcatccatctgtgccggatgcatgatgcacaccgagcaaacggatgatgcgttgggagcaaatgcacgatgcgttttcgctgataaagccttaatgaccattaagggttgttatataatatgatattaatcgctgccggtttggaggttagcggaaaacatgtacatttgcaatgtgtttttcatagtattagatttaaggttaacaaaagattggctgtctgggatagatagcctttttttatgttgttttctgacctgcttcgtggaattaagtttttaatagaaaatactttaagacagacacaaggggataaaaaaaacataaatcattgaatttgtgggacttgtctgcttactgttcggttttgtccggttagttcagcggaaagggagggtattgagtccagacatctaaccgcctataaatcaactttttattttccaaaatttcaaataggtaacgaaacagtaacgatttttgcagggttatttgtccggctttgtctgctgtttgtctgcctatctcacgggttcaaagatacaacacattttttaattacgcaaatctctgaatataaatgtttcagcttaggtgcaaggtgcaagctatatatatagatatatacttgcaccttgcacctatccgaaaaaaatatgctgcaaaatttggctatttaaaatattgttcgtagttttgcgaacaacaaataagaaaggagaattgaagtgaaagagaaacagtacacaacagagcaggaacagattgctcgttttgccaaagcaatggggcatccggcacggatggctattcttgcttttttggcaaaacaagatagttgcttcttcggtgatatacatgaagaactgcctattgctaaagcaaccgtttcgcagcatttgaaagaattaaaagaaactggcttaattcaaggtgaaatagaaacgccaaaagtccggtattgtataaatcgggaaaactgggaacttgctcgaaacttatttgctgcttttttaggggactgcaaatgtaaaggtacatcgtgctgtgaatagcagcacctttttttgaaataattgttcgtagttctacgaattacgattattatattaactttaaagtagaatgacaatggaaattaaagtattaggaactgggtgttcaagctgtaaagcattgtacgaaaccaccaaacaagctatttcagaattaggttgcgatgcaacccttatcaaagaggaagatttattgaaaatcatggagtataacattttagggcttccggctttggtgattgacgagaaagtcgtatcagccggaaaaaagttatcccttgcagaagtgaaagagttgataaccaaataaaaatgaactatgagaaaattattttatctactgattgcaacgctggtcttagtttcctgtggtaatggttcaaagaaaaagaccggagaaaaccaagcggaagaaatacagtctaaccgcatagaggttctttattttcatggagcgcaacggtgtatcacttgccgggcgatagaaacaaatacagtagcccttttggatagcctttattcaaaagaaaaagcagacggtaaaattatctataaagtgatagatatttcaaagaaagaaaatgaagcgattgcagacaagtacgaagttacatggtcgtctttgtttgtgaatggttggaaagacggcaaagagaatgtaaacaacatgaccgaatttagtttttccaatgcgaaaaatgcaccggacaagtttaaagagggaattaaaagcaagattgacgaattgttaaaacagttgtaagatggattttcttcaatcgctattagataacagttctattcctgctattacagcttttatattggggattttaacggcggtcagcccttgtccgttagcgaccaacataacggcaataggatttattagtaaggacatagaaaaccatcaccggatatttataaatggattgctttatactttcggcagaatagtaagctatacggttcttggctttatccttatccctattctccgtgagggggcaagtatgtttatggttcaaaaagccgtaagcaagtacggagaaatgctgattgctccggcgttaatcatcattggaatatttatgctcgatataataaaactcaatttaccgaaaatcaacatcggcggtgaaagtttgaaaaagaggactaaaggcggttggggggctatgctattgggtattttattcgcccttgctttttgtcctaccagtggagtgttttatttcggtatgcttatgcccctgtcagcagcagaaacaggcgggtatctcttgcctgtaatctacgctattgctacgggcttgcccgtaatccttgttgcatggattttagcgtacagcgttgccggactgggtaagttttataaccggatgcaaatattcgagaaatggtttcgtaaaatagttgccatcctctttattgcggtaggaatttattatgcagtagtcttttatctataaataaacatagagtatcattttaaataaaaacagtatgaaaaagatagaaattttcgacccggcaatgtgttgccctacgggtctttgtggaacaaatatcgaccctgaattaatgcgtattgcggttgttattgaaacattgaagaaacagggtgtcatcgttacccgccacaatttacgtgacgaaccgcaagtatatgtaagtaataaaacagtaaatgagtatctgcaaaaacatggggcggatgcactacctattactttagtggacggcgaaatcgctgtttcacaaacctatcctaccaccaaacaaatgagtgaatggacgggtatcaatttggattttatgccagtaaaatgagtattcaccagctaattatataaaaatgaaaacatttaatttatcagatatagatttgacgaaataccttttcttcaccggaaagggcggtgtaggaaaaacttcgattgcttgtgctactgcggtaggcttggcagataatggaaagaaaatacttcttatcagtacagacccggcttcaaacctgcaagatgtgtttaatcaaacactgaacggacacggcacggatattcaagaagtacccggcttaacggtcgttaatctcgacccggaacaagccgcagccgaatacagggaaagcgttattgctccttttcggggacaactgcccgaaagtgtaattcagaatatggaagaacaactttcaggctcttgtacggtagaaattgcggctttcaaccagttttccgattttatcacggatgccgataaagcaaaagaatacgaccatattatctttgatacagcccccacgggacacacgttgcgaatgttacaactgccatcagcgtggagtacatttattagtgagagtacgcacggtgcatcttgcttaggtcaattatccggtttggaagaaagaaaaggtatctataagcaggcagttgaaacactttcggatgcaaacgcaacccgcttagtattggttagccgtcctgaaatcgcaccattaaaagaagctgcccgttcttcacatgaattacaactactgggaattaaaaaccagctattggtaatcaatggtcttttgctgcaattagatgaagccgataacgtatcgaaacagatatatgacaggcagcaaaacgccctgaaacagaccccatcggaactgttggaatatccgtcttattatgttcctttacggtcatacaatttatctaatattgcgaatatccgccggatgctttacaatgataatttaacaaatgatgcgaactatcagcggattactgatgccaaagggatagatgaactggtaaacgacctctatcaatcagggaaaagggttgtttttactatgggaaaaggtggtgtaggaaaaaccactttagccactgaaatagccctgaaattaacaaaactgggtgcaaaggtacatcttaccaccactgacccggcaaatcatctgaattataaccttgctgttcaggcggatattacagtaagccgtattgatgaagcggaagtattggaagcctataaaaacgaggttcgcagtaaggctgcggaaacaatgactgccgaagatatggaatatatagaggaagatttacgttcaccgtgtacgcaggaaatcgcagtattccgggcttttgctgaaattgtcgataaagcggaaaatgaagtcgtagtaattgataccgcacccaccggacacactttgttattgctggatgcaacggaaagttaccataaagaagtgcaacgtacacatggcgatacccccgcttcggttagaaaactgttgccacgtttgagaaaccagcaggaaacagaagtcgttattgtgaccctgcccgaagcaacccccgtatttgaagccgaacgcttgcaaatggatttacaacgtgccgggattaataataaatggtgggtagtgaatgcttgcttgtcattaactgacaccgaaaattctttcttgcgggcaaaggcgcaaaatgaattgatttggattaagaaagtagaagaattgtcaaagggaaatgctgccctgatagcttggaaaaataattaaaaacatgaagattttaattctttgtacagggaatagctgccgtagtcaaatggcacatggctttttacaatcatttgacaataaactggatgtcttttcagcaggaacaaaacctgctgaaaaggttaatccgatggcagtaaaggttatggatgaaatgggtatagatttaacccgccatacccctaaaagtgtaaacctatatatagggcaggaatgggactatgttattacggtctgtggtggcgcaaacgaaagctgccctatgtttacgggtaaagtaagaaacaggctgcatataggatttgacgacccctcggaagcaaccggaacattggagtttataaatagtgaatttcatcgggtacgggatgaaataaaatcccgtttctatgatttctacctgaacgaattaaaaccacaattaagctaaatagttgttgttatggaaaagaaacaaggaattggattttttgaaaaatatctgactatctgggttgccttgtgcatcattattggaattgctgtgggacaatggcttccggcaattccgcaaacattaagcaaatttgaatatgccaacgtgtctatacccgtggcaatcctgatttggttaatgatttatccgatgatgctaaaagtggattttcaaagtgttaagaatgtcggcaagcgtccgaaaggaataatagtcacttgcgttacaaatcggacgcttgccgacattttggctgataaagccatttaccatgttcggaatagcttatttgttcttctatgtggttttcaaagcctttatacctgccggattagccgaagaatatttagccggggcggtattattgggggctgcaccttgtacagctatggtgttcgtgtggagttaccttactaaaggggatgccgcttatacactggtacaagtggcagtgaacgatttaatcatattggtagcgtttgcccctatcgttgctttcctgctgggagttggcggcgtatctatcccgtgggacactctgttgctatccgtagggctgtttgttgtgataccacttgctgccggggtcattacccgaataatggttatccgccgcaaaggtgtagaatatttcaataacgtatttattaagaaatttaataattatacggtaggtgggttgctattaacgcttattatcctgttttcatttcagggagaaacaatactgaacaatcctctgcatatattattgattgcagttccgcttgtgttgcaaacggttctgatattcttcgttgcttacggttgggcgaaatggtggaaattaccccatgatgttgccgcacctgccggaatgattggggcaagtaatttctttgaattggcggttgctgtggctatttctctttttggtttacaatccggggctgcattggctacggtggtgggtgtgctggtcgaagttccggtgatgttgatgttagtaaggattgccaataacacacgaagctggtttccggctacaaaatagtaataggacaaaagtcctaatctaactttatcgtaaaaaggcttggtgctggaaatgtttgttcctaacatttccggcattctgccttttacaaaagtcataataaagatacatttttcggcattaagacaaccgttataacatgagcaatgaaattgattttgaagaatttataagaaacatagactgtgctatctatgaaaaaatagatgttgataactggaatatttcaatagaggtagttctcgatgtagtcgagttcctacaacggtcactcgaagatttgagaacatatattgtcaatcatcctttcagcagcaaagaagaagaaatttatttcttcaaacacatcaaaccggaagtattgagtagattattatactttacagagatttacaataccgaaatgcgaaaaccgcatggaagtattgaagttttaaaaaagtattataacgacagattggatgaattgacttcctattttgaaagtaatttggatttttaccaatattaccgttctaaagcgacccacttagacaatcattattttgtacgggggcatattgattttaagttgtgtccgaattgtgtaccttatgaccgtgacccggagttttccacttgttacgaccacaaagcagcacaaatattagcgaatgatatgctttgcatttatctgaataaaaagctacatggggttgataagcaagtaatcatcgcaaaaagtcggtctttcttaccggaacaccctttccggtggactgcaaccaaaatagcagcggtagaattaggctatgctatctatgcggcgggtgtcttgaataacggacaagcggatataaaagaaattatgacttttatggaagcatcgtttcaaatcgacttaggcgactactaccggacatacataactatgaaagacaggaaaaaagaccggacttcttttctaaacagcttaataaaaagcctgcttaaaaagatggatgaagatgataacctataaataaaaacaaccaagttcttaccaacttggttgtttttgttttcacccgttccctactctatttttttctttattattgcgaaaataggtaatatttgccttgttttacctgcaattattccgaaaaataaatcttccaacttggaaagaggttggaagatttattttttaaaacgctccaactttgcggcaaatcaattagttagcaaaatggagataataacattcgagtcaaaagcctataaggaattagacaacaagattaccgctattgcggattacattttcaaccacatggaagcggaaagcaccaatgaagatgaaatttgggtggatagttacgaagtctgcactttcctgaaaatcagcgaagtaaaacggatgctggaagaacgcctgataagaagtaacaaagagaacattcaagacctgataaccaaccatcaactacatgttaaggaaagaagaaatcttagaaagaacaaataacgggctggcattgaagacaatcaggtacaccgaatagtacaccgaaagaatgctttgatatgcttatttttgctatgcaccaaaaacaaaaaatccccgtaaagtattaatttacagggattttctttgttttgcaattctttccagcggagagacagggattcgaaccccgggtgcctcgcagcacaacggttttcaagaccgccgcaatcgaccactctgccacctctccaaaacttctttttcagaagtgcttttcttttaaagcggtgcaaagatacaaatcattttttattctacaaacttttctgcacaaaaacagagcaattataccaaaattcttgtttatacccactacggaacgaacataacggaatttaggctatttgttgaaatttatcaagggcaagacagagctttataacttactggctatcagtatatttacaaagagccacattcagtatacgattgaaccctattcagtatacgactgaatggcattcactatacgactgaattaggttcagaatacgactgttccttaaacctacatcatttgtaaataatgcagattattattcggttcttgtttcaattcataaaccatatataaagaaagtattaacatctctactcccccggacattcactacctaataatagttattttatgctgttcaacataaaaagagaagtatctcttataaaattacggaatttattcagtatttttgcgcgctctaaaggataacattatctaacctactaacaaaaacaaattttatggaattgaacaaaacctttaccaatgggctttggaataaagaaatcaatgtcagtgatttcgtcagtaaaaacatcgcaccctataccggggatgcatctttcttgcagggacctaccgaacgtaccaaacgtatctgggacatctgtctgaaggctctcgaagaagaaaggaacaacaatggcgtccgttcactggacaataccaccgtatctaccatcacttctcataaagccgggtatattgataaggacaatgaacttattgtcggtttgcagactgatgaactgttgaaacgatccatcaaacctttcggaggcatcaacgtggtagcaaaagcatgccgtgaaaacggagtggaagtggacgataaagtaaaagacatcttcacccattaccgcaaaacacataacgacggcgtattcgatgtatataccgaagaaatccgttccttccgctcactgggattccttaccggattgcccgacaactatgcccgcggacgtatcatcggcgactaccgccgattggctctctacggcatcgaccgtctgattgaagccaagcaggaggacttgcgcaacctcaccggcccgatgaccgaagcacgcatccgtctacgcgaagaagtggcggaacaaatcaaagctttgaaggacatcaaggttatgggcgaatattacggactcgacctcagccatccggctacatcagctcaagaggccgtgcaatgggtatacatggcatatcttgctgccatcaaagagcaggacggagcagccatgtcactgggtaacgtatcttcgttcctcgacattttcatcgaatacgatttggctcacggcaagattgacg

SEQ ID NO: 256 - DNA, 20727 bp, unidentified
  source 1..20727: mol_type = unassigned DNA
  misc_difference 16873: note = a, c, g, or t
  misc_difference 16874: note = a, c, g, or t
  misc_difference 16875: note = a, c, g, or t
  misc_difference 16876: note = a, c, g, or t
  misc_difference 16877: note = a, c, g, or t
  misc_difference 16878: note = a, c, g, or t
  misc_difference 16879: note = a, c, g, or t
  misc_difference 16880: note = a, c, g, or t
  misc_difference 16881: note = a, c, g, or t
  misc_difference 16882: note = a, c, g, or t
ggctcttgccggcagcgtcgagcagataccacttgcgctcgacttcagcgggcttgacgagagtagtgctcatatctatttcctcctgataagtgtttcaacggttcaatgcaccttttggggcgcgagtgtcagtatacatcacaagaacgcccctgtcaacatcatttttcgattttttcagctcagttttttgaatctctcgctttctcttgttttctcttgaaatctcgtattttctcaaatcgcattttcgtttctgtttttgcggcagagcgctacaatttcagtcccgagtatgttatactaataaagatgcagccccaccccggggctgagccttacatttataaggagggcattccttcatgccgaaagacatccaccagcgcgacaccgcgcagcagcgctcttcccgcctgctgctggccatgggcatcatcgtcctgctgggcgcactggcctattttgtactgaccctcgtggtcaaccgccgcacccccgcttcgcctgacacccgctacaccgccgagaacggcatctccgtctactacgagtccgccgtctggccggtgtgcgagatgaccgaggacgccacccttggccgtgcgctggaactggcctctgcccagagcagcgacgacgccaactatcaggtcgtgctcttccagaaaggcacgaaagacacctatgaggacttcatcggccagtcggaaaaagagctcaagcaggcttacggcgtcattagcccccggaaagtcaacctgaacatcgacggtgccgccgtcactgccgtgcgctgtgatattcaggcttactacgccgtgctggccaccatcgagtacgacaacggcgacgtcatctatgtctccggcctgaccaagctggcctccatcagcgacatcgtcaacctcgtggagagcgtgagcctgtcatgagcgacacgaaagcgatgcagcggctctgcggcctgatgcgcaaagccgtccagcagtatgagatgctggcccccggcgaccgcgttctggtgggcgtttcgggcggcaaggacagcgtagctttgaccatcggtctcgcgcggctgcggcagtacctcggctttccgttcgaagtcgtggccgtcaccctcgacccccagtttggtggcaagccggtggattactccgcgctggaagcgctgttccggcagtatgatgtttcctatgaggtgcgccgcacccttatcggccccatcgtcttcgactaccggaacgagaagaatccctgctccctctgcgccaagatgcgccggggctcgctccacgccgctgccgaagagctggactgcaacaaggtggcgctggggcaccatctggacgacgccatcgagacgttttatatgaacctctggcgggagggccgcatcggctgcttctcgccggtgacagagctgtccgaccgggggctgaccctcatccggcctctgctgctcgccacagagcaggaggttcgctgtgcagtgaaggaagaaggttttcccatcgtcaagagccgctgccctgccgacggcgtgaccacccgggaggacacaaaaaactttgtccgggagcggtgccgcaccgaccgtgctttccggcagaagacccttcacgctctgcaggagagcggcatcgacggctggcgtcctttgcacccggcccgtacatcaaaaaggaggacacagcccatgcagatgcccgcatttgaaaaacacgtctgggccgagatagaccttgacgccctgcgccacaatttccgcgccgtgaaggcccgggccggggagatgcctctgtgcgctgtcgtcaaagccgacagctacggccacggtgccgtagagtgtgccaaggtctttgctgaagagggggccgcgtggctggctgtgagctgtctggcggaagcccgtcagctgcgcaaagccgggctgacgctgcccatcctcattctgggccatgtggagccgggccgtgtacccgtcctcatccaggaggacatcaccgccgcctgctactccctgccccaggccaaggccctcagcgaggccgcctgcactgtcggcggaaaagtcaaagtccacctcaaggccgacaccggcatgggccgcatcggttttgcgctccgcaccgactttgacgcggcgctggccgggatgctggaggtgtgccgcctgccggggctggaggtgacggggctgttccagcacttcgctgtggccgacgacgacagcgccgacagcgtggcttataccagccagcagcacgagctcttcgtccgggcctgtcagggccttgccgaggccggttttgagcctgccgtcgtccactgcgacaactccgccggggtgatgctccaccccgactggcccgccggactgccccgcacccactgcatggcacgccccggcatcatcctctacggcttcgaccccagcgatgaagtccgcttcggcatcttccgcccagtgatgaagctcaagaccatcgtcagcatggtcaaggagatggagccgggccagtcagccagttacggacgccgcttcaccgcggaaaagcccaccaaggtcgccaccctctgtgccggttacgccgacggctacccccgccttttgagctgcggcaagggcatcgtggaaataaagggtatgccctgcccggttctgggccgggtctgcatggaccagatgatggtggatgtctcggctctgcccgacgtgcaggaaggagacgaagccatcctgtggggcggcgaagtgagcgacagcgccgagaccatcgcccacaagaccgataccatttcttacgaggtgctctgcggcgtttcccgccgggtgccccgcgtttacctggaaaacggcggcatcaaagccgtcgaggactggatcctataaatttcggaggaactacatggcaagagacaacatccgcaacttctgcatcatcgcgcacatcgaccacggcaaatccaccctctccgaccgcatcctcgaactgaccaagagcgtggacgagcggacgatggaggaccagatcctcgacaacatggacatcgagcgggaacgcggcatcaccatcaaggcccgcgccgtcaccatgaactacactgccaaggacggcaaggtgtacgagttcaacctcatcgacaccccgggccacgtggacttcgcttacgaagtcagccgcagcctcgccgcctgcgagggcgctatcctcgtggtggacgccacccagggtgtggaggcccagaccctcgccaatacctatatggcgctggaacacgacctcgagctggtacctatcctgaacaagatcgacctgccctctgcccacccggacgaagtggcacaggaagtggaggacgtcatcggcctgccctgcctcgacgcgccccgcgtctcggccaagaccggcctgaacatcgatcaggtgctggagcgtgtggtcagcgacatccccgcccccaccggcgacccggacgcccccctcaaggccctcatcttcgacagcatctacgacagctacaagggtgtcatcgtctatatccgcgtctttgaaggtacggtcaagcccggcgacaccatccgcctgatggccaccggcgcacagttcacgctggtggaagtgggccacatgggcgctaccagcctgaccccctgcgaccagctgcaggccggtgaggtcggctacctgaccgccagcatcaagaccgtgcaggacacccgcgtcggcgacaccgtcaccctggccaacgatcccacccccgaggctctgcccggctaccgtcaggtcaagcccatggtcttctgcggcatctaccccgccgacggcgcaaagtaccccgatttgaaggacgcgctggaaaagctgcagctcaacgacgcctccctgacctttgagctggaaaccagtgccgcgctgggctttggcttccgctgcggcttccttggcctgctccacatggagatcatcaccgagcgtctggaacgcgagttcgacctcgacctcatcaccaccacgcccagcgtccgctatcgtctgaccctgaccgacggcaccgtggagatgatagacaacccgtccagctaccccgacccctccaacatcgtcaagcaggaggagcccttcgtggacgtccacctctacacccccaacgaatacgtcggcagcctgatggacctgtgccagaacaagcgcggcgtcctcatcgacatgaagtatatggacgacgtgcgtgtggacctgcactacgccctgccgctgggtgagatcgtctacgacttcttcgacgccatcaagagccggagccgcggctacgccagctacgactacgagttcaaggagtaccgcgagagcgacctcgtcaagctggacttcctgctcaacggcgaccccgtggatgctctgtccatgatcgtcttccgcgacaacgcctacgccaagggccgccgcatctgcgagaagctgcgggacaacatcccgcgcaacctcttcgagatccccgttcaggcggccatcggcggcaagatcatcgcccgcgagacggtcaaggccatgcgcaaggatgtgctggccaagtgctacggcggcgacatctcccgcaagaaaaaactgctggaaaagcagaaagagggcaaaaagaaaatgcgccagctgggcagcgtctccctgcccagcgaggcgttcaccgccgtgctcaagctcgacagcgacgacgattgatattgatttttccgctcccctcccgcccagaggggagtttttttcatgtctggcgggtggctaagaatcttagtttaaatcttgacctttcttccgacattgtgtacaatgaggctatactaatcatgttgtcattttatgtcatttggtggcgaacagaggaacttttcgcacccagaaataaaacgagaaggaatggatgcaacgatgcggatcgcgatggtagggcataagcgtgttccctcacgggaaggcggcattgaggtcgtggtggaagaactggcggcgcggatggtcatacacggccacaccgtcacctgctacaaccgctccggccatcacgtcagcggcagagaatatgacgctgagcatctggacgagtaccggggcatccgcctcaagcatctgcccaccatcgaccgcaagggcctcgcagctgtgacatccagcttcttcggctgccttgcggcggctttcggcccctataacgtggtccatgtccacgcggaaggccctgccatgttctcctggatcccccgcctgaccggcaagtgggtcatcctgaccatccatggtctggactgggcgcgggacaagtggaagggttccttcggctcctggtacatccgcatgggtgaaaagactggtgcgcggtgcgcccatgagatcatcgtgctcaaccacagcacccagaaatactttctggacacctatggccgcaccacccactatatccccaacggtgtcaaccctgcggcccctgtccccgccgacatcatccgggaaaagtacggcctcgaaaaggactcctacatcctctatctgggccggatggtgccggaaaagggctgtcactatctggtggacgccttcaaaaagcttgacactgacaaaaagctggtcatcgcgggcggctcctccgacacccactggtacatggacgagctgaaggagcaggccggcggcgacgaacgggtcatcttcaccggcttcgtagacggtcagctgcgggaagagctctacagcaacgccttcctcttcgtcctgcccagcgaccttgagggaatgcccctctgcctgctggaagccatgagctatggcaactgtgtcatcacctccgacatcgaggagtgtgccaacgtcatccacgacaacggcatcgtcttccgcaagggcgatgtggacgacctcgcccagaagctcacctacgccctcagccaccccaacaccgtccggatgttcaagtggctcgccgccgagtacgtctgcacccgcttcccgtgggagcgcatcgtggaggaaacgctcacgctctacgagaaaaaataatggcattcaaaaaagcgcctgctgcattcgcagcaggcgcttttctctttagcgcgaatttttctgcatccggcggtcacgcccgccgcgcagagtctggataaaatcgaaataggccagtgccagccggtattgcttccgtttcaggatgcacaggcccacccactgccagcttgaatctgccatctcccggcggctctccgccagccacttcgccgcccggggtcgttcgcaggcctttctcagccactggatgcgctcagcgttcggcatcgtgtcccggacgaaggagagcttgcgtgctgattccagcacgacacacagtgcctcccgcccgataaggtcgtcatactccccaggcgtcggggcatggcggcgcaccacctcgtcgaactccgcccgccgggccgcggcttcgtcgctgaagtaggccttctggaagctggtcatggtggaggacgagcggatattatagatgtaataggcgctgcggagatagacgatgcgccggaagggcgcgtccaacagctgggtaaaaaagtgggcgtcttcgcccacacgcagcgtggtaaagcgtaaatcatatttttgcaggtagtcccggcggcagaaccgcacccagggtaccgactcatatttggccttccggaaatcctgccagaattcctcgtaggtatacaccccgctcagcgcaggcagattcggcccgctgcgccgcagggcgctgccgtccttatcgagaaactgcttgtagtagccatagaccaccacgtcggcgtcggcctcccgggcggtgcggagggcgttttccaaaaggtccggcagtacttcgtcgtccgagtccacatagcagatgtactcaccccttgcgtggtcgaggccaaggtcccgggccgacccttggccgccgttttctttgtgcagcgcatggatgcgggcgtcctttaccgcatattcgtcgcagagttctccggagccgtcggtgctgccgtcgtccaccagccagacctcgaagtcctgccaggtctgggcctgtagggatgccacacagcggggcagcagcgttttgatgttataaaccggaacgatgaccgaaacgtcgggcataacggactccttatctcttttcataaactgcaaggaagcggtcggtgagggcatcccatgtgttctcatggatgaccgtctcataggctgcctgctccatccgggccttcttttccgggtcggcggcagtgtccagcagggttttcgcccagcgggccgggtcagatttttccagcacaaggccgttctcaccgctgcgcagcagcatatccgcaccgccgttgggggtggtcagcaccacccggcggaagaacatcgcctccagcagcaccatgccgaaaatttcgtactccgtcggcagcaggaagagatccgcctgctggtagacccccttcatctgatactggggggcttttttctgccagaagacgcagctttccagccccttttccccgatggccgctttcacgctgtccacatactccgcgtcgccgtcgccgatgatgtaaaggcaggcgtccgggtcgcttttccgcacttcggccagcacatccagcaggaagaaggggtcccgccggggctcgatgcggccgatataaagcagcttcaggcccgttttctgcgcccgcatcttctgctcgagttccgtctgcccggcgtccgggcggtcacgcaggagttccgcgtcgatgccgacgcccaccgtcgtcacctgctccggcgagagacgcttttccagcagaaatttccgggccagctcgctcttggtcagaaaacgggtgccacagcggcggtagcgccccacgaagagggcgtcgaacactctgcacatccggttatagttcttgttgaagggcgagtagtaggggccgtggtagaccaccgtcttttcggggtatttccccgccagatgccacgagaacatctggttatactcggcggtctgcagcacatcatactgggcaaagagcttctcctgccctccgaaccagacgtttttgagcaggactttcccgtggcggtagaagacattgatgggctttgcaccctccacctcgacctttacggtcatctcgtcgccgtccgtccagaacaggatgtcggtgggatggccgcgcttcaccagcgcctttgcaagtcccacttcctgaatattgtaggtgttcttggtcacgtccagcacgctgggccaggggcgaacgatgagtattttcatagcggtatcctcactgtctgagctggtcggcaatatcggcgtccacgatctcctcgccggacttatggcgcagctgctcctgcgacgcggcgctcaggccgttattgaccacgcagttgaggtcgcaggtggagcagcggtccagctcttccttcgacaccttgccgtcccggtagtcgcggcagactttcagctcatacatactgtaaggagtcttggtgaacagcgccttgaacttatgggtcagtacccagaagcccggcttccagatatatttgtgcatggccggcgagacggaaccgatcatccagcagtcgcggtcgcagtggcgcaccttggcgcggacggcctctgcctcagggctgctccacagctcgtcccagctctgggtgttcaggttgcccataacttccttatccttggtgccgttgcagggcatgacgtcgccgtaggggtcgatgaagaaggtatcgaagctcatatcacagggcagcagacgcttctggccgtagaggtaattgatgaggccgtggttgaagtaggcgcggaaccactttttgggcgaattgctccgcagcagctcgttgatgagggcctcgaagttcttcgccaccatggggcggtcgtagatgatgttcttggcctccacgaagtagaagctgttgtgcagggtggcggtggcgaattccatccccatctcatccgacaggcggtagagggggacgaggtcgggggcgttcttgtcctgcacggtcatgccgaagcccacatccttcatgcccatctcccggagttttttcagggtggtgtagccgcggttgtagccgtcggcgaggccgcgtatctcgttgttggtctgctcgaggccctcgatggagatgcggatgccgatgtcggggaactctttgcacaggtcgaggatacggtcggtgaagaagccgttggtggagatgacgatgcggtccgacttcttccgcagctcccgcacgatgtccttcagatccgtgcggataaagggctcgccgccggtgatgttggtaaaatacatgggcggcagcttgcggatggtctcgaggctgatctcttcctcgggcttcgagggtgccttatagcggttgcacatggtgcagcgcgcgttgcagcggtaggtgacgataacggttccgttcagtttcttggttgccatgaatccttctcctccgtttttatccctggtacaggggcatcagtttttccgcatattcttccacagtgtcaaagcgggtcgtcccgcaggctctggtataagcgtccagccgggtgcggtcgtcccagagggcgcgtatcttctctgtcagcgcgtccacattcccgctctcgaacagctcgccgttcacgcccgcgtcgatgagctccgggatgccgccgatgtctgcgcccagcaccggcgtgccgtacatcagcgactccatcactgaaaaggggcagttctcataccactccgacgggtagacgctgaaccgcgcctccacaatgagtttttcgagggccttgcccgactggaaccccacatttttcaggttctggatgccggccagctccccttccagcgggccgctgcctgccgccacaaaggggatgtccggcaaggccttgcaggctttcaggaaagtctcgatgcccttttccttcgcaaagcggccgaagtagagcacatagttctgtttttccacagccggggctttctttgtggaaataaagttgtgcatcgccaccgttttctcccgcaggatgggatcagagtccagctttttcttcatgaactccgagcagcagacaatggcgtccagctttttgtagacctttttccaccgccagaacgcagcctccgcaaagccgatggcgctcttggccgtagagccgtggatgcacttattccggatgcaggacgtgagcttcccgccgaggcagtcttcgcagacctgaccatccacccggcagcacatatgattcgggcagaccagctggtagtcgtgggcggtgtagaggatgcggcaggcgtgtccgctctccttccgccatttgtccgcctcgaggatgatgctgggcgtcaactgatagttgaaattgttgagatgaataacatccggtcgaaaatcgtccagcaccagccgcagtttctgccgggcctcggaagaataaatggtcttgagcgggtatgtaagcttcgtcagcttgctgccgccgtggaaatccatgctgccggtgtaggcatccacccggttgcccacacagcgtccctcgtgctccatcccgaaatactgcacctcatggcccatctttttcagctgctttcccagctcgaacatataggtctcagagccgccgttggggtagaggaatttgtttatcatcaagaccttcatctcgtccgctcctcacttttatacacagatgtggaaatcttcctccacattttcttcttttccctttttgttccgcttcttctggcggctttccttcaccacggccagtggttctctctcgggatcgacgagctcactgttttccgaaatttccaggcaccacaccataatagccatccggtacaggacgttgatgggataatagaaggaagtattatcggtcaggtaagtgaagaagacataaaggttcatcgccatcagcgcataggccggtatctcggtgtaccgctcctccacccggtggatgcggaatgccagctcaaagagtatccatatccaccagcaccagaagcccacttccagatacagctccagatagacattgtgggtagccgccgtggccagcggatagctggggtcttcggtggcgtaggtatagatgaagcggatgccccggcccatataggtcggcagcagctcgaagaactggctgaaatatccgtaaaggatgtcgcgatacatcaaatcgacgccgaattcattggccagctccacgaacagaccggattttatcatccagagatagaaaaagatgcagccgcctgccacgagcgcaatgacatccgtaagcagctgcagatgtctcggtctccacttgcagaggatatggtacatcaccgccgcacagaacaccgctgggacagcgatgcgcttgaaacccagcgtgaagaacagcgccgagataaggaagcagacggcctgggtcttgtggtttttctccttgtggatggcgtagtagatgagcatgacgccccagccgtagaccatatcgtgcagctccatctggcgcatcgcaccgccggtgtcgtccgcaaaagtaatgagcagacgaatgtactccgaaataaaagtcccgatgcctgcacttgcagccacctgcaatgccactaagccattcgccatcgtcatgcccaccagcgtcaggggcatagtggcctcaccgaacatgtagaccgccgccgacgcgaacatcaggttcgtgagcatatagaaaatgttcagcgaaccgcgcaggatgtagttgaaggtctggaactccgagatccagatggccaccgaccacatccagaacatcagatagggaaaaaagaaaagcgcaaagaagcgcaggcagaagatagcccggttgaacatcgggcggagaaaaaacattgcacaggcccacccgaagatcaacagattgatggcatatttcagacccaccggcagacggtagcaggcacagtaaaagctgaggaacatcagcacgatataaaacgccgcgctgaccagctttagcggtttactctcaaaaacatccatttgttgactttccctgtcttatttccctcgccgcggctcagttcacatccacgaccaccagttccggctgattgaagatgcgcggatacggctccgaatcgccgaggccgcggctgatgaccacctgcgactctcccatctggttgacaccgctggtgtacttgggcagaaagccctggctggtagaccacaggccatgcccgccgatgcgcacctgtccgccgtgggcgtggccgctgagcacaaggtcgaacttttcgtcggccagcgaggtgtccagcacctcggggcagtggcagatgaggatggtgcagacatcatccagcgcattcgtctcgtcattcagcgcgtcggccactgcgcgggagttttcccgttccagctgggcgcggggccactcgaagaagccgccgatgcgcagctttttgccgttgatgacggtgtcctcatacgttccgttcatccagtggacgccggtggcctcgatgtcgtcaaaaatggtatcgcatccgttggcgtagcgggccgcccactcgtggttgccgggggcataatacaccggtgcaatgtccaccagctgacgcatcagactcagcacaaggctgtagtccgggtttgtgtcaatatccatgtcgcccgccactgcgatgaggtcgggcgcaaggttgcgcaccttctgcacaaggtcggcgttgtcggtgccgtactcgctcagatgcaggtcggaaagcagcacgatgcgcaggtcttccaccggcttatccaccgtgacggtataaaaagtcgtgatgaagctcttgttcatctgaaggttatacagcaggatgctgcccagaacgagggccatcagcagcaatatgagcagcagccgtaccagaaaatgcagtatcttttttatcatagttcactctcagcttttggacaccagcggcgaggcagccgcattcttcgcgttttcggcttcctgacgggcttttgcgtctgcacagcggcggatggacagccgcagcagagcgcggatctcataggcgttatctttggccgagttggcgatgcccacaaagatgcaggggccgaaccgggcgaactcggtcttggccagcagactgcccagccggttgacgcagtttttcgccagattgaagctgcagttttccagcaggacgataaagtggcctgctccattgtagccgacaaagcccagcgtgcggaacacatactgcagctggtcacccaacaggcgcagcgccttgtcaccatcgttccggctcatagccgaaaaatccagctggatgtagatgatggtgaactggcccttcaaccgtgtcgtactgtagtggtcgatggcggcatcacagcgctcgcggttgggcaggccgctcttcttgtccacatagaggtagtaatccacaaagtcgcccagacgacccatgaagatggcgcagaagcatcccacaaagagaaagagcaccaccgacagggccgcatagagtttcaggttgagtttctcgatgacaacgatgctgttcttcatctcgatgttgtccgcaccattgacctgattgaactcgtcgatggtcatgagtgcgaggtcatacaggctcgtgaacttctgcaccagctcgtcgatgcgggcgctggcccactgtgcctcagcactgcgggggtcggtgttctgggtcacatcggcgtaaacgtccaggatctcctgcgcctgcccctgcgcaatggtggcgtcgatgagcttggcgtggaggtcggcatagttctggatgagtttatcgtaggtggtggtcacattgccggagggctggaccctcgagtcccgcaccacatcggtgatgatctgggtatcactgccgtccgagttgctgttgggggtatagaccgccgcaccgtccagcgtcttgtcgccgaactggtcgatgatgctcttggcctctgcgatatttccgttcaggctgtcgatctggagctggtagcgcatcacgatgttcttctccgtattgaccagaagagtatggtcccgcaccagcttatgattgacgatataggcgtagaggtcgttcagggtgttctgggtcagatactcgtactccgacacgaggtccgagaacgagtatcccgatctcacactgtaaaagccgtatttttcgtcggccttcttctgaaggtaggccacgctctcgttggcgttattgcgcaggatctccacgcagtcgatgtattcgtagttcgccaccgagacattgctggcgttgttggggaacagcgccgagtccacatgggtctcgctgtaatacttgaagtagttcgtcagcaccgtgtccagcacattgcgggcgtagtcggtggcgtccttgctggccacggtgaacgaaacggcatagatagtggggtaatattcatactcctcaccatcggcaagcgccgtctcctttttggtctgctcatcctccgggatgacctctttgacggagatcttggagcggatgctctcggtgctggctgtcagccccagctgctggatggtctggttgatgaccgaggccgacgtgatctcagtggggtctatcctggagccgtcggcgttcttgccctgacttgcattcgcgttggtgtactggatgatggctgtggccgtatacgactgccgcgacgaaataaactcatacacgcccagacagcctaccgccgtgatgagcatgatgaggaaccaccactttttgaggtagcgcagcaaatcaaaacttttcattcttcctccatcctgtcaaaaagacggatgtcattcgttttctgcctgcaggcgttcacgctgccgctggcagatcgtcttgacgacagcagccagataccacacggtgcatatcaaagccgccagcatcacgctgggcttgatgttataccgtttgataaacgaggactccggcccgttgaacaccagatatctgctgatgtgctgggcatagcagtcggcgtccagctcccgcgttgcgctcacgatgctggcgagctgctgggtgatgacatccaccatcgactgggccacctgcagttcctgggcctcggtgggctgctccagcgccgtgatcttggaattgttagtcgtgatggtcttctgggcgtccacagccgagctgagcagctcattggcccgcagggccagatcgtcgatgccgaccttggtgcgggacatatagaacgaaccatcgttgtcgtaggtggggatgagcaccgaggagaccatcttgttgttgtagttgtccaggatggtcataaagatgtcactcttctgggagtcgctcatctcgctccaccgcagggtgcggttcagctcgttgaggtcgtcgatgcagcgggcgttgttcttggccacgccgttttcccagatatagctctggtactccgacagagtgtagctctgcagattctgtacctgctttttgatggcactgtaactctggccgctggtggacagataggagccggcctggtcgttgcgcaccgtgaggtagttgttgatgcggcctatcatcatctggaaataagagcctatctcctcgtagtccatatcggaataatcaaagctgatgtccagcgaggccgcattgatgcggtaatctgccgtaaagcgcttgagatagacccggcatatctggtcgaggagatcctgcaccgtgatcttgccccagagcgaccacggcagtttgaggccgatgtgataggacgagctgatgtagtagtcatcctccttcgtcacaagcttgctgttggtcggcgagatggagatgcagtccgcaagctcactggtggtcaggtcatcctgcaggccggtggcctgtaagatagcctcaagatactcctgcgtcaaaaattccgattcgctgaagcgggcgccgttgggcgtcttgccggtcacgctctcttcgtagttcagcgacatggtggtagtggccgaaaagctcttgaccgtggtcagtacgcacatgaacgtcagcgtacacacgacgcccacgacgaacagccgcctcacctgccgcagaaagacttcgcacaggagccggatagaaagagtatcgaggaaacgctggaacgatgtaagcaccgactcccgttcctcacggcgggatccacgcttgctgcgggaggacttcttttctgccggagcggccttttctgcgctttcgtccccttccggcaccgctgctccggtggtattcagagctgccgcggagtcgtcctgctccgccggctggggcgcagctgcctcgggctgactggctggctgaaggacattgagcttccgcttcacagacttcggcggggccggaggcgtcaggacaggctccaccggcgggatggcggacggcggcgcagcgggcgcggtataggtatgctcttcttctgccacctcgggctgcagggccggggccgcagtctccgggacggagttctcctgctttgccctgccaaagagcgagcgcttcttcgcgtgctttgcggcatggcgcgcaggcgcagagccacgcccggatgtcttttccgggctggccttgtagaccctctgatttggttctttccgcgctgatctcatccgcagtttcctttttgttctcttataggtacgtcctccgattggccggagagtatacttcaactactttataatacctcaaatcgttcccaaacacaactgttacgtcctctttcacatccgaactgcccgtttttcttttcttcccgccccaaaaaggacaaacaagaaacccccgcctccgggnnnnnnnnnnccgggagtaccggaggcgggggtttcgccgaactgtgatctatgaagaaggttttcggaaggaccgcttatcaggcaggctgtgccttgttggcgttcttcttgcccgtcatgaagcagtaagccatgatgagtgcgcatccagcaatgccgataatatcagacatggagctgggcaggatgaagatgaaggccacgacatagcaggcgatgcgctcccacatcttcaggggacggaacaggtagccagcgatgccgcaggccagcagataggtggctgcaatgacgatgcagtatgcaatgatgatctccaccatcgtgccttccagcaggatagcgggacgatacacgaatgcaaaggggacgatgaaagcggtgatggcgaaggagaatgccttccagccggtcttccatgcgcttgcacccgcgatgcctgctgcagtaaaggatgccagacagacgggaggagtgatctgagccacgacaccgaagtagaagatgaacatattggtgaccagagcggagatgcccagaccctggatagccgatgcgaacagagtgacagcgatcaggtaagcggccacggtaggcagtgccatgcccagcagcaggcagcccagagcggcgatgagcagtgcgatgaacaggctgccctcaccagaggtaccgatgagctttgcgatcttgacggcaacgccggagttgaccacgatgccgatcatgatgccgcaggcagcggtggggatcgcaatgtttgcggcctgacggacgccgtccatcagggtctggagcagcttgcggggactcatgcgggtctcaggagagatcgctgcgatgatgatggagaagatggtgcagtagatcgcggaacggggcagagagtagcccatgatgatcatgacgaccagaacgatgatgggcagcagacggtacacgcggggcaggatgggcttgccttcgtaatgtacgccggagtctttgcccagacccttcttctttgcgatcatgtggacaaggatgaacacggcgaggaagtaggccacagcgggcaggacggctgctgctgcgatctgcgcatactgcacaccgatgatctcggccatgatgaatgcgccagcgcccatgatggggggcatgatctggccgccggtggaagcaacagactcgactgctgccgcctcttcggggtcataaccggtctttttcatcagagggatggtcagaacgccggtggtggaaacatttgcgatcgcagaaccagaaaccatgcccagcaggccggaagagatgacagctgcctttgcggggccgccgaccgtcttatcgctgagcttcatgccgccgtcgatcaggacaccgccgccgccgcagttggagaagaaggtgccgaaaacgaggaagtagaacagggtgcccagagaagtgaccagcggagagccgaagatgccattctcgccgtacatcaggacttccatcagtttggggaagctgatgccagagaagcggaacaggccggggatatactggccgaaccatgcataagcaaggaagaagcagatgacccagaacagggacatactgaccacgcggcggacggcctccatgacattgatgaccagaagcaccgccacgatgacctcggtggtggtcataacgtcaacattgaagatgcggtagttgagctgttctgcgtggctcaggaagaaccagcagataaagcagctggacgcgatgaggaagatgtcgtagatccaccacagcttattgtggctcttggatttctcgaccatcggattgtacagccacaccacgaccagtgcaaggcacatatggagcggcagctggaaccacgggtcaaggggcttgaccagcttgatgtagagctggaacaccgtccagataacggtaagaactgccagcgaatagaagcgccatttcggcatattcttcagcagcttggcgattttggtatcttcgtcctcttcgtttgccagagccttggccttggcgtcgagagccgataccttggtttctttttcgttgctcatatttccctccgtattatcccttgtgaaagcagaggccggacaccgcaaagcgtccggcctctgcctacggtcaaaggatagatctgatgtcgtgcggagcgcctccgccgaaagctttcacagccggaacttacttcatgtagcctgcttccttgtagtacttctcagcaccgggatgcagcgggcagccgccgcgcttcatctcttcccaagcggtctcaggctcccacggagacagggaattgtactcggccaccagagcgtcgcggttctcgctcaggctcttggtgatggcgtagacgacgtcctcgctcaggctctctttgcagaagacgcagtcgggagtgccgggcagcgtcagctccttatcctgacccttgaaggagttggccgggatggtgatgaggtcgaagcccttttcgctgacgaaccagctgcacaggtcatcgccccactgcaggaaggtgacatccacgctggtagcgatctgagccatggtggaagaagcagaagaggtgtggtcgatgtagaagtcgatctggccgtccgagatggcgtctgcgttggcatcgccgccctggttggtgatggagccgccccagctcttcaggtcgtcctcggtcacgccgaagtactcgagcagcaggtaagcgccctcagcatccatggagccctttgcggagcagccgatgcgcaggggcagcttctgctcgaagatctcctcgatggtggagacattgtacttctgcaggaatgcgttggacacgcagttgatgtagcagacagcagtcaggccgccgatgaccgctgcatagccgctggtagcaggcttgcccagagtgccttcctccattgcccactttgcaggagcaccgttgatgaaggccagatcggtgttgccggaagcaaacagataaggagcacccataccgcccggagagtcagggttgacgttgacagtctggaaaccgccagccttctccagcaccttggacattgcaacgatcatattgtaagagccagaaccgaccttatcggagctgaagttcagagtctctttgctcatatcgggcagaccgtccacagcctttgcctcaacggaaggagctgcctcactggaagctgcggtgctggtggaggaagagccgccgcaggctgccagagcaccagccgctgccatagtaccagaaaccttcagaaagctgcgacgagaaatctttttcataatcttgttctccttttctcttggggttctcgtgtagcgaaccggactgtgtacttcatgccttcttctgcggcgtcgccgcttttcacagtctttgttcgtttttgttgtctaaattatattcaaaatggcagacccttacaacggccaaaccgccttgtttccgtttcattctgaaacatttccatgatatttcatgaatgttctattaaaaccgtaacattttagaacgctttaacggtcttgctcaaattcacacgtttcaggatagaacttttctttcagtccgttaagttaaaaaacgcccgcctttgcagcaaagctgcaaaagcgggtgtgcagggagctattggaaaatttacgcctcgcggccggtcatcttgacggcatacttgatggcgttgacaaggctcagctcattgccgttgcccttgcctgcatggtagaagtcggtgccgtggtccacgctggcacggatgatgggcaggcccagcgtgacattgacgccctccacagccttccactcctgcttctcacggtcgtagacaaagccgacggtcttgagagggatat

SEQ ID NO: 257 - DNA, 17335 bp, unidentified
  source 1..17335: mol_type = unassigned DNA
ttattttttttgctttttttgaaaaaattgttgtccctatcttgacatcagggggacttgctgcagtcagctcctccgcatttgcagcactctatagtgcatttggaaaatatgacgtggtgcacatccacgctgaaggaccggcgttctttgcatggctgccgaagatgtttggaaaaagagttgttgttaccgtccatggcgaggactatttcccgaaagatattaaacaactaattgtgcaaaacaaatttgagttggcttgagggactgtactcataaaaatgaatttggaatctatttatgtgatatgggggattctgctcatggcagagaagaagaaaatactatacatagttgaagctatgggcggaggggtgtttacatacatcgttgatttagccaatgaactggttgatacctatgatatgtacattgcatatgcggtgcgtaagcaaacgccttcaaattataaagattattttgacaaacgtattcatatgattgaagtgaaaaattttgcacgggctatcaatgcaacaaaagatattgcggctttttttgaaattcggaaaattgcaaaagagataaagcctgatatcatccatcttcattcatcaaaggcaggcgcattgggaagatttgcattcagtgggaaaagagtacctcttttttacacaccacatgggtatagttttttgatgcagaattccagtgaagcaaagcgaaaaatatacaaaggcatcgagattatttgtggaaaacggaattgtacaacgatcagctgcagtgagggagaacatttcgaatcgctaaagctaaataagcaagctatctatgtgaacaacggcatcaatatggcgcaactgcaaaagttggtggatgaagtaggaaattcggaaccacatccatttacggtgtttaccctcggacggatatgctaccaaaagaatcctgcacagtttaatgcgattgccttggcaatgccgaatatccgttttttgtggattggggacggcgaattacggagtacattgacggcacccaatatcacaattaccggatgggccgagcgtaaagatgccttgaaatactctgcatcaggggatgtgtttgttctgacttctctttgggaaggattgccgatttctcttttggaagcgatgtatatgaaaaaagtgtgcattgtgagcaatataattggaaaccgtgatgttatccatacaggtgtaaatggatttgtgtgtaataacacagaggagtacgtcaaggcaattcaaagtgcgaaaactgaaaatgtaaatcacttggtggaagctgcttatcaagagatagtggacacctataatacaaaaaatatggcaaacgaatacagtaaaatctacctctcaaaaatggggggggggtacaaagcaatgtaatagttgtacttcttctcgcagataagtggattgtgccatcgacttgcgaaaaggcggtggcatgatgaaaaagataaggattttacatgtggcgcaagctgctggcggagtggatcgttacatccgaatgcttctcaagtatttggataaagaaaagttcgagaatatattggtttgctcacaggatttccatgaggaagactacagaggtttggctgatttttttgaacaggttgagatgactagggccataggaagcaatgacctgaaggcaattagaaaagttcgaaagctgctaaagaagtatacgcctgacattgtttatgctcattccagcaaggcgggagcgattgcaagaattgcagatcttggactgaaaaactatcttatatataacccgcatggttgggcttttaatatgaagtgttcagaaaccaagagaaggttatacacgatgattgaacgagtggaagcgccattttgcgacaaaattgtctgtatttcggacgcagaaaagcaatcggccttagagaagaagatttgtagagatgaaaagctacaagtgatttttaacggcgtggatattgaagcatatgaatgcggagaacatggaaaacttaaaagagcagatttagacattccaagtgatgcttttgtcgtcggtatggttggacgtattagcccccagaaagcaccggatatatttgtgaaaatggcgaagttgctcaaggtagaaatccctaatgcgcatttcattatcgttggcggcggtgaaatggaaaacgaaatcaaacagtatgcaagagaaaatagtttggaagattgtctgcacattacaggctgggttgataacccaatgagctatgtagagctttttgatgtcgcatgtttactgagtcgatgggaaggcttcggactagcactgcctgagtatatgatggcaagtaagcctattgtggcaagctgggtggatgccattcctaatataatctgggatggagaaaatggtctgctagttgaagtagatgactatgttggagcaagcaaggctgtgctacgaatttatcaggaaagcggattgaaagataaattggtgacacagggattggaagatgtacataacaggtttaacgctcggagagtttctgaggaacatgggaaactgtttgagcagatagttaggtaatcgagagtagtttggagagtaaaggaatgaaaaaaacggcaattgtgtcatgctatttccagcataactatggaagtatgctacaggcatatgccacgcagatggcattagataaactgggatatgaaaatgaaaccatagatatttctggttttaacggagaaattaaaaaggcgaaattgctgtattttgctaaggcaagtttaacctcagatattttgctatctaaacttggtatggcaaggaatgtattgattaagaaattttctaaaaatcagtatgcacaactgtctaaagttcgttcagaaaaattcgatgcattcagccgtaaacagtttaggctctctccaaaatataattcgaaagcagaacttggaaataaatgtaaggataactattcgagtgtacttgtaggaagtgatcagctttggcttccgggaaacatagcagcggactattacacattgaattttgtgccggaaacggtgaacaccattgcatacgcaacgagttttggtcaatcgagcattccaaatgattcggcacggaaagctactatttttctgaagaaaatccggcacattggtgtgcgggaggaatcgggccagaaacttgtaaaaaaacttgcagggcgcgatgttcctgtggtttgtgatcctacattgcttttcacaggagaggaatggctgggtatccagcaagaagagccgattgtaaagggtaagtatatcctgtgctactttctcggcaacaatcccccacaccgaaagtttgcaaaacgtctgaaagaagcgacaggatgtaagattattgcgttgactcatttggacgaatttataaaaagtgatgagggctacgcagatgaaacgccctacaatattgatccggcagattttctgaatctgattcgaaatgcggaatatgtgtgtacagactctttccattgctccgtgttctccattctttataagcgacagttttttacattccgtcggtataacagaaatacaaaacagtcaacaaacagtcgtttagatacactgtttcacatggcgggaatcactggcagattactgacaggagaagaaaatatagccgattgcttaaagatagagacggattttgaaagtgttcataaaaagttagaaggaatccgacagaagtcttatgaatatcttttggcggcattaaaagatgaagggagtacagatttgtgattgaagttaataaaaaacaggattgttgcggctgtactgcctgcgcagcaatttgtcctaaagatgcaatcattatgaaagaagataatgagggatttctttatccaacagttgataaagaaaactgtattgattgtggtgcctgtgagagggtttgcccgatcattcatactgcaaaggagaaaccttttgaacaagctgcatatatcgtacagaataaagatcaaaaaatcttaagagaaagtacagctggtggagcgtttacggcaattgctaaatatgttttgcacaataatggtgttgtgtttggtgtggaattaggcaccgacttaatggctcatcatattgcggttgaaacggaaaatgatttatatcgattccgtaatagtaaatatgtccaaagttctgtgggggggggtacccaccgacagattaagtccttcttagagcaaggcagattcgtatgctttagtggaacgccgtgtcagatagagggactgaaaaattttttaaagaaaaattacgacaatctgattaccgttgatgtagtctgcagagctgtaccttctcctttgatattccgtaagtatgtagaatatcagaaaaaagtgctttcagacaatataaagacggttcgtttccgcgataagcattacggatataaatattcaacgatgaatgtcataacagacagaaatcatggtaattaccatcagggcgttgaatctgatccgtggctaagagcatttttctcgaatatttgtgatcgaccatcgtgccatttttgtcatttccgaaagcagtatcgtgttagtgattttacgatatgggattgctttaatgtcggtaggttctcaaaagagctggataatgacaaaggggctacaagagttttggtgcacacagaaaaaggaagagagatctttaatgcaattaaggatgatttctcttacattgaaatcgcaccagaagccgctgtagctggtgcaaaagaaatgaaagaatctgttgcaccgaatgagaagcgtgagtcattcttcaaagacgcaaatagaatgagcggagaagaattgtttaataagtacttcccggagacctttaaggttaaagcggaacacagcatcaggttggcctgttataaactgggtatttatagcgtagcaaagaaactatatgtcagactaacgcataagtactaagtttattattcgtcttgatttctgaatctgtattatgcggaaaggaaatcagatgattgaaattaaggataaaaaagactgtgttggatgtacagcctgtgcagggatttgtcccaagaaatgtatccagatgcaaccggatgaagaaggatttctgtacccggttgtcgataagagtagatgtgtagagtgtaatgcctgcaatatggtttgtccaattcaaagtcccgttactgaggaagaaaagcaacaaaaagcttatctggttcagcactgtgatgaaaaggtgagattggatagttcggcaggtggtgcgtttacagctatagcaacagttgttcttcaaaaaggtggagtggtatttggagcagcatacgatgagaattttcatgtgcaacatacttatgtagaaactgttgatgaattaaaaaaattccggaacagcaaatatgtacaaagcgatttgggagattctttctgtttggtaaaagattttctccagaaagatagatgggtttgctttagcggaacaccatgccaaattgagggtttatcaaagtttttgagaaaaccatatgaaaagttgattttagttgatgtggtatgtcacggtatcccgtcgccgcttgtgtggagcaggtatctggaataccaagagcagtcatttccgaaccctgacaatatccgcttccgggataaattttatggatataagtattccacaatgagtattatccagaatggaaagaacgtatatcatgcaggatcgcagcttgatccaatgttaagagctttcttctcagacacatgtgatcgtccttcctgttatgagtgttctttcaaaaagagatatcgtgtaagcgacttcacaatttgggactgcttttctgtatatgatttcgataaaaaattggatgatgacaaaggtacgaccagagttctttgccactctcaaaaagcggcgagccttatgcaagaggtaatggagtatgcaaggtgtgaagaagtttcggcggataagttggttgcaggtgtaaaggaaatgttcgaatctgttccaatgaacccaaagcggaccgtatttctggctgatgcagcaaagatgtcgggtaaagagctgtttgaaaaatactatcctgtcacgaacaaggtaaaagtaaaaacagccattcggaaggtccttctggtgactggaatctatggaacaatgaagaaatgcttaaatcgggtgcgaggtagataaaataatggagccatttgtaagtattattgttccggtatataaagtaccggagcagtatctgagaaagtgcattgaaagcacaatgacacaaacgctgaaaaatattgaaatcctgttagttgatgacggttcgccggatcaatgcggcaagctttgtgacgagtacgcagaaaaagacaagagaattaaggtattgcataagaaaaatggtgggctctcctcggccagaaattacggctgtaaagctgcacagggcaaatggatcatgtttgtggatggtgatgactggattgagccagacatgtgccagaccatgtatagtgccggagaagaaaagcaggtaaagcttgttatgtgcggtattatgaaggattatggtaaatctgctacggaatataaattctatctggaagatggaaaagtatataaaggtccagaatgtaaatggcttcagcagcagcttttggtctataacggaaatatcgcagttgcgtattctaaattgattgaccgaaaattattgttggacaatcagattttccatgatgaagtgcttcgtcaaggcgcagagggactggaatttaacctccggctatttgaaaaactggagagcgcaactttcatcaataagccgttttatcactacatttataatgaaaattcgatttcagcatcacacaatgaagctaatcatgagtttgtaattaaatgttttgaaaaaatcaaggcgtttattgatacctctgacaataaggagatgctgaaaccttggtttgacaatcgactgctatatgtgattataaccacagcaatcagtggctatttcaatccgactaatacggaaccgtatacagataaaaagcggaaatatgcagcatatctggaaaaatcgattgtaaaagaggctttgaagacaaagaatacagttggaattggaaagcaaagagaagtagtgctgttctttattaagcatcggatgtacttgatgcttaatatgatgggaaaaatgagaaaatggcaaaaggagcataaatgatgggacagtacgcagcaggaattgttctttataatcctgaaaaggaaaggttgaaagaaaaccttgatgccgtttgtgaacaagttgaaaaagtttattgctataataacggcttgcaaaaagccgatgaaatcaatgcgctactcagtgcttataagaatcttcgtgtgattggaacgggaaaaaatgttggaatcgcggccgcattgaatgaattagtgaaagaagccgcaaaagaggatattgaatggattttaacactggatcaggactcggttgtgtgtaatggaatggtaactgcattagcatctataaaaaatgaaaagaacgtagctattatatgtcctgtgattgaggatgtgcgtagaaaaaatgaagcaccagccgttgtaaaaaatatggttgaagacgtgaacttttgcattacttccggtagctttatgaatgtaaagaaagctcttgaagtggggggctttgatgaaaagctatttatcggattagtggatgatgaaatctgttacaagataaagaaaaatggttacagaattattcgtaatgatgctgttgtgttaaatcatgaacttggaaatcttaccccatcaaagcatgaatccttttatttgaggataggggaaattctacacagtgatagcataaaaaaattatcatataagcgaactgttaatccaatgcgcctatactatgcaacgcgtaacatgatttatttgaataaaaagtacccgcaagaaagtatgtcttggtcaacaaagaggcttgtgtataattcggtttcatctttgttgagaggaagaagaaaagtgtctctactaaagagtgttattaatggaattaaagatggaaaagacatgaatatttgaggtgaaagaaaaatgaaacacgcttacatgattatggcacacaatcaaatcgatcttcttaaagtgttgttaaacaaattggacacaaaagaaaatgatattatagttcacttggataaaaaatgtaatattgaagaaagtgatttgcaagatagtttgaatgaagcgtcgctgtattttgcgaacagagtttctgttacttgggggggagtaagtcaaatcgaggcggaactaagtctcatgaaaaaagcgcggagtattggttcacactgctattatcatcttttgacaggagtggatttgccattaaagccaatagagtatattaattctttctatgaagaaaatcaggggaaagaatttatcaattattctgatagaaaagagtgcgacaggcagtttaatctctgagtgaaatattaccagtattttagagacaattgtggcagaagcaaaaatatatatacagttttaaacaagattggaattgtcttacagaaagcaatacacaaaacaagtccatttgaaatgaaaaattttgtttgtgggagtgcatattgggatattacagaaaatctagtagattacgttctgaaagaagaaaacaaaattgaagaaacatatagatatacaagttgctgcgatgaagtttttttacatagtatagtttggaatagtagcttcagagaaaaactttatgtgaagtgcttagggaatggatataaaggaaatatgcgttggattgatatgatacacggagaaaatgctggaccatatattattcaagaaaatgatgtggagaatattattgcatccgggatgctatttgcaagaaaatttgatatggacaaatatccaggcgcagtaaaaaaattaactatgttagtttaactaataaaaacaagttgacatttcaacaacaataggaagaaaggaaatgtacatagtacattggacaaaatgaatggtatgtagtctatttggtttgtgtttaatagggtatataggatatattattttaacaaataagaaccccaaaaagctattgagcaaaatgattgttttaacagcagtatgctcattaaatattagaatgggctacatgttgaaaattggaaatagtgtggttggtttttcaagcatacttgtgtgtttgactggattaatatcgttgcttttgattgtgcaaaaaaagaaggtcccaagaaaattaacgattgctgttgttgggatgattttgatattaggtcttggagcatgcagaaatattatactaccttataaaaaaagtgttgttactgggaattggacagattatgttttggggaaaaacgttgaatcatatatatcgggacaatcgttacagatagggtattatttggttctttcttttataggactaattttaatagcatcggatattttgttagatgaatatgacttttgggatgtactcgccgatgttataaaatactcgaaaatatcgataattgtcgggtatgttgagtatgtaacaaaaaacttttttcactcgcgtataataactgatttatttatagctttttttggaaatcagggtgcacaacaaaatctgctagtagatcgaggtggacattttgcagttcaaggtgcaacaaaagagtcgtcaatgtttacaacggttcttttttacatagctataatgctaatagttgattatgcaaaaaataaatctagtaaaaacaaaaaatggctatttggctgtgtatttttgcttgtgttaaatccagcagtatcttcaattgtatatttaggaattcttggacttgtttggatttcctataaagatattttggaagtaaaaaaattcagtggcattaaaattggacggatagtattagtcgtttttgtaattgctattattgggtggagcattatttcaaatgcagacactatgctcaattccaataattatcttttaaagcgagtaggcatttcgatacagcagttacagattattgtatcgggggcaggaacattaatgtatagttctgaatctatccggttgtctggaattgtatatgacttgaaattgcttgctgaaaggccgctattaggatttggattgggctcagtttcgtgtaattctggagtagttacaatgttagttaatgctggaatacttggcttcgtagcttggtattatacgataaatagatatatgaatatagaaaaatcactaagtgaagctgtattctcgatatatattgttatttttccaagtgtttttttgaatgattatgagactatcttctgcattataattccaattgttttgcgctgttttaaatatctaggcatatcaaattatgcagccaggacaataaaaagtcaaaatgcgtgaaaggataaaaatggaaaagccgttaataagtgttgttacattaacatataagaaatttgattatatttacaaggcgatagattcggttctgaatcaaacatatccatatgttgagtatattatttctgatgatggatcgccaaactttccgcaaaatgaaatagaagattatgttagtaatcgcaaaggaaaaaatatcataaaatttagtatcatatcctcgcataaaaatagtggaactgtgaaaaatattaatcgagcatatcaggctgcgacaggagaaattttaattccattatctgcggatgatatgttttattcggaagatgttgtcgatgaaatagtagcagctttttcaaagaaaaaatgtaatgtactagttacaagtcggatggcctgtgcagaaaacgggacagagctaagaaaactgccatcagctaaaagtgaaaaatatatccgaaatcttgatacagcatataagcaacatttggcatttatcacggatgaattttataatatggcttctggtagcgcaatgtatataaagaaatcttttatagataattggggatattttgatgagaagtatgttttatgggaagatggtccgtttctcacacaatacacgagaaataatataatttcaacagcatatgaaattataagtattaagtatcgcttgggtggggtatctaatggaaagccacatccacttatgcgtaaagaccgagaactttataatgaaacagatcgcgtcgcagaagtatcggaaataaaaaaatcgcagaagaggaaaattgagtacatctgtaaaagatacaaggtatcttcttggaaccaaaagctctttctatatctggcttatccggatgttatggttgagaaagttatatataaaattagacaggagtgaatggaatgcaagtaataaaatatgtatttcaaccccatggagatgatcgtggacagctagtagcgttagaagaatttaaggacatccctttccggatcaagcgtgtttattatatgtatgatactgctgatggtgtaacacgaggttatcatgcacacaaatgcttgcagcagattttggtgtgtatccatggaagctgcaagattcgtttggataatggtcacgagaaaaaggttgttccactggaaaaaccctatgagggcctttatgtggccaacaatatgtggcgagaaatgtatgatttttcgccggatgcagtattgctcgttttagcttctgagttgtatgacgaatcagattacataagaaactatgacgagtttctggaatttgttaaaaattgtggagataccactggaattgaaggagaaaaagaatgatgaacgtaccttttgtgagttttcgacccatggagcatgaaatggatgcggagctgcgtgcagcgtttgagcgtgtttatgaacgcagctggtacatcgagggcaaggaagatgaagcatttgaaaaggcttttgctgatttctgccacgtaaattattgtgtcggtacaggcaatggtctggatgcactgatgcttgcgctcaaggcactggatattcatgcaggtgatgaggtgattgtgccttccaacacctttatcgcaaccgctctggcagttacatataccggagcaacacctgtttttgtggaacctgatatccgtacttttaatatcgaccctgcaaagatcgaagaaaaaatcactgcaaaggcgaaggctatcatgccagtacacctttacggtcagccttgtgatatggggcctattatggagattgcgaaaaagcatcatctgtacattgttgaggattgtgcacaggcacatggtgctacctacaaaggtcagcgcattggttcctttggtgatgcagctggcttcagcttctatcccggtaaaaaccttggtgcactgggtgatgcaggtgcaactgtgaccaatagcgaggcagttgcacagaaagtacgtgcattgggcaattatggttcagactataagtaccatcatatttatcagggcaataattctcgtctggatgagatgcaggcggccttccttgctgcaaagctgccgcatctggataagatgaatgcagaacgccgccgtattgcacagatgtatctggatggcattcaaaatgaaaatgtcattttgccatatgttatcccggaggctgagccggtctggcacatttttgctattcgttgcaagcatcgtgatgagttggaaaaatatctgaacgagaaagaaattggcacgaacaagcattatcctatcccgatgcacatgcagaagtgttatgcagatctcggcatccagcaggggaaacttcctattgcagaggaaatcagtgctacagaactgagcctgccaatgttctatggaatgacggatgaacaggtgcagtatgtaatcgatgcaatcaatgctttctgagagggtgaaatctgtagggaaaaaaagaaggtgtgaatctaaatggataaagccaaaagacagtccaatattgaacttcttcgaattataacgatatgcggtgtgatagtgctacactataataatgtaacaatcgggggggggctggcgtatgcaaaaggagtgaatttatacatcctttattgccttgaaagtctatttgcatgtgcggttgacctatttgtactcattagcggatattttatgtgtacaaagcaaaagagggcattgagtaaaccctttgaattgatagtacaagtgatcttgttcaatgagcttttttatgttttttcattgctcgtacatcatgaacatgctgatataaagcatattttggggcggttaattcctgcaaattggtttgtgattttatacattacactttactttatttcgccgtttttaaatatagttattcaaaaagttgaggaaaatggaatttttaagaaatttgtggtgacgctgctattgttattttctgtttatccaacatttgtagacgtcttgggagaatttacgcataaagagtatattgggcttagttcggttggtatgtacggcagtcagtggggatatagtatcattaacttttcactgatgtacataatcggtgcatacttaagaatgtatccagataaaaataatattgcgaagaatattgctagaatctattttggcgttgtagtattgactatatgggcgtttgttaataacaaaacaggatttgcaacagagcgcagcgcatgggaatattgtaatcctttagtgatttttatggcagttgaaatttttaggacgttctcccaaatagagatgggcaatcgtaaaggtataaataagatggcgggagcatcttttacagtgtaccttttacacaatcggttcttaaaatttttacaaattccttattttgtttctaaatcttctcttttgatgatactacatattataatttcagtaatgctcatttatataatatgcacaataattgatatctgttatagtagaacgattttgtggatgctgagagcaatatggaaaaaaatcccgattttcaaaaaagacatatttgaagtgaatggagatagtaatatttgaagaaattaaaactatttattgaaaatttcttggtgtatggtttgggcagcataattagtaagattatcccactgattatggttcctattgtcacacgcctgatgccgagttccgactattatggtatcagcgacctatcaaatactgttgtcagttttggcagtgcattggccgttatgggaatgtacgatgccatgtatcgtatgttttttgaaaaagacgatgaatcctataaaaagaaaatctgctcaacagccttgtgctttactctgataacctcgctggtgatttttctggtgatgttgttgacaaagaatttaattgcacagtgtttctttggcgataggcaatatgcatatgtggtttacctttcagcaatggcaaccctcgttggtgcaacaaacagtatcatttcggctccgacacggatgcaaaataagcgaaagatttttctggtaacaaataccattagtccgctgttgtcctattcgatttctatcccgatgttgttagcagggcattatgtgattgcattaccagtagcagcagttatttcaggtgttacaatggaagtggcatttggaattatgaatcgtgaatggttcgatcctcgtcagtttgattttacattgctgaaagaactacttgccatagcgattccgttactgccaaactttctcatttactgggtattcaattcctgcgataaggtcatggttacaaatatgatcggtatcggcgcagcaggtatttactcagttggctctaaactcggacatgcaagccaattgatttatactgcgtttgcaggtggatggcagtattttgcattttctacaatgaaagacaatgatcaggttgagtcaacctctaatatttttgaatacttgggagtgttgtcatttagctgcacggcttttgtatttgcattagcacagtcgatttaccaaatcctttttacaggagactatgttagtggttatataatttcaccttacttgtttttagcaccgttgctgcaaatgctttttcaggtggcttgcaaccaattcttggtagtaaaaagaacatggcctaacatgttgatcttgtcgggaggtgcaattgcaaatattgcaatcaactactatttaattccagttttaggaattgaaggagctgcaattgcgacgctggctggttatgcaatttcggatattgtaggagtgcttgtgctgcagaaaatgaacttgctcagaattcagccacgttttatcgctaccactgggatgatgttggtatatattcttgtatggcgattgattataaaagacaatgtgcttgtaagttttatagcggcagttttgacatcgctcttgatggttttattatatcgaaaagatttaacaaagttgctggaaaatttgaaaggaaagaaaaaatagccctgtgcaaattggaacgaaagggtgtaccactcatgttatcgtgtgaattacgaataagatcaaaaacgcttcaagttggaacacacaatagaatagcgtattccctttttatgtgtggtagaaacatgatttgaaagtggagataaatatgaatacaagttatacaaccggaaagaattgtattattgatgaaacggcatctattggcaaaaatgtcgtgcttgggcacaactgcattattgaatcaaatgtgcagattggggacaatacctatattgatagtaacacgattgttcgcagtggaactcaaatcggtgaaaattcgtttgtcggtgcaaattgcattattggcgaatacctcatggacttctgtataaatagaacaagcggtagccatgtcctgaaaatcggaaacgatgcattgattcgaagtgggtcaattatttacacggattccgagataggggagggatttcagaccgggcatcaggtaacaattcgggaaaaatcccaaattggcaaccatgtgagtgttggaacactttcagacattcagggcaattgctcgattggcaattacgttcggatgcacagtaatgtgcatattggacaattgtccgtagtagatgattttgtatggatcttcccttacgttgtactgacaaatgatccgacaccaccgtccaacaattttgtaggagtacatattcatccctttgcaattgttgcaacggggactgtagttatgcctggaattgaaattggacaggatgcgttggttgcagctggatgtacggtaacaaagaatgtcgagccgtatgctgttgttatgggtaatccgggaaagcctagaggtgatgttcgtacaattaaaagcaaaattacaggtgaacctatttatccttggcgtcatcactttgatcattatatgccttgggccgagagtgattttgatacatggtataagagccttgatttgaaagaaaagaaaaaatataaggttgatgcacttattaaatgagaaaatgattcgtgcggtgacttgagtgcaaccttgtgatttgagccatgggaaagtacagtttacaagggactacacagggtaggcatctgacgggaggggttccgcccgtcagattttccatgtgatattcaaactatcgcttgtggcggctatggtggtaatcatcaaatccaccacacgccgcttgtcatcaaaggatacatcctcccaagtgtcgaggtagccggaaatctggctgacctgttccgggctgatggcttccactgtcaactccgctatcctcgccagaagttcctgcttgcgcccgtccagttccgctatcttcacattcacataggagagcagcacattgtttgcgcccgtcagactgtccaccagtttttcaatctcgccgtccacatgggcaagctccacttgcagggcggcgattttcgggtttgcctttgccgctttttttctgcccgtcagcgttttgtagcttgccagcttcttcaccatctgctgataaacaaccgcttccagttcggaagtgatgattttcccgcaccccggacaactcttgttatccagccgtttcgtacagcgaaggtattgcttgccggagggattgaagatactcataagggcatacccgcagttcccgcacttgatttttcccgccagccatgtatgggtggcttttcgggcagactggattttcatgttgttcatcagcttcttgcggcaggtcagccaga

SEQ ID NO: 258 - DNA, 5383 bp, unidentified
  source 1..5383: mol_type = unassigned DNA
atgaaaaaaatccccttaaaaagaatatttgcagcggcagcattagtgtgctgtcttaccgtgacaacagcttatgcagatgtcacgcaggaagatattgacaatgcaaaaaatcagatcaacaatctgaaaaaccagcagaaagatgcacaggatgcggtcgatgatatcaatggaaaaaaaggccagctagagagcgacctgaacaatttaaatggacagatgaccaacattgtttcgtccatgaatgcccttgagtcacagatcaatgataagaaaaaagaactgtcagatcttgaggatgagatcgatcagacgcaggataatctggaagctgcaaagcagcagtcagccagccagtatgaggatatgaagatacgtatccgctatatgtatgaaaatggaaatacaccgatgcttgagatgctgttatcggcatcatccttttctgattttctgaaccggacggagtatatttcggagatcaattcgtatgacagacagaaattagaggagtttatccaggtgcaggaacagattgcggcagaggaagcttctcttgaagaacagaagaaagatctcgagagtgagcagcaggaactgctcgccatgcaggatgacatgaaggtaaaacagaattctgtaaacagccttatcagttcaacgcaggcaaatatcagccagaccaattctgaattgagcagcgcgcagggaaaagtcaatgatatcaacagtcagatcgcacggatggaagaactggaaaaacagttagagatccagaaagcaaaagaagacgctgcgagaatggcggagatcaagcgtcaggaggctgaaaacaacggcgaattttcttatgtcccaagtgacagtgatctttacctgttaggagcgatcatccagtgtgaggcagacggtgaaccatatgagggaaagcttgcagtcggaagtgttgtcatgaaccgtgtgcgaagctcttatttcccgaataccgtatccggtgtgatttatcagagcggacagttttctccggtagccagtggacgatatgcgctccgcctcgagcagggagtcaataatacctgtatgcaggcggcacaggaggtgcttaacgggaacatcacaaacagctgcctctatttcagaactgtgatcgacggattggaaggaacgatcatcggacaccacatattctactaatacggctgtcaattgcgcaaattacataaaaatcatttttgaaaccaaatggaaaaagagacgtttttgtgagaaatatacaaaaaacgtctcttttttgtggaattgagcggttgcgcatgataattttttaacgaaaaacagtatataaaataggtaaaaaccaaatttaaattctgaaaaaaatgtgaaaaaaaaagaaagctattgcatttgaaaataaaatatggtagcatgagaaagtactgaaaagccaataaaaaagccgaatacataaaaacgtagaaaattaggaaaaagaaaatttaaatttaaaagaagagattttagatttattttttttgctaaaagattgttaaaaaaataacgacgtttttcggcagatttattatgaaggaaacaaaatatactgcatattatgagcggtgttttgtaccacaaaaccgaagggagaattcaaaatggcaagaaaagtagttttagcaggcgcatgccgtacagcaattggtaaaatgggtggagcattaagcaatactccagcagcagacttaggtgcaatcgttatcaaagaggcattaagaagagcaggtgttaaaccagagatggttgacgaagttaaaatgggttgtgtaatccaggcagctcagggacagaacgttgcacgtcaggcttctatcaaagcaggactcccaatcgaagttccagcaatcacgatcaacgttgtatgtggttctggtttgaaatgtgtcaatgatgcagctaccatgatcatggcaggagaagctgatatcgttgttgcaggtggtatggaaaatatgtcaatggcaccatatgctatgacaaaagctcgtttcggatatcgtatgaacaatgcaacgatcatcgatacaatggttaacgatgcattgacagatgcattcaatcattatcatatgatgatcacagcagagaacgtatgtgataaatatggaatcacaagagaagaattagacgagttctcagcaaacagccagcagaaatgtgaaaaagcgatcgctgaaggcaaatttgcagatgagatcgttccggttccggttaaagtgaaaaaagagatcgtagatttcgtgacagatgaaggacctcgtgcaggtacaacagcagagtctttagcaaaattaaaatgctgctctggtaaagagggtggacttgttacagcaggtaacgcttccggtattaatgatggtgcagcagcaatcgttgttatgagcgaagagaaagcaaaagaacttggtgttacaccaatggctacatgggtagccggagcacttggcggtgttgaaccagagatcatgggtgttggacctgttgcttccactaagaaagtattagctaagacaggacttacaattgatgatatggatctgatcgaagcaaacgaagctttcgcagctcagtctatcgcagttgcaagagatttacatttcgatatgtccaaagttaacgttaatggtggtgcgatcgcacttggacatccagtaggagcttccggatgccgtatccttgtaacattattgcatgagatgcagaagagagattcccacagaggtcttgctacattatgtatcggtggcggaatgggatgctctacaatcgttgagagataattaatcagacaaaactgtccggaaagcgggtaactgcttttccgggcgtttccattacatattaaaaattcagaatgaattcaggaggtactaacatgaaagttggtgttattggtgcaggaaccatgggacagggtattgcaaaagcatttgctcaggtagaaggatatgaggtagctctctgcgatattaagcaggaatgggctgacggcggaaaagccaaaatccagaaaggttatgcaagacttgtagaaaaaggaaaaatgacacaggaagctgttgatgctatccttgctaaaatcactccaggattaaaagaagacctttgcgcagactgcgatctgatcgtagaagcagcattcgaagatatgggagtaaagaaaacaacattccaggaattagataagatcgcaaaaccagagtgtatctttgcttcaaatacatccagcctttccatcacagagatcggaaatggtcttacacgtccaatggttggtatgcatttcttcaaccctgcagaccgtatgaaattaatcgaagttatcgctggtgtaaatacaccggatgagactgttgaagctattaagaaaatctctgttgagatcggaaaaacacctgtacaggtaaatgaagcagcaggattcgttgtaaaccgtattttaattccaatgatcaacgaagcagcattcatcaaaatggaaggtgtatctgatatcgcaggtatcgatgcagctatgaaacttggcgcaaaccatccaatgggaccattagagttaggagatttcatcggtcttgatatctgccttgctattatggatgttctttacaaagagactggtgacagcaaataccgtgcatgcccattgatccgcaaaatggttcgtggtggtaaccttggtgctaagagcggaaaaggattctatgtatacaatgctgaccgcacaaaaacaccagttgacgctcagtaattaacagatattaaggtttaggaggatttgaaatcatggatttcactttagacaagaaacatgaaatggcgcgttctctgttcagagaattcgctgaaaacgaagtaaaacctcttgcacaggaaactgatgagacagaacagttcccggcagagacagttaagaaaatggcaaaatatggattcatgggaatcccggtaccaaaggagtacggcggacagggatgtgatccattaacatatgttatgtgtgtagaagagttatcaaaagtttgcgctacaacaggtgttgttgtttccgcacatacttctctctgcattgatccaattatgacttacggtacagaagaacagaaacagaaatatgtcagaccacttgctacaggcgagaaacttggtgctttcgcattgacagaaccaggtgctggtacagatgctcagggtgctcagacaaaagctgttttagacggtgacgaatgggtattaaacggatcaaaatgcttcattaccaatggtaaagttgcagatgtttatattgtaatcgctatcacaagcattacagaggacaagagaggaagaaagaaaaagaacttctccgcatttatcgtagaaaaaggtgctccaggattctccttcggaacaaaagagaagaagatgggtatccgtggatcttctacctatgagttaatttttgaagactgcagaattccaaaggatgcgttacttggacctgaaggaaaaggattcccaatcgctatgcatacattagatggtggacgtattggtatcgcttcccaggcacttggtattgcagaaggtgcattagagcgcgcaatcgcttatacaaaagaaagaaaacagtttggtcgttctatcgcacagcagcagaatacacagttcaagttagctgatatggcaacaagaattgaagccgctcagatgttagtttataaagcagcaatggcaaaagcaaaccagaaagtttactctgtagaagctgcaaaagcaaaattattcgcagcagagacagcaatggctgttacaacagaagttgttcagttattcggtggatatggatacatcagagagtacgatgtagagcgtatgatgcgtgatgctaagatcacagagatctatgagggaacaagcgaagtacagcgcatggttatctcaggtgcattgcttaaatagacgtgatctagcggattgaaaatggatggaagaaatatagaatcacgcttgcgagaatgaaatatttctgacagacatttgagagcgcaacgcgcacgagaaacacgaagtgtttcgagtaatccgcgattaatgaaaatataataacataaggagtggaaaatacatgaatatcgtagtatgtattaaacaggttcctgatacaaagggtggagtaaaattcaatccagatggaacacttgatagagcagcaatgcttgctatcatgaacccagatgacaaagcaggtcttgaagcagcattaagaatcaaagatgagacaggagcaaaagttacagttcttaccatgggacttccaaaggctgatgcagttcttcgtgaagca

SEQ ID NO: 259 - DNA, 21901 bp, unidentified
  source 1..21901: mol_type = unassigned DNA
tcagtttttcttggctgttttgtatttcttataaaaaactatactcagcactgccataagtacaataatcaaataccggataatatagaaattatacaaagctataccaagcaaacacagaaccgttgttacacatgcgagtaatattagttttctatcttcaaaaacagaagattccgcaataccattctctttgcacaattttctagcccaaattccttggaagagtgccatcagaatataagagaacagcgttgtatatgccgcagccatatatccataagcattgataaagatgtagtttaacacaagatttgccacagctgcaatcactgccggatacatcacatactgtgttttcttgtagtacacagctatatccgaataaatattggcaaatgccgtgaagaagactcccgcagcaatcggcggcataatatagatagcctcataatattcttctgttgcgagtattctaacaatttccggtgccatataggtcatcatcactgccatcactgcatacaaaagcataatttgagacgatatcctctttataccttttacattgctctctatattctgaaatagatacggaacaaaagaagcgtgaattgcctgccaaagcatcaaggacagcgaactcactgtatacaaggtactataaattccaactgcactattatttaccatctgactaatcatcattcggtcagatacacttagaatttgtgcggctattgaatatccaataagcggaatgcttagagataaagacaacttccaatattctttattgtacagtgtctttcccttccaaaacaggcacacccaaattactgcagccacaccatatacaacgagatagtttgcgtaaagtcgtacctctgcaatattctcatgtccaacgctatttgcgccaagcactgcaacaactgacaatactgatgccaatatcgcagatcctatcgttacgcatcctgataacttatatttatattcgtatctttgacgtgccagccaaaaatcacgagccggggccactaggaatccaatcaacatcaaaaccatcaatccatttggcagtcccaacaatctactccaaatatcaggagtaataaaatatatgatggcaataataagagcaatcaaagatgtcagtgacagcacagaagattggtactggtctctcttatccggatactccttcattgccactgaatagccacccgatgtcaacgagagcgttgtaacaacacttatcagggaataccatgaattgtacaggttaacttcgccaatttgatctgttgtcatcagtctggtgaagattggaactgttataatcgccaatcctcttgaaaagactgtagacagtgtatagacaatcgccgacttcgcactctctgacatcttttgaagttttcgtttaatatccaccatataaaatgtactccttcaggtcatttcggagattttggattattccttccttcatgccatcttaattcgtcaaacaagtacaaccttgaaatgctggttttatagtaggaaaatatatgtggaaatgaggaaatcaactttcgctttgtctgcaaaaaccatttttctgcaaatttaatagtacatgccgactaagatgcctcagcgctaaactagtctctgcgaaacagatcgcgcgtgtatactttctcctgaacatcgtccaaacagctatcgtagcggttggcaataatggcttgactgcgcttcttgaattccgccagatcattcacgacttcactgccaaagaaggtagaaccattctccagcgtcggctcatagatgatgaccgttgcgccctttgccttgatgcgcttcataacgccctgaatggaagactgacggaagttatcggagttcgacttcatggtcaggcgatatacaccaaccaccacattgtgttccttactgggatcataagcctcgtttgcttcgtatgcgcccgcaatttccagcacacggtcggcaatgtagtctttacgagtacggttggattccacaatggcctcaatcagattctccggaacatcagcatagttggccaacaactgcttggtgtccttgggcaggcagtaaccgccataaccaaagctagggttgttgtagtggctgccaatgcgaggatccaaacagacgccctcgataatctgctgggtgttcagccccttcatctctgcataggtatccaactcgttgaaatagctgacacgcagggccagataggtgttggcaaacaacttaacagcttctgcctccgtgaagcccatgatcagcgtgtcgatgttctccttaatagcaccctcctgcagcaaacccgcaaatgtgttggcggctttcaccagacgggcattgtccacgtcagtgccaacaatgatacggctcgggtacaaattgtcgtacagagctttagactcccgtaggaactccgggctgaaaattatgttgtcgcagtggtacttttcacgcacagaagccgtgaatccgaccggaatcgtggacttgatgaccatgatggcatcaggattatactggatcaccagcttgatgacagcttctactgcagaagtatcaaagaagtttttcttgctgtcatagttggtaggtgctgcaatgacaacaaaatccgcatctttgtaggcggcttcagcatcaagtgtggcagtcagattcagatctttttcggcgagatacttttcaatgtactcgtcccgaatcggagacttcttgtgattgataaggtcaactttttccgggataatatccactgccatgacctcatgatgctgcgatagcagcgtagcaatggacaaaccgacatagccggtaccagcaactgcgattttcatagtcttcccctctcttcttattccatataaaactctttataccactcagcaaacttccgcaggccttcacgcagtggggtatggggcttaaaaccgaagtcacgctccaacggctcagtgtcagcaaaggtcacaggcacgtcaccgggctgcatgggaaccagttccttgtgagcctcaaagtcatagtccgcagggagtacaccggcacgcaccagctcctccgacaggatctgcacaaagtccagcaggttctccgggttggagttgccgatattgtagactgcatagggcggaatgggcaaaccatcctcgccattcttcttttcaggagctttcgccatcacacggacaacgccttccacgatgtcatccacataagtaaagtcccgcttgcagttgccgtagttgaagattttgatagtttcgccgttcaccagcttattggtaaagccaaaatatgccatatccggacgaccagcagggccatagaccgtgaagaaccgcagaccagtagaggggatattgtagagtttggagtaagcatgtgccatcagctcgttggacttcttggtagccgcatacagagaaaccggattgtccaccttgtcatcggtggagtagggcaccttcttgttgctgccgtagacagagctggaagatgcatacaccaaatgctccaccggataatgacggcaggcctccagaatgttgtagaagccaatcatgttgctctcgatgtaggcatccgggtttgtgatggagtagcgaacaccagcctgagcacccagattaaccacaatatccggatggtactgctcaaaaatgctgttgataagtgccttatccgcaaggttacccttgataaaggtgtagttctcgaacttctgaagctccgccagacgagcctccttgatgcggacgtcataataatcgttcatgttgtccagaccaatgaccttggtatccggctcagtggtcaggatacgtttggcaaggttggagccgataaaaccggatgcaccggtaatgaatactgttttacccatttttatcacccttacccttttctccacaccatcttattaacgacatttacataaccctgaatgatgcgaaccaccttcatggacacggtctcgtccacataatcggggcagggcttgcccaggacgcccttcttcttcatttcaatcgccatatcggtggcgttgagcagttcccgggtagtgatgccagctaggatgaaatcaccggcttccagcgcctcagggcgttccgtactggtgcggatgcacacggcggcgatggggtgaccgatggacagatagaagctgctctcctctggcagagtgccggagtcggagacgattgccagagcgttcatttgcagcttgttatagtcgttaaagcccagcggctcgttgacccggacacgagggtccagctggaagccgctcttttccagacggtgcttgctgcgaggatggcaggagtagagaatgggcatatcgtacttttctgccagtgcgttgatagcggtgaacaggctcaggaagttcttttcagagtcgatgttctcctcacggtgagcagacagcagaatgtacttgtccttctccagtcccagacgctccagcacgtcgcttttctggatcttctccagattcatgtgcaggacttccgccatgggagagccggtctggtaggtgcgttccttgggcagtccggtgtccgccagatacttccgggcaaactcggaatagcacatattcacgtcagaaatcacatccacgatgcggcgattagtctcctcaggcaggcactcatccttgcagcggttgccggcctccatgtgaaacagaggaatgtgcagtcgcttcgcagagatggcagacaggcaggagttggtatcgcccagcaccagatagccctccggctgcaattcgctgagcagctcatagctacgtcccagaatgttaccgcaggtcacacccagattctcgccaaccacaggcacaagaatgtccgggccatattccccgaaggtgttcttcagttcgaaatcctcccaaaacacggtggaaaggtttctgtcccagttctgattgtagtagaccacgcagcagtcaaagtattcccggcaacgcttgataaccgcagccagtcggataatctccggacgggtaccgcaaccaatcatgaccttggtgcgcccatcatttttccatgtaaaattgtgttccataaaaatctcctaacgtcaaccagcagcttctctcacaccggctcgaagaaggtgtccgggtggttcgggttgaagatttcgttgcaggtcatcactgtcaccagattctctgtttcagacagattgatgatattgtgagtccagccgggaatcatgtggacagcctcgatcttatccccggaaacctcaaactccaccgtttccccggtgttgatattccgttcctgaatcaagccgtgaccggcgaccacaatgaacagctcccacttggagttgtgccagtgctgccccttggtgattccgggacggctgatgttgatgctcacctgcccgcaatcggcggtgtgtaccagctcggtaaaggaaccacggttgtccacgttcatcttaagggcgtacttaaacttgtccgtgggaagataggtcaggtacagggagtacagtttcttagcaaaggagccatctggcatcttgggcatcatgagcgtagtcggctgtgtcttgaactcctgcagcagatccacaatttcccccagcgtaaccttgtgggtcacgggaacgcagcagtagcgaccgtctgctttcagaacagtctccacaccgtcaaattcacagtgctgctccttgccttccagcaggtcaaacattccctctaccaaatcgtcgatgtacagcagttccaactcggtactgcggtcgttgacagtgaagggctcgtcattggcgaccgcccagcagaaggtgctgacggcactattgtacttggggcggctgtgacccatcaggttgacgaagcggtagactgcaacctttgcccccgtctcctgagcatactggaagaacagttcctcgccagcctttttgctgcggccgtactcgctgttgccaaaccgacctgccagcgtggcctgaatggaagaggacaacatgatggttgccttattgttgtgctttttcaggcaattcagcaggtcggatgcaaagccgaaattgcccttcatgaagtcttccgggttttccgggcgattcacaccagccagattgaatacaaagtctgctttccggcagtacccgtccagctcttctggggtggaattcaggtcatactcgtagatttcttcaatattcagcgccgggcgggtcttatttttcccatctcggatgtttttcaggttgttgcacagggcggttcccaccatgcccttggcacctgtgactagaatgttcatcctatcacctctttaatgtactgcggtgcagtccggaatatctgcgccatccggcacagttgcgttattgcagatggtgcagttgctgccgatgcgggtaaagttgcccacagtcgcaccagtgcgaatgacgctgttggtgtaaatcagggcgtagtcccctaccgctgcatcacagtggacttctgttccggcatttaacagaacgccgttaccaacagatgcaccattctggacacaggcattttgtagcaccacgcagccacagcccaactttgcgtacggactaatgtaggcgctgggcgcaacgatattgggaaaagcaaagccaaggactttcgccttctcatacacctgtgcccggaaccgattgttgccgatacccaccaccagcaagccgtactccttccgcagctccggcaaatcagcaagactgccaaccaccggaatgccacagatgtcagtgcccacaggttgcccatcatccacaaaggcacagtcatattggagcatcgcctgctccaccactatgcgcccaaagccgccggcaccaaccagcagcaacttttctttagacattcgggatgcccttcagtgcgttctggacatattcggtggtcaggatcttcttaacagtgccttccacatccagacgggtagtgttatggctggtgtaggactcgtctgccatagtatgtacctcgccgttgacgacaaacttatcgtagttcaggtcacggttatccgcagcaacacggaaataatggcccatatcctggctgcgcagacgctcctcacgggtcatcagagtctcgaacagcttctcgccgtgacgagtgccgatgatgttcgtaccggtatcgccgaacagctgctggacggcctttgccaaatcgccgatggtggaagcatcagacttctggatgaacaaatcaccaggatttgcatgttggaaagcgaacaagaccagatctaccgcctcgtccaggttcattaggaagcgggtcatattggggtcggtaatggtgatgggattgccagccttgatctggtcaatgaacagcggaatgacggaaccacggctgcacatcacgttgccgtaacgggtgcagcagatggtagtgccaccacgctcagcagctacacgggcattggcataaatgacatgctccatcatggccttggagatgcccatagcgttaatggggtaggctgccttgtcggtggacaggcagacgacacgctttacaccggcatcaatggcggcgtgcaggacgttgtccgtgcctatgatgttggtctggacagcctgcatggggaagaactcgcaggaaggaacctgctttaaagcggcagcgtggaagatgtagtcaacgccgggcatagcgtcacggatggactgcggattgcggacgtcaccgatgtaaaacttgaccttcttggcattctccggatgcttggcctgaagctcatggcgcatgtcatcctgctttttttcgtcacgagagaagatacggatttccttcaagtcagagtccaggaagtgcttcagaacggtagaaccaaaagaaccagtaccaccagtgatcataagggttgcattgttaaaatcagacatttttatttcctcctaaaatattgttttagtatctttttatcattttgggtaaattcatattcatcgagtaattctatatactttgaagccatcacccctcatttagagacatcgtagggatatcgaattgcttgaccaagtagaacaatagaatgtagtaaataagtaatccactgtatggttcgacattgatcagcgaaaaaaataaaaccagtaacagaatgcgggaagcaaggttaaatttttttaaatgtaaaataccaatcaagacaacaattgaaaatactattcccgcaattccaatcgctgcaagatgataggtcgttgttgatgtttgtgaatctaccgtccccaagctatttctcaaattaacgtaaatattcgttgcattttggtaacctgcaccaaagataggatagttagaaaaaattttcaaatttatgagcgggctattctgtctactcacaacatttacactctgacctgaaatcttatctattgcaccttgtattcctcccaaccattttgcacttaagtattcattctgacttaatcccaaaaagcagattcctgttccaagacacacaatcatgccctgttttatctttcccatttctcctgaattcctcaaaatcagcaacagtacaactattatcagaagtataattcctgcagaagactgtgtcgtaaaaatagtgaacgtgatcacaataaccctcacgatagaaatcttactttcgtacaggatgtgaagaactaatgccagaattagataggctgcaaaaagacctggctcccaaaaaagtccctgatttcttatgctgtaaatcgtccgatacgcaaatatataattgcctgtatacgactcggttccaataaagcattcatgagaaaatggtatttgtattttggcaacattgactgcaagataaagcactagagatattacgcttataaccagcattacatctccgtatattttttgaaacctattccattcaatctgttccgaaatcgcaaatgctgtaaaaaataacacgatgacagagacaagagaataaatggtttccgaaggaaaattcgccagcatcgaaactgctgccgtaaatatacagaatagcaaaaataaaccactgtgcttaggcaatttcaatccattctggtgcacatacatcaataatgatacacatgcaaatgggagcatcatatacaatgccacactggaactcgttaccatgtggtagtgtccgctacaatacaccaccataaaaattccgtacaggcaccacatattggacacaatctcatccagttttggccgaaggatttttttaggcatgaaatttagctccaatccaattactgattcggatatcagggtcgatacggaaagcttttcgtatcaaagctccgatattccttttggcaaaaaattcaattcgcatattcagtggatagagaattatcttcgatatttttctctcatactccgggtctacacatatctcatccacatattttaattgcaccggaaccgaatgcagcggcacctcacaaaaacgttttgtcatcactttattcaaggatgttccaccgtgagtggagttttcgtcggctccaatgtttcgaatcagattccctgaaggacttataccgtacatgccatttgctcgcaaagagagaatcatctggaagtcccaggatgtcggcactccgcgtcttttgaacgcatttatttccgactctatgcttcgtttttgctgcctaaacagtgctggaacatcatatgttttttgagcaatcttgagatactcgggagtgtacaaattgaattctgcgtcatagtacttcagaaacttctttgaccaagaggcccatccacaaggcaatagatgtgaggtaaacatgtagtcatcttgatttgcattatgatactcgccgaggtagtttgtgccgcaaatccataaaactttctcattttcacgatagtgctcaagcaattgcttgcagtatgaaaagaaagtaatatccggcaaacaatcgtcctctaaaaatatagcttctgcctcacgttcaaatacccatttggctcccaagccaatgtttttataaacgcccctgttttctgctgcgtaatttttaattacctcacacggccaatcgatttcagattcaaccatgttacggcaagctgctgccatttctttttcttgtgcagtccttccctgatccgcaagtatgtacattttcctcggctgtactttacgaatagcttctagcactcgtttagtcgtgtcagttcgcttgaagcagaatagcacgactggaatattaaattgttccatcttaacctctcatttttatcatgaatttaatagaaccgtttcaattgcattgtacagttttatctgattttcacttgcgcaatgatttttctcagccagacaccgtgcgttcttacacatttctgtaaagtcttcatccgacaccaaacgatttacacaacactgtagttcctctttcgcactcgccattagagctactcgattttgtaagaggtactcgaacagcttcatatcctgtggtccataaaacaaaattggtttttccgttgccagatattccgggattttggtggaaatcgaatatttgaaaaagcccttcattttttcactttgaacttctgtatgcacaaggacatctgctttttgatatacttcgttaatatgttcatggggcaccgcttcatggaaagcaacaggaagcatcttaaaattggaatgatataactctatactgtcttttgaggtaaaaatatccagtatacccttcccgtcggtttccttaattgcctcagcaatttcttttaacgctttccatcggtctaggtgtaatccacctgcatagacaaaatgggtgattccagtgggctttgaggccggacccttgaattttgataaatcaaccgtgttcatcagaaccagcgtttctttctggaatttctcatggtaggcctcagccatactagaactaatcgttaccactagcttgcaccgctttatacacgccagcattttcttttttaagctggatttgtacagtgataacagcgggttatcttcccattgaatgtgttctgcccaattgtccatgaagtgcattataactggaatattcagctgcatagacagctgattcaccaaacgcattattgaaacgctggctcccaacgtataaatcacctgcgggtgaaaatccctgatagcatcaatcgtagatttatccaactttaccgagatgctatcaagtgtgcaaactgcgaattgacgaagataggacttgatcttattgttgctactctgctgtgtgctcgcggcttttatattgctgttgattgattgagctactttccctcttgaaaattgaattatatggctaggaggaatacaatagctcttaatcctttgattacattgatccattaccaccggatccgaatacacttcaaaaaggcaatctgcatcccatccgctccatatgctttgcagcgttattccagtcgcattcttcttatacatactttgagcgttcacgatcaacactctaggacacttttccataatgtatctttctccattaagcagtacaaagtgtactttctttatcatacagcctttatattttgtatgtcattttctccattctctttaaacatcaaggcaattttttagcttcacttcttcttattttacccaataagcgcttctatgtttttcgtccactttcggtaatcaaataaatcgcacagttttctctcctttttttctctaggcattacggacgcaaattttgccatcgtttcttcaagtgtttcttcaacaatcataacattattagattttttagaatatatcttgagatcacttatatccgttgctataacatctacacccacagtaaccgcttccgcaaacttcgtcgggaaccccgcattgtttgttcttgttgaatcacgaatgatcaaagagcaatcggcgcccttcagatatgcaatactctgctcatgaggcactctgcctaaaaaggctaccgattctggcacatccgctgccgtgaattgaggattgcttttcaaaaactgctctttattaattcccaccacaaataatttgcagttgccattttctgcaactttggaaaacgcggtaacaatttcaccaattttgtcttttttccccggctgaccagaataaatgaaattaacaccctctccaaggttctctgcctccaccgaccacttttcttcgcagaaatcaaccaacgggggaataacgacaacatttttacatgatttgtagtaattcttcaaataattactgattgctataattccatcaagttttttttgaaccacagtcattctgtaccatgtatcaaatcctttgagtattttaaagggcaaagacgcaccatttgtattgtaccactctgtacaatccgaataaatctttattttatttgccctgcaaaattttctaagccgatcaaatgcaacagcctgataattatagcaaataacaccgtcaaatggtccacacactttcatcagcttttcagccggcttgggatctgttaaatatttcacccagtccgaatttccctggggatacggcactgaatatgtgataaacccctgcacttctgacttggtctttaatacgtcagtctctctgttatctttcgaaactcccatgaaaaccacttcattaccgctgtctcgcaatccttttgcaatggccaaaacacggtgtgcggctgcattcttatctggaagttcaaatccgccgatatatagaattttcttcattacattctctcacttctgttaatcttttctgaataattacgctgtcaggcgggtactctcctttgatgactgtcccccccgatgacagaattatccccgattgttgttccacggaggatcagcgtattggcaccaatccagacattattgccgatgacaactggcgcggtcttgaacctcattgcagccacaccgccttctgcacggtaatcatggtcctgatcgtagatcagaacattgggacccaacatcacattgtcgccgattttaatatgatcgtaggcagtaacaacgcacccattgctcattccaaaattctttccaatttccaattttccacctttgcgaactcggatctttgcaccattatgcattttcaactttttcgcaatgcgcaactcggattttccatctacggtgacttcggtcatcggcgacataatttccggaaaggctgcatgaaaccgtccaccattctcaatcttcagaatagcatacttgattcccccaaacggaacacaaaacagcgccttaatgtattttattcatctttcccctccaacgcctgaatctcttctaaatacgccttcaccacgattttccggtcgaattcccgttccatttttgcacgaccggccagccccatggctttccgctgctctggcgtcatctgcataaaccgttccagcgcatggactagagcttcctcatcctgaatgggaatcaggaatccggtcactccatcttccaccgtttcccgacagcctgcacggtctgtggcgatgataggccgggcgctggccgccccctccagaagcacgttgctcattccctccggatagtaggacggatgtacgatgcagcttgcctgtttcaggaacgggatcatatccttctgctggccatgatagaccacatctccagcttcctgtgcctgcttcaggatctcttcgtaggcagggtcgtcacagcctccacagatatggaacaccgtgttggggtactccgcatggatacgtttggcagcagcgagatacaggtcgattcccttttccttcaaaattcgggatgtaaactggaagtgtactgtctcaccttccggatatgggaacgctggatggctctccaaatctacaccggaccccggcaacaaccggatcttcgcatgcttcggcatcatcttgtgtgcttcaaagaagcgctggttttcgctgttctggaaaaaaatgcagcttgcaccggccacgcccatcttgtaaagccgggtcgtcagtgcctgcaaagggccgggattttccaccggagtaccgaggccggtaatgttggggatgtacttgatttttaacatctgacaggccagccctgcataaacattcggtttgatattgtttcccagcatcacatccggtttgtgcctttttaacgtctgatggtattttcggaagaggacaatatccttaaatgggttctttccttgtcgagcggtctcgatatcgataacaccgcaccccatctgctcgagctcatccttaaactggagtacctgacacattacagacacctcgtgtccttctgcaatcaagcctttcaaaatttcccggcgcagattatagataaaagtagtatcgtttgcagctaaaataattcgcatctttcactcacaccatttgtagtttttccgtttcacaatttgtatcatttaccgacaccagcctgctctcccgtagaagcacaatgctttccttccggaactccgggtcgatttttccgtctacaacgcccttgcggcccagcacgacctgaatgcttttccaaatgactttcaggtcaaatttcaagctaacattctggacatactcgcggtcgtagtaaaccttatcgtatacctccaccgtatcccgaccattgatctgtgcccaaccagtaatgcccggcgttacctgatacaccccgtaccagcggcgcagaaaacgaatctcacgttccgtatataccagtggacgaggaccaatcaggctcatttcaccacgaaccacgtttgccagttgcggcaactcatcaatgctggtgtctcgtagaaaacgtcccagtcgggaaatgtacgtctctggactttccagatcaccagttgccacattcttcggcgcagaactcttcatcgtccggaacttgatgatattaaagcaatgtgcgcctctgcctacccgcttttgtaaaaagaaaattggttcgtccggtgcgctgatcttctgtgcaacgctcaccaccaaaaacaaaggggaaagtacaatcagcgccagcgccgccagaatgcggtcaattacagatctcaccgcaaggtatttcttctgtttccgagtcagatggacatagaactgtccaaaatcaacgtggtaattcaattcttccatgttttcctcacactatcatcctgcttttgcaggttctacattttcttttaaattgagacatgatttttgagatttcggatttctggtttcccagctcatcccgatctcatccagctttgcaatccgttcctctgtcaggacagcgcagcttttttcaggattatggcgggtataccgctgccgtttgacccaattgccaaggttgtatccgttcggcgacacatattctgccgggatattcaggtcgccgtgggcatcaaagtagcgcttcgcttcctgatacccttcgttccactggcggtcattgcggttgccccagtacattccgatacggttcagccgctcgacctgttcgcccgtcagttttcctttcgggtatgcccattgctggcttgcgacccactgtcccagtcgttcaccagccgctgtcacataggagcgcggaatattcaggttgccgttttcctcatagtaggcggcagccagcgcataagccttttcccacttggcatcgaaaatgttccacaccatgctgatctcatcaagctgtgcgatgcgttcttccttcaaacggccattgagcttctgctgccgggtcttgatgatccactgtcccagtgggtagccgtccgggtctacatattttccgggcaccatcaggttcccgtaggtatcgtggtatttcttggcaacctcaaatccgtgctgccatgcaatttccttccggttgccccagaccatcccgatgctgtccagccgcgcaatctgctgctcggtcagatttccttggatttgtccctcgcgcacacggcgctgggtcaccagccacaccccaaggctcagaccatcgggcgtggtatacagtttcgggacgttcaggttgccgtgttccgcatagtagatgctcgcctcagagaagtagtgctcccagccggaagaaaggctcgcctgcagctgttcgaacagtacccggcaatcgtgtacctgttcgatgacctcaaaccgctcggtcacgatcttatcgctctcgccgttggcatacagacgatggactgcttcctgcacctcgctttgcagaccagatatgctggtcaggccttcaaagttgttgacaacatctaggataagtggtgtcgtattatcaccagcagtcagggcgcgaccaatctgctgcttgtaaatgatgggcgaaaccgtaggtcggaacaggatgaccccggaaatgccttccacatggacgccctcgttgagcatatcgatgcagaacagcagcttcagccggttggtcgtatccgtcttgaagtccgcaaacgccttgtcggtattcggatcatccgagtaggcttcgtacaccaccacgtccgggttgaccccggcgaaccactccgacacatgggacgccatctcgtccatgtgctccttgttggcgcagaacacgatgtacttgccagccttattcgtgatatgatgtgcaaagaccctatccagaccatccgcttgttccaaagcgcggcgcagggcgtccagatatttctgattcacatcctgaatgcccggtgcccgcaagttgtccacccgtgcctgatactttgcgagggctttctggtactgataaactgtggtcacatatttcggggcaggcaaaatacccctgacgactgcttcgccaagggtcatgtcactcgcaacacggctatcgaaaagctcttcggccatatcgcggttattatccagatatcggatgtttgttgccgtcagccccagaagctttgcatccgggcataactttaataaagccaccgtgctttcgccccaacattcagcaccggcacggtggaattcatcgagtataatataggcaggcttctgcgctgctattttgtccagctgcgcctgcgtgcagcacatcagtttggcataggtataaaagtgaacgtttgccagcggaaaatccgggtcgttccttttcaggctctccagctgggtcttaaagatatattcactgggagaaagccagattacgaccttctctgggttgtcctcgatcagcttgaacgcaatgtagctctttccggtgccggtgggatgaacaatggcagccttgccatactggtccatcatccggactgccgcatgatatgctttctcgttgtgctcaaacaggcgcaatgccaccttgttcaccccttcccgcataaaggggtatcctccacagtgataatggaggataccaatctttcgacatcgttgtttgaattcttctcttattttatcatggttatatctgggaatcaatagaaatccttacaaatgcatcccacctgaccttagaaaaaacctcgcagaagctgaaagttttttgcacattgcccagttctgcatgaaaaatccagcaaaaaacgaaggtggacagaataagtggtcagaagggtgtccaagacgcaggaggaaacagaaatggcacgacggggagaaaatatacgcaaacgcaaagatggtcggtgggaaggccgctatatcaaagcgcgcacaccggagaggaaaatccagtggggctacgtctatggcacagtctacgcagaggtcaaacgggtgctgattcagaaaaaagcggaggcagggttctacaacctgaaaagaactgacctgacctttgacgcattggctgaggtatggctgcgttcccagcggaatgccgtaaaagaatccacctatgcgcattactcgtacacgctgcacaaatatcttcttccagttttgagtaaagtgccagttgcatcccttgaggaaagctttctggaacgggctatgcagcagattattgcgccgatagatgccgcacacaagccgctggggagctcctctgcccgggaatgcctctcgatgctgcgccgtatctgcaaatatgccgcgcacttgcgcctgatccgtccgatggagctagaagtagcgctgccaaaagccatcgacaaaatttctgtacccctctccccggcggagcagcagcggctttatcagtatgtacaggagaaccctacgccccgcaaaatcggcttattactagggctggaattgggactgcgtattggcgagatctgcggcttacagtggggcgatttcgacctgaaactcggaacgctgaaaatcaaccggacggtctgccgaatttcctgtgaaaatgggcatacaaaggtggtcatccaaacgcctaaaacccgcacctcccgccgggaaattccaatcccaaagcagctgcttattatgctgaaaaagctgcgcggatgtgtcagcaatgctgcatggtttctgtccggcaacgagtccaagcccaccgagccccgctgctaccgaaaaagcatcaaagcatatctgaaacgggcaactgtccggcaggtacgtccgcacgcgctgcgccatacctttgcaacgacctgtctgcaggcggggtgcgatgtaaagaccctcagcgaattgttaggacacgctaacgccaacatcaccttgcagcgctatgtgcactctgacctgacccgaaagcgccgggagatgaaccggattttctcccatcaggtgtccatgagggacggggatgtactaaatataacgtaatagcgcacgatttctatgttgttcctccattatcactatggaggatactttttttgttaaatacattctttgcaattacgcggctgcacattctctgtatcataaaatacttttgcatcatacgcagatgcgtatgcgtagctgcacggatttctgtaacatcatagtgaggtgaacttcatcacgactgtaaaagatgccgttgccaaatgctttgaacatctctacgaccagcaggagatattccccaacaagttggcaacccacgccggcgcatattccaaaatcgatttattgcttaactcatagatatatttttattctacaaaatgcacctcttgcgaacacaaaaaacgcgtgttatactgaaaccatcaaaaaacattggaggtgtcccctatgccccgtcccaaaggaagcaagaacaagcccaagaccgtaaaagcaaccgttgactttgcatctcagattgctgaaaagcagtccgcaaaggaagccgctgccgctgaaatcgaatccatcaccgcgaatatcgatgcgctgaaagctgacctgaaagccaagaaggcagagctgaaatctatcgacaaggaaatcgccagaatcgaagccaaaaaggtcaaggcggaaaccaaagcagcggaatccgcaaagaaagccgaagcagaggatgtgctgaaaaagctgctggcaagcggcgtgagcgcagacgatatcctcgcaaagttgaagtgatttaaaaaattctaacgcagtagttgacggaagcatctacgtcgcaagcagtgcaacttggtaccaacttgcgatttttgaatcggatttttcaaaatccaaattcaaaatgcttgttgggctgtgcccaaaccccttgtgttctgcatccggtggatgcaggctgcgcatttttgcaaaatgcttttttgatctgagtgccgatgcctgtggtatcggcactttttgcacagatgaattcccggaagcagaaaatagtgctatgcagcacatccggaattgtgctatacttgatttacataaacctgtttgccctaaaaagttggaggtgttcatggctacacgaaccatttgttttcccatatccggctacccctattgcaaagaacagccggtgacattcacatggataaaaggtagcaagcggcagaatatccgtgccgtccatgatgccgtccatacaacagacccggatgtttccattctggaagtcagctctgcatccgttcagccggagggtgaggctgtttcttctctgcggcttctgctgcgtctggattctgttgcgcaggatgtgcccatcagcacggtttttgaagctgccaaggtatttgaacatggtgggccattcgctgaccttctgacctgtgcgccatccaaagtccataaggacactcggctgcgaaccaatggaaagttgctgcgctactctttggaaggaagtgagtatccgatagagccgcacccggattcattttttgagtggctctactgccgtgcgttgaagcagctcccggaaaaggctgcgcagctaagcagatataatgccttttctgatattgctgccgcagcggattctaaaaagtattatggcgattcctcgcgggcggctgcaatctatgtaggacttgcagcggcaggaaaacttccgtgcatcgatttctatgaatcattcattgcggaagtttacacggagccaaagcctttgcccaagtctggaaaatctgagactgcttcaaaaaagacacccgaggtttctgcaccagcaaaggagattccggcagacgaatcgtcgcagtccgataatgcaaatattccggacggtgcgcagatggaacagatccttgagctgcccaaagcgacctgtctgctcctttctttggcaaaaaatgctggtctttctgcaaataattccagtgagctggcgtataagggaaaggaattttttcttgacgcttatcagaaagcgctaaaaaacaaaacgctccaaaccaatgttcataagaacaagttcacatttccgatggaggagcatgacagcggatttcatgcggtcggagtactgacccgttcgcctgcttgggaatacggatggaagttcaactatctggccgagaatacatccggcgcagaaaagcccgaagtcaaagcaaaaatccagaagcctttgaccgcattggagcatctggaacgctgtgggtataaaatcgttcagcaggtcgtgccggaaaaactcccaccgattgctgttcagcggatggcatggaaaacaggcgaggctctttgcgacccggtggtggtggatttcttgcagtttatccgaacacatatgcagagcgacggctctttttcgttccgtatcccaaagggtgcgtccaaaaaatcgtttgccacactttcagagattgctcagacgtgggacaaaatggggctttttgcggccattgtgatttatccgcagaatatcgtctatgaacttgcacaaaatgaaaccgtccggcattttttgagcggaaagtggctggagctttttgtagaacatcaggttcagcagatcctgaaccgctatcaggaggagcagggcgcagacgtttcggtttgctccaatgtggttctttcagaaacagcatccgtagggagcacgcatgaactggatgtcgtgttctccatcaatggaaaatttttctgggtagaagccaaatcatccagtcgaagcattgattatggaaaatatgcttctctgtgcgaaaagctgaacgtgacaccagaaagcttgcttttggtcaacagcgatttgtccgtggaagagtgcgaaggtgtttcttatttctggaattaccgtgttgcaaattgtgcaacgatcacgcaggaactggaaagcatgattgctaaacaaattgaaagcaccggaaatgctgttccgagtacagactgagcaataagcaaaaatgatatgtacccccaatactggacacccagtattgggggtacatatcaaaaccgaaaagcagaagct

SEQ ID NO: 260 - DNA, 9667 bp, unidentified
  source 1..9667: mol_type = unassigned DNA
atgtgtggaattattggatttacaggtaaattaaaagcccaggatgtcttattgacaggacttgcaagccttgagtaccgtggatatgacagtgcgggaattgcgtactttaaagataccggaaaaatttcacttcggaaaactgtcggaaaagtaaaagatcttcgtgccatctgcgatgatgataacaattctacgtgtggaatcggccacacccgctgggcaacccatggtggcgttaccaatgccaatgcacaccctcataaggtcggacaggttgcattgatccacaatggtatcatcgagaactatcatgatctcgccaccaaatacgatctgacggatgaactgatttccgagacggataccgaagttgccgccgcattgatcaataaactctacgaaggagatccaaaagaagctctgcgcaaagcagtagccgaaattgaaggttcctttgccttctgcgttctgttcaaggatcatccaggtgaaatttatgcggtaagaaatgtcagccctatggttgcaacatactgtaatgacggtgcttttattgcatccgatctgactgcttttatcgcatacaacaagcgttatttcatcgtgccggaatatcatattttaactatgactgcggacggcattacgttagaagatttagacggtcattccgtagaaccggaatatatggaagtaaactgggatgttaccgcagcccagaaagatggttatccgcatttcatgatcaaagaaattcatgaacagccggctgccatcacaagaaccattaccccacgtatcaaagatatgctcccggatttttcggaagatgccattgcggattccttctttgaaaatgtaagcgacattacaatcgttgcctgtggtactgcaatgtacgcgggaatggtaggaaaaaccatgatccagaaccgcctgcatattccggttaccgtggcaatcgcatcggagttccgctatgaagaaccggtaatcaatgaaaaatccatggtgatcgttgtatcccagtccggagaaaccattgatactttggaagctcttcgccttgcaaataaatatacaaagaaaacactgtctattgtaaatgtaaaaggctccagcattgcacgtgaaagcagctatgtattatatacacatgccggtccggaaatcgctgttgcaagtacaaaagcatacaccgttcaggttgcttctttttacctgcttgcatgcaaacttgccatgaaacagcaaaagatttctgtcgaagaagcacgtacatttattggaacactgcaggaaattccaaattacatcgaggaagttcttgcacaggctcctgatattgaacagctgaccaaacgcatgatcaatgccaacaacgcgttctttatcggccgtggactcgattataccctttgcatggaaggtgctttgaaattaaaggaaatttcttatattcatgccgaagcctatgctgccggtgaattaaaacacggaaccattgctctggtcagtgaaggggttcctgtcattgccgctgctacccagaaacatgtatacagcaaagttatttccaatatccgggaagtaaaagcccgtggtgcttatgtcattcttttgtccaaagacaaagaaatcacagatccttctatctgtgatgtacacatcaatcttccggatgtatccgacgaatttacgatttttgaatctgttgtaattttccagctgattgcatattacacatccgttggaaaaggcttaaatccggatcagccacgtaacctggcaaaatctgtaacggtagaataaaaaaactgtcgcgcgaaaattcgtgcgacagtttttttgacatagagcctttctaaaacttttgaaggcaaaaaaagaaccccagaagctctctaaaagcctctgaggttgcccctgccaaggattctctcacccatgtaccggaatccttgtatcgtcggcgcgacaggatttgaacctgcgacctctgcgtcccgaacgcagcgctctaccaagctgagccacgcgccgtttcaactgcccaattatagtaacacattctccggtgtttgtctagtgaatttttttaatttatggtacaatacaaaaaaagaatggagaagaacaatgaaacatactgctttgattacaggtgcatcccgtggaatcggtgcagccctggcatgtcgatttgccgccgaaggctatcatctggctctttgctgccataactcttatgaaacgctgcaggcacttgccacaaaacttgaaacaacctactccatacaggtgctttgcttccgtggtgatgtaggagactatacttttatctgtgacatggtgcaaaaaacactggataccttcggccagattgatgtgttaatcaacaatgccggcatctcttatatcggtctgctcaccgacatggatattaccgactggaaccggattattgcgacaaacctcacatccgtcttttccacctgcagacaggtcatcccctccatggttcatgccaaatccggacatatcatcaatatttcttctgtatggggaaatgtcggagcttcctgcgaagttgcctattctgcatgcaaaggcgggatcaattcccttacacgcgctttgggcaaagaacttgcccctagcaatatccaggtaaatgccatcgcctgtggggtaatcgatacggatatgaaccgttgtttctccgaggaagaacgctctgcactcatcgaagaaattcctgccggccgtatgggatccccggaagaagttgcttcactggcatattctcttgccacagcaagcagttacctgaatggacagattctcaccttagacggtggatggatttaatttcttatctctttggaaatctttttccatttatttaagaattaaaacgcaatacgcgttttctctgttttttatatcaactttctataaaatcatttgtatgaaaacgaatgataaaaataaatacaaagattttggtgaccgtctgagtctgattatgtataaacaaaatatttccaatatccagctggcaaatgcaatgtttgtttcgccgtccacgatcagcggataccgtaccggtcgtcgttctccgaccgttgcggatcttgcagccatcgtgcagattctgaatgtttctgcagattacctcatcggaaccagtgaaattacaaccagacccgataccaccgaaaaaaagagttgagcacgccctgtttccagagcggtgctcaactcttttttataaatcatgttctgccagtaaaattaccgtagaacgttccggaacacgcacacgtgtctgatctccctgtgtctgggcttcaaaatctgccccatcctggtattcacagaaagtatttactacaagtttccaatgataagactccggcaacgaaggcaggcgcatctccaaaggctcccaatacgcattcattccgtaaaagatcatatcatcatccgtatcatcggcatttcttcccgcatacatgattccaattaaatgtgtattatagtccgtataattccggttcggctctccgttatggatacttacggaaggtaacccgcagactgccggctttgtatcccttcgcagaatcggatgctttgcacggaaatggatcataaaacgggcaaaatcatgaatctcctgaaattcttccagtctgttccagtccagccaggaaataatattatcctggcagtatgcgttgttatttccatactgcgtattacaaaattcatcccctgcaaaaaacatagccggtccacggctgcataacaacgcggcaaatgcattcttcacgagtctgcgtcgcaggctcataaccgccggatcatccgtctcaccttccaccccgcagttccagctcaggccgttgttatccccgtccgtattgttccatccgtttttctcattatgcttttcattatatgaatacagatcatacaacgtgaacccatcatgacaggtcagaaaattgacggatgcactatatccgcggcttgccggatcatacatgtcggaggatccggtgatacgtgtaattgcacgccctgcgacgccactgtcgccctttaaaaagcttctcatatcatcacggtatcttccgttccattcggcccagcggttccatgacggaaaacttccaacctgatacaagccacccgcatcccaggcttctgcgatcagcttcatatcccccagaatagagtcaaatgcaagggcttccagaatcggcggattctccatcggtgcaccattctgatctcttcccagaatcgatgccagatcaaaccggaatccatccacacggtactctactgcccagtgccgcagacaatccgtaataaacctccgaaccaccggatggttgcagtttaagacattgccacagccgctgaaattataataatatccatccggtgtaagcatataataaatattgttatcaatccccttaaagcaaaaacatggaccgtcttcatttccctctgccgtatggttgaataccacatcaagaatgacttcaattccattttctttcagttcgcggatcagacgctttaattcatcaccctcatgattatgctcctgatgaaatgcataacttgtattcggggcaaaaaaggaaaccgtattatagccccagtaattgtacaactgcacgccatccaccacacgggcactttccatttcatcaaattcaaaaatcggcatgagttctaccgcattgattcccagatctttcaaatacggaattttctgtcgcagaccttcaaatgttcccccaccttttacaccggaggacgcatctttggtaaatcccctgacatgcatctcatagatcaccagatcttcaaatttgtaattcagattccgataccgcccccagtcaaaatcactttgcaccacacgggctttatagacaaaatcctttccgccttccggtttttctccccagtttctctgaccggtaacagctttcgcatatggatcaagaagcgtatgttttctgttaaacagtaaccctctcgcctgatcggcaggaccgtccatctgataggcatactcaaaatcctctgcttttaagccaaaaacaaggatagaatacgtatttccaattttataactttccggaatgcggattcttgcatacggttcctgtgccgccggccggaataacagcaggacacagctcgtagctccatgggagcttacggtaaaacttaccccttcctctgtctgatatgcaccattcatctgataaaatcccggacgtacatcaaatccaccgatattatcgagtggatgaatgacttccccgagactttccatttcttcgtctatcggccagcttttctgttttgacggataattccaaaaacttgcattcatgtgctgattcctcttatcattattatttacttgccacataaaattatattatccccctactcttccctgatgattaccctgccatttgcgtcaaatccgattttactgtacttttccgaatactcattcatatgatcaataatcgtctgttttctgtcgccttttgctatggcaggctgaaaattatttctttctgatgtggaagaaatgctgcatggtatcatatcggctgatatatctgtctgcagtaccccatccacaaaggtaaaggtctgttcatagatcgccgtatctttgtcttttggattcctgttccccccaaagcagaaatttccaagactgtagcagatcatttttccgttgtataattccattccctgcaatacatgaggatgtgtaccgaccagcagatctgctccccagtcaatcacctggtgtgccagcttctgctgataatcattcggataatgatccccctctatcccccagtggcaacaggcaattaccagatccgctccttcttcccgaagttctgcaatcccatcccggatataattggcatgtgtttcatcagcggacagctggcttgcggagacaattccgattttgataccatccttcgtggtataggtatccacatgatcattgaatccgaagataatccctgctttatttaacacttctctggtatcatcaagtccctgctgcccataatcaaacgtatgattatttcccagacttgccccctccacagaactgtctgtcataataccaacatactccggttttccttttaagttccacgttttttccacacgctcggtcgcatttgacaacacacattccagattgatcagtgtaaaatcatcctgctcaaaaatacttctgatatttttaaaaaaataatcctgcccgtatttatcatagtattcatgaaaggaacctgcatacccatgcgtctgtgttgccccaagcgtacagtcacctgtcgccgtaatttttaccgtctgtatcaccggttcctgctgcgtttcagttgcagtcccggtttccgtttcttccagcgtacccggttcttccgtcatctgtgtctccgtgattttttccgtagaagagggcaaagccgatgacgttgctgcaggagaagaacatcccgtcagcaaaaatcctgccattaggattggcaatatccattttttcatacgttttcagactcctctttcacaagaatatccaccgtgtgaccgcttgcacccataagatccatccgttcacaggttgccagatgatactgcagaaacgcatcaaactcttcttccgtcagcgcatttaaaaacggacgcatataatttgctgcaccgtctgccgctatgatctgccggcgcctgacctctacctgccggtccaatgcttcaatatcttccagacgaaccatggaatacagaggattggcttttgaagtacagtgataatcctctgtgagcattccctcctgaagcgcctccagaatatgtttttccttaaacgcatacgtgataacggaaaattcattcataatatacgccacgagaatcctgcctccgggtctggtcaccctcaccgcctcccgcagcgcagcaagcttgtccttttcctcatgcaggtgatacatcggcccaaacaacagggttacgtcaaaggaatcatcggaaaattttttcagattcattgcatttccctgatatgcatgcactcctgcacccttctgtttcaggcgtcccagattatgctttaccagttccacggccgtcacatcgaacccttcctgtgccagcggtacgctgtatcgtccggttcccgccccgatatcaaggatatggattttctcttttgcacgttctttcacaatttcatccagacactgatggatataatgcatgcttgtcacaaattccaccctgccgtgtcggctgtccagacgcttctcttcattaaatttattataataggcttctaagtctgtcatattttaatactaacacattttctttaaaatttcactcacaatcgctgatgcgacatccgctttgctcattatttccagttccctgcagtcatctgccgtaatcagcgtcaccacattggtatctgtaccaaatccggctccggctaccttcaggttattcgccacaatcatatctgcattcttttttgcaagttttgcacgggaattctccagcatatgttccgtctccatggaaaatccacacagaaactgtcccggttttttgtgcgcgcccagatacgaaaggatatcttccgtgcgttccatcgtaagagtggcatccccgtcttttttcttgactttttcatcgaccgggtgatccggacgataatccgccacagctgccgctttgataataatatcctgttgctctgctgtctcctttacggctgctgccatatccgcggcagatacaaccggaacgacctttacaaacggcggcggagtgattgccaccggtcccgtgatcagcgtcacttccgcgccacggcgcatacagttttccgcaattgcatagcccatttttccggtagagtgattcgtaatataacgcaccggatcaatcttctcctgtgtcggtcctgctgtgaccatcactttctttccgaccatgtccttttcgcaggcaagatctttcataatataagaaaacagtgtttccggttccggcattttcccggctccggtatccccgcaggcaagataaccactcgccggatcaatgatatgaaacccataatgctccagctttttgatgttatcctgtacgatcggattttcaaacatattggtattcatggcaggggaaacatacttcgggcattttgccgcaagaatcgttgttgtcagcatatcatctgcgattccgtttgccatcttgccgatcacattagcagaagccggtgctaccataaaaatatctgcacgctttgccagtgccacatgctcgacattgaactggaaattccggtcaaacgtatcgaccagacacttgttgcttgtgagcgtctcaaacgtgataggattaataaaattggttgcattttccgtcatgatcacatgcacatccgcatgctgcttgacgagcgcacttgccagataggcgattttataggcagcgatacttccggtcacaccgagtaccacacattttccttttaacattgtctcttactcctttgcagaaaaaatcacatcttctgctattttatcacactttttccctaaaacaatttaatttttgtcatctgttccagtatggaatctttgacagaatcgttcagatatgctggatttaattttctttttgcatatgcaaggtaagaaccatttgtctcttcaatcaaaactgccgtaaaaaaccgctcccagctaaaatatgttttgctttccacatattcccacggcttttccagcacctgatctgcccatttgctttttactacttttgcctttaatatcagccattcaaatgactccggcaaataaagcaccacttgatcttttccacccatcaactgcatcactctgtcaatttcagaaccaaatgccgcaccgtctgcaattacaagtatgcgttcatttttatgcatatttaaataatggaaaacatttgactttccattcattgtctcacatttcaattgctgttgcctacatacagaattaaaaaactgataaccggaattactgtcttccgttattacaacctctggtttaatatccttctttaaagtctgtgctccatatattctgtaaaactcatgataacacggttttaatgttccgtattttcctgaagtacgaattccatagatttcctccacactatacggcaaagaaggcaaggattccctggaaacaatgacataataattatctgttttctgaatagtatctgcgaattctactgtcttgataaattcgtttccttcatcaataaatacaatactatcctgcattgctgataactgttctttccacagtgaaccttcgagcacataacattttttgtcacacgtcagttccacgggcgtaccggatggattatttacgtattcccgaatcatatctaccaatgtggttttgcctgtcgcactgtctccccggatgaccgtcagatttcttcgaatttcaaaatcatattttaagcgctttgttgatacaataattctatgttttcccttcat

SEQ ID NO: 261 - DNA, 25845 bp, unidentified
  source 1..25845: mol_type = unassigned DNA
atgggtgttatagattttcattcacacatactgccgggtatagacgacggcagcaggaatgtcgagacatctataggcatgcttcggatgtgcaaagagcacggcgtggatactatgatagcgacgccgcacttttatgctgattcgaatactgtggagaggttcattgattcaagacagaaagcatatgataaagtcatggctgagaatatggacataccgcagattataatgggggcagaggtcgcgttctttgcaggaataagcagagcggagaaaacggatgcactaaaagtagaaggaactgatatcatgttgctggagatgccgtttgtgacatggagtgattcggtagtgcaggaagtacgagacttaattgagaagagacatttccatatcatactagctcatatagagcgattcttacagataccaggcaacaagccatatgtgagacagatccttgaactgccagttacggtgcaggtgaatgcggagacacttctggatttcagacagaagggcaaaatgctcaagatgttcaagaaaggacaggcacacatcataggaagcgactgccatggtatgcatcacagggtgccgaacttgtggctgggccgcgaggtgctggagaagaagctgggacatgaattcctggagaacatggacaactacggaacaaagctcctgaaagaacatcagatacacccataatcagcaataacaacgaaacatgtaaaagataaacagatagatagatggaggacaacaacatgtctaagaagacagcgataatcataagtattgtgctgttcataatactgtgtggtcttattgtgtgcgagaagaagtggcctacagcgggaacagacctgcttatgctgaacgttctgagatagcacattacattccaacgaggtgatacatatgtcatacaggaacagaacactatcagaaaaaaagagaatatacaagaagcttggacttgtgatcgcagccatactggtcgtatgcattgcactggcgatagcactcagaccgacaaaaggaaatgcatcacacaatgcatcgggcacacaggcggtcgaaggcatgatcgaggtggacggagtcaaatatgttcccaagaagaatatagaaacatatctttttatgggaatcgacaacatgggcaaggttcagaaagtcaccgattatgagggggcaggccgatgcgatgtggtcatgctgatggtcagagacctgacagatggaacatacaagacgctgagcatagacagaaataccatagtggagcaggatacactggatcccgacggaacctacgttgcaacgagcccggcacagcttgctctgtcacatgagaatggtgacggaatggagataagctgcgagaacgtggtcaaggcggtgtcaaacttccttggcggccagaagatagacggatacgcagcggtgaatatgggggccataggaaccatcaacaatctggctggcggagtcacggttaccatagaggatgatttctccaaggtggataagacaatgaagcagggagagaccatcacactgaccgatgagcaggcggtacattttatccatgacagattcgatgtgggagatgaatccaacacccagcgaatgaagcgtcaggaggtgtacaaggcaggactcaaggataacctggcggcaaagtgcagcgaggataacacatatccactgaccatatatgacgccctgggagattacatggtgactgacataagctcacagaaattctccaagctggcactccttgttctcaaggaaaaggacgccggaacggtgtcgatagctggaacagagaccgtagatgatctcggatttgtcgaggtggagccggatgcggatagtcttcagcaggcgatcgtagagctgttctacaaggaatataactagcatcacacatttgatgcaggggatatagatacaaaaaacggatggagggaatatatgaattccaacaagaaaatggctgctgtgcaggatgagaccacacagatagccgcagtgaacacatacaagaatacagaggatgatgaaaacgagatcgatctcctggacatgggaatggcgcttcttgagaagctcccatacatcatactgtgcttcctgatcggtgcggtgctgttcaacgcatttgcatacttcctgatcaagccgacataccagtcgacagccaagctgtacgtggtatcagcatcagatgattccatagtaaatctccaggaccttaacatcggttcatcccttaccaaggattacgaagacttgatactcagctatccggttctcgaccaggtcatcgaaaagctcggccttgatatggactcagaggggcttgccaagatgataacccttgagaatccttcagacacacgagtcctgaagatcacggtcacaagcactgataagcagcaggcatgtgacattgcaaatacactggcaaacgtgtcgatagagtatctcccggataccatgagcacaagcgcacctaacatagcccaggttgcaagggtagcagaccagaaggtcggaccaagctaccttaagtacaccgccataggtgcattgcttggagcactcatctactgcctgatcgtcattgtgggatacctgatggatgacacgatccactcagcagacgacatggagaagtatttcggaatagtaccgctcacgacaatacctgagagcgaccagttcagaacagacgattcagatgaagagcctggaaagaaacataacaggaaagagagggtcagagcatgaagaagcttaacatagagtttcaggaactcccatatgcagtggaggaggcgatgaaccgtctcaggatcaacataaagttctgtggcaagaacacaagaaagatactcataaccagcagcatgccaaatgagggcaagagcagcgtggcgatcaacctgtggaagatgctcgccgaggcaggattccctgctgtgctggtggatgtggatcttcgtaagtcagtcataaaggacagacatcacataaaggatgctgacaagcttccggatcttggatatttcctgtcgggacagtccgagatggaggatgtcatctatgaaacacaggtagaaaatgcatacatcgtaccttgtatgaaccttctggagaacccatcggctcttctggaggatgctagatttgcagagcttcttgacaagctggcagagacatataggtatgtcattatagactcgccaccgcttggcagtgtggcggatgccgctcagatcgcatcactgtgcgatggcgcagctctggtagtcagagcaggtgagacatcaagaagtctcatcaaacagtcattccagcagcttgaccaggtaggttgtacgctgcttggagtcatactcaatagagttgagacaacgggtagagcatacaagaaatactacggcaagtatggcaaatactatagccagtacggctatggttatggcacttacggcaaagaggctgcagcctccagcgacagtaccccgtcaaaataattcactttggatataacgccatgtatagtggcgtgcagggcgttttatcatatattcaatacaatagaactttttgggaaggaggaatttattgtgaagaatttaaagaagcttttggctatagttgtatgtatcgcaatgatggtgccaacagttgcatttgcagctacatcatcaccagctaaggtagacgttaagtctgctacagcaaagtctcttacatacaatgcaaagagccagacaacaacaattgttgttaacggtaagacacttaccctgaacaaggatttcaaagtcgtttcaggaagccttaaggcaacaaaggctggtacatacacagttaagatcaagggaataggtaactattcaggcgatacaacagttaagtacacagttaacgcacagcagagctacaaggctactgctgctgcaaagacatacaatgctaagaatcagacaaccaaggttacagttaagtatggtaacacagttctcaagagaggtactgattacaagattactggtgtaactaaggctaagaacgctggcaagtataagattaccgtaaagggtatcaacaactacaagggtacaaagacaatttactacacaattaacaaggctgctcagaagtctgttaaggttaaggtaaatgcttctaagaagaagatcactgtatctggtgttaaggcaaaggcaaaggttacttacaagtcagccaataagaaggtcaaggttaagaatggcaagattactgttggtaagggtgtcaagaagggcacaaaggtaagaatcactgttaaggttgctgcaacaaagaactacaaggcatacagcaagtcaattatttacaaggttaaataatcatcctgctatgttaaatagttccaagccctagccggtggcgcaaaacgaatgtccatgccacaggacgttctgcgccgccagtgtgggtgataaataacaggcaatttaatgcgtatcatggtttacagatgaaaaggttcagccgacaatcgcacgggctgagtcatttcatgtatgaatcaacagaccgggtcatgcgggcacaaatatgaccctgacgacagagaatgaggagagaaaattatgtatcagaaaggcgcaaaagggtggctgaagcactttgacttcatgctgctggatcttatagtacttcaattatcatttcttgcggcattccagatcagacacggcatggtaaatccgtatgcaaacagagactatctcgcgctggctatcatcacggagctggcggatatagtagccatgatatttctgaatacatatgagggcgtcatcagaagaggatacttcaaggaattcatatccagcttcaagaacggtttcgtgatagttgcactgctccttctgtatgtgtttgtcctcaaggatacatctatatattccagaactactatactgctcatgtgggccatatacgtatatgctacatttgcagtgaggagcctgtggaagaagcatctcgcgaaatatgcagagcatggcaagggcaagaagctcctggtcatgaccaccagacatgtagcagatgaagtggtggcaggcctcaaggagaagaactactccgggtttgatatagtaggagtcatggtgatagatgccaatctcatcggtcaggagatccagggagtgccggtggtggcggattacaacagtgcagttgattatgtgagaaccgcatgggtggacgagatatacgtggatgtgcgtggagcatacggatatgcgaacaccctgatagacgcatttatcgagggcggcatcacagttcacatgtgcatatcatccatcgtgaggacccacggcgacaagcagctcatccagaagataaatggtgagaccgtggtcacgaccatgatgaactacgcaacaccaaagcagatgttgctcaagagaacggcagatataataggaggtctggtgggcagcatattcacgctcatcctcaccatatttataggacctatcatatacatcaagtccccaggaccgatcttcttcaagcaggagagagtgggacttaatggcaagatattcaagatgtacaagttccgaagcatgtacatggacgctgaggagcgcaagaaggaactcatggcgcagaacaccatgagcgattctaagatgttcaagatggacttcgacccgagagtcataggcaacaagatcctgccggacggcaccaagaagaagggaatcggccagtatatcagagacttctccatagatgagttcccacagttcttcaatgtgcttaaaggggatctctcactggttggaacaagaccacctctcatctctgaggtggagcagtatgagatgcaccacaagagcagacttgcaacaaagcctggaatcaccggaatgtggcaggtgagcggccgaagcgacatcacggacttcgaggaggtcgtgagactggatacggagtatatagaaaactggagctttggactggatgtgaagatagtgctgaagactatcaaggtggtgcttggtagggaagggtcgaagtaagaggcacatactggaatgacaccgacgataggtcacaggcgcgtcagcgagtgtggctacgtcgttacggctcgttgtgccatgaagattagaggaaaaagaatgcactatctgcaaacagcggatgcgtagatagataatttgggaaaataattatagcggaggaatacgtatgagcatagttactttagataaaaaaacgattttagtcacaggtgcagctggttttatcggctccaaccttgtgaaaaggatctatcaggaggatccttctgctacagtcataggcattgacaacatgaatgcctactatgatgtggcattgaaagagttccggctgaacgagctggccaagtatcccacatttacttttgttaaaggcaacatcgctgataagacactgatcactgagatgtttgagatgtacaagccatcagtggtcgttaaccttgcagcacaggcaggtgtgcgttactccatcaccaacccggatgcttatgtggaatctaacttggtcggctttttcaatatccttgaagcctgtcgacattgtgagaatctagagcatttggtatatgcttcttcttcctcagtatatggttccaacaagaaggttccgtacagtacggatgataaggttgacaatccagtttccctatatgcagccaccaagaaatctaatgaactgatggcacatgcctactcgaaactctacaacattccttccactggtttgcgcttcttcactgtgtatggtcctgttggtcgtcctgatatggcttactttggttttacaaacaagctagtgaatggtgagaccatcaagattttcaactacggtaactgcaagcgcgactttacttatgtggatgatattgttgagggcgttgttcgtgtgatgaggaaggctccggacaaaaagaacggcgaggatggtctgccgattccaccgtatgcggtttataacattggtaaccaaaacccggaaaatttgctggatttcgtgcagattctgagtgaggaactggttcgtgcaaaggtgctaccagaggattacaacttcgaggcccacaaggagctagttccaatgcaacctggtgatgtacctgtgacctatgcagataccagtgcactggagcgtgacttcggatacaagccaagtacaagtctgcggactggtctgagaaaattcgctgagtggtacgctgagttttataagtaaaagaattagagggacagagaaatgagagattttaagaatttaaaaattgctgttgctggaacgggatatgttggcctttccattgctacgttgttatcgcagcaccacaaggtgactgctgtggacattgttccagagaaagtggaactgattaataacaagaagtctccgattcaggacgaatacattgaaaaatacctgacagaaaaaggactggatttgaccgcgactctggacgcgagggaagcatactctgatgctgattttgtagtaatcgctgctcctacaaattacgatagcaagaagaactttttcgatacaagtgcagttgaagctgttataaagctggttatcgagtacaacccagaagctattatggtgattaagtccacgatcccagttggctatacagcctctattcgtaaaaagttccactgcgacaatatcatctttagtccggaatttttgagagagagcaaggcactgtacgataacctttatccttctcgtatcattgtcggtacagatgtggataatgtccgtctggtgaatgcagcacatacttttgcagagctcctgcaggaaggcgctatcaaggagaatatcgacactctgtttatgggattcactgaggcagaggcggttaaactgtttgctaacacctatttggctctgcgtgttagctacttcaacgagctggatacctatgctgagatgaaaggtttgaacacacagcagatcatcaatggtgtctgtctcgatcctcgtatcggtactcattataacaatccgtcctttggctacggtggctattgtttgccgaaggatacgaagcaactgttggcgaactatgctgatgtgccggaaaatttgattgaagcaatcgttgaaagtaatagaacaagaaaagacttcattgctgaccgtgtgcttgaaatcgctggtgcttatgaagcaaatgacagttgggatgagagcaaggagaaagaagttgttgttggtgtttatcgcctgactatgaagagcaatagcgataactttcgtcaaagttccattcagggtgtcatgaagcgcatcaaagctaaaggagcaacggtcatcatttacgagccgactctgaaaaatggcgagaagttctttggtagcgttgttgtaaatgatttagaggagtttaagaagcagagtcaggccatcattgcaaaccgctatgacaagtgcctggatgatgtaaaagataaggtgtacacgagggacattttccagcgtgactaagtagaaccaaggaagattagaggagaaagtcagatgaaaaacaaagaaaatataaaggtgtgcttggtgggttcatctggcggtcatttaacccacctttatatgttaaagccattttggaaaaacaaggatcatttttgggtaacttttgataaggaggatgcaagaagcctgctcgaaggtgaaaaaatgtatccctgctattatccgaccaatagaagcctgaaagcccttataaaaaacaccaaaattgcatggaatgtgttgcacaaagagaagccggatttgattatttcctgtggtgcagcagttgcggttccattcttctacatcggaaagatgatgggagcaaaattagtttacattgaggtttttgatcgaatcgataaaccgacaatgacaggaaagatggtttatcccattgtggacaagtttgttgtgcagtgggaagaacagaaaaaggtttatcagaaggcagttaatcttggcagcatattctaagttgaggatgggaaaatgatctttgtgacggtaggaacacatgagcaaccgtttaatcggctgattcagaaagtagatgaattaaagaaagatggcacaattcaggatgatgtgattatccaaacgggctttagcacatatgagccgaagtattgccagtggagcaagttgattccatatcagcagatggtaaaaaatgtggccgatgcccgtattgtaatcactcacggtggtccggcaagttttattatgccactacagataggtaagactcctattgttgtgccgcgccagcatcagttcaatgaacatgtgaatgaccatcaagttgagttcgcaaggaatgtggcgcagagaatggaaacgattattccggtggaggacattaatacactgggagatatcataacgaactatgatcagattgttgccggcatggggcatggtatgagtagtaataatgccaagtttaatgaagaacttgagaaactggtaaacgaattgtattgaggatgaatggatgagaaaagttggaatcatgtcgatgcagcgtattgcaaactacggatcgtttttgcaggcatatgcattaaagcagctgattgaagaattgggctgtaaagtagagtttgtagactaccatgtaggcgcacccgtaattatggaaaatgctgacagcaaaaacaaatttgtccgtaaggtcgaaaaagggctggaaacttttcaatatcaggctccatttgcgcataagttgtcgttcattcgttataagcagactttttcaaaaaagtatatgccacttttaggaattacggatgaaatgaactataacccgacattggattgccttgtgattggtagcgatgaggttttcaactgcattcagaaaaattccaatgtgggttattcgctggaattgtttggaaaagataatcatgcgaagagacttctcacttatgcagcgtctttcggcaatactacattggaaaagctgaaaaagtataaaaagactgaagaagtcggagcattgttgaagaaattcgatgcgatttctgtacgagatgctaattcaggaactattgtagagcagcttactgggaaagaaccagtgtacaatcttgatccggttctgacctatgattatatgaactgctgcgacaaaatcccacgagttcagactcatgagaagtatttgattctgtacgcgtatgcaggtcgtatttctaatgaagaggcagaatggatttctgactatgcaaagaaaaagaaactaaaggtttatgcaatcggcggtattcagaaatgtgcagaccgctttgtggattgctctccgtttgaagttctggcctatttcagaaatgcagaagaagtcattaccgatactttccacggcagtatcttctcagttatcacgcatcggccatttacgacattgattcgcaagagcgtgggtaatagctatggtaatgaagaaaaattgagtgatttgctggagcggttggaattggcgaatcggatgacaacgaaaattgaagatgcagaaaacatcaatgaaaaggcgattgattacgcgaaagttgatgagcggttgaaagcacatagagaagtggcgaaggagtatctgagaaaaaaaatagagggataaaatggagaacatatcgaggataaaagagaaatgtgtgggatgtaaaagctgtgagcaaagctgcccaaaacactgtatctctatggtagaaaacaaagagggattttggtatccgtctgttgatgaaaaaagctgcatcgagtgcaaggtgtgcttgaaaaagtgtccagtagaaaatacggaatttcatcggaatgagccacataaagtttgggcgtggcgcaataaaaatgatgtggatattatgcgctctgcatctggcggtgcggcggatagtgcagcgaaaactgtactgcaaatgggcggtgcggtttatggtgctgcctatgatgagcagctggcagtaagccacattgaagtgacagatgaagcagaaagagagaaactacagtcctctaagtatgttcagtctgacccgaaagatagctacgcaaaggtcaaacagcgtttgtctgagggaaaaacggtactttttacaggaactccctgccagattgcaggtctgtatgtttttttgggtggcaatccagaaaatctatatacagttgacctgatttgccacggtgtgccctcgccgaagttcttcaaaaagtatctggaataccagaacaagaagacggctggcagagtaatctatttcaacttccgttccaaagacaagagaggttggggaacacaatacctgctaaagacaaagacaaagacaaagacaaagacaaagacactctcccttgatcgctatggaaaacattttatgtatggcgactgctatagggagagctgttatcagtgtgcttatgcgaatacgagccgtgtgggagatttgacagtgggtgatttctggggaattgcaaagagccatccgaacttcaattctccaaagggcgtgtctagtgtatttgtaaataccgaaaaaggccaaaagctctttgaaatgatgcgggttcttgcagaagtggaagaagcaacattggaagagggcgtggtgaaacagggaaatcttgtaaaaccgagtataaggccgaacgatagaaatatattttacgagaaaattgatgaggatgattttatggataacttaaaggttggtatacaaccaaaggaacggcttaaagcagtaatcccggctggggcggttagactcctcaaaaaaatgggggcaggtaacagaagataattataaagtatctgttatagtgcccttatataatgtagagcctttcctggagaagtgtgtggattctattctggcgcaaacgtggaattttatagagattattttggttgatgatggctcaactgataattctggctttatatgtgaccggatgcaacaaaaggatgatcgagtaaaggtacttcataagagcaatggcggtgtgagtgctgctcggaattcaggaatagaaatggcaagcggtggctttatttgctttgtcgatggcgatgactatgtgatgcccgattatattgaatatatgatggagcagataatcaaaaataatgctgatatcacactgacaacacagatgttcgggaattttgatgaaaaacaagttaagaaggatgaaattaaaacttggaatggagaggatgcagtagaaacaattctatgctaccaagttccaataggatgctactgtaaattgttcagagtaaagtttttaaaggatatccgttttatccctgaaatgtttataggtgagggatttaatttcaacgtgatggcttttcagaaagcagaaaaggttattgcagggaaaagaaaaaactattattatcgccgcgataatccaacaagtgccatgacaaagttctcgattaaaaagtgtgaatgtggtttatgggcacttgaggtaataaaacagaatttgacgattcattcggatcgaatccatgaggcgtgtaaatatgcaaactggagaacacactcggatttttacgatatgtgtattcttgccggggtagaaatagaatattcagaaatgtataaaaaatgcttgaaagtaacacaaaaagatgctttgagtgcattacatgtaccgatatctaaacaaaacaaattaagagcagtcattatgtggatatgtctagcagctattccgattgctatgaggtttagaaaaataaaataccatgttaatgtaagcaatcgctagactttcaatggatttgtgactgtgaggataatgtaaatgaataataaaaagattaaagtggcaatggtcacaaatcattttggaattaccggaattggaacggtaataatgaattactgtaaagcgttggacaaggaaaagtatgatttaactattcttgctggacaaccaatatcagaaaaatatgaaaaggaatgcctggagaacgatatccatttagtgacacttccatcacggcatggaaacccaaaggaccattatattgcgctgtggaaagcattaagagccggacactatgatattgtacatgatcacggtagcagttcgatgatggcaatagaactgacgattgcaaaactggcaggtgtaaaaagtcgaattgcccatagccataatagtaattgtcccaacatgaaggtgcataaattgctaaatccgtattttagaacagtttatacaaaagcactggcttgtggacaattagcgggaaactggttgtttggagaaaataattttgaagttttgccgaacggttttcatacagacgattttacattttctaaaaaggaacgagatgcagtaagaaataaattgggggtagaaaatcaattacttattggacatatcggacgcatcaacgaacaaaagaaccaagaatacttattggacatatttgaagaagtagctgcggaacgagacgatgcgcttcttcttattgtgggaacgggaccggatgaagaaaaaataaaaacttgtgtcaaggagcatccatataagaatcgcattattctatatggtgaaacagataatccaacggctctctattcggcaatggacatatttgtttttccatctaagtatgagggacttccggtagtattgctggaagcgcaaatttctggcttgccatgcgttgtatcggataagatcacaagagaagttgacttaggtgatcttatctgggaatctatcgacgatgctccaaaacagtgggcaaaggccgtgctttcagttgaatgccgatcagaaaaagaacgaatctcatatagagaaaatcatttaaaaacgatacggagttatgatattacacagtcggtaaagcaactggataagatatatgttgctctgataaatggtaagggaaaggaagatatgcaatgcctacatatgaaggactgagacttaaaatattaaaatattggcggattggttttgcggattatagaaaaaagaagctaaagtctacagactttacaataatctctaataactgttggggcggcatgatttatgaaagctacaacctgcccaaagaatctcctacggtggggatgttctttattgcaaaagattatattgagttcttgtctgacataaaaggttatgtcaatggaaaattgacctttatcaagccggaggaatctcgttggaaagatatgccgcaggtctcagaagataagagatttggctcctatcctgtaggtgtattgtctaacggtaaaaattcgattgaaatcttcttcttgcactaccatagtgagcaggaagcaagagaaaagtgggaacgtcgagtacagagaattaactggaataagttactggtgaagtttaatgaccaaaatggctgtacagagacagaagtgaacaagtttatgaatatgccctatagaaataaggtattctttacttgtaagcactggccaaatgaagatgaaaattttgtaattataaggcaatttccaaaatacaattatatgatggcttcatatgagcctttcggaaaaacaaagtatatagatataacaagtaaacttaaccaattataagaaaaacaaggataagtgtcgatgaaaaacaataaaaaaatatgtattgtaacacgtgcactgataaatggaggagctgaaagagttattgctcaattggcgaattattttgtgaaaaatggaattgaatgttcaatcattaccattgatgtagcagcagttgcatatgagttggatacacgtattaatgtagatgcaataggaaaaaaagctgataataaagtaaaagatagattctttagatacgcagcactgagaaaaaaaataatgcggtataaacctgatgttgtattaagtatgccggaggatatcggaatatatgtaatattggcattgattggctccaaaatccctgtttgtgtttcagaaagaaataatccgtgggtaatgccagatgttaaaattacacgattgttaaggaaaatcgcatatccacttgctgacggaataatctttcaaactgatatggcaaaatcttattttccgaaaaatattcagaaaaagggaatcgtgctctctaatccagttgatattgcaagaattccagaaccatataagggaatacgacaaaacgtgtttgttgcagtggggcgtcttgaaagacagaaaaatttcccaatgcttattaaggctttctcaatattttatcagagggaaaagaacttcaagttggttatttatggagaaggacgagaacgtgctaatctagaaagcttgattaaggaacttgaccttgatggtgtggtattacttcctggaagaaataaagatgttcttaatgcaataaatgatgcttcggcatttatcctatcttcagattacgagggaatgcctaatgctctaattgaggcgatgtgcatggggatgccggttatttcgacggattgtccttctggagggccacgtgaattaatagagaatcaggaaaatggtatacttataccagttggggacgaagatgcccttgttgatgcattgttttcaataatagatgtaactttagcagaaaaaatgtcaaaaaaatcaagtgaattgcgatatgcattgacaagtatcagtatatttgaaaactgggagaaatatctattctgtgaataaagagagaggtacattgattgaatagaagctgtgacatacgaatcagtaaaatatccattgtatcgctaacgctttggctatatgcgatcgcagcggttgtaacggacgaaggctccatgttaatgaaattggcacgagttattcttattggagtctttgctatttatttgttattaaaaaaggaatttcgtaacaataattatattctttgcatgggcgtgttttgcctgattgccataagctcgactaattgggctataaataaagtgcatgccaatgctatgggtaaaacactattaattaatttagtttgcatgtatgctctttttttcattgttgatagaaaaaaagagaggatagaagaagtgttaaaagcacttgtagtggcacctttgtttcttgaacttcgagttatagttacgggtggtatttttgcatttagttcttcaagaaaaactggaaatataaacggtaacacagtaggcgtatgtgcggcatttgcgatttgttttgcaatttattttattttaaaaggttacaaagtgcgatggtttcgcacgatggtaatagcaaatcttattgttgttatattgtcatcgtcgagaaaagcaattttatgctttttgataccattagcaatgatttatgtgtttgacaatagggataatatagtaaaaaatgcaagtaaaatagtaatagttattctaataggttttgtcggttattatgcattattacatgttccgttcctgtattcaatggctgggcatagaattgaatcgatggttgccggattatttggaacggatgctgcagtggactcaagcacatcaacaagattgaacttgatacaatggggaattgaatggtttaaagaacgaatgtggtttgggtatggtatagataactataggtttgttctacattcttatcattcaaactggtcattagcctactatgcgcataacaattatgttgaattattagttgatgttgggctgatagggacgatagtatattattttaattacgtttggatgttggtttctagtgctagaaatgttcgcaaaataacgaaacaagaattgctatttataggaatacttgtggctataatgattagtgagtatggactggtcacatattatgataagtacatacaagtcattcttttacttatatggatgattatagaaacgttaaaagaataaaaacagaaggtggcaaaatgaaaagaaatattatacagagaggactggctagagcaggctataaaggatatatgaactggataccggatagtttatatctcaagcttatgttctgggctcgtttgggattaaaattaaattattcgaatcctaaaacactaaatgaaaaagttcaattgttaaagttgaaagacagaaaaaaagagtatattaaatgggtagataaatattctgtgcgacagtatattgaagataaaattggtagggattatttaatcccattagtaggaggtccatggaataagtttgaggatatagattttgataaattgccagatcaatttgttcttaaatgtacacatgatagtggcggacttgttatttgtacagataaaagcacactgaattttgaagaggcgaaaaacaaaatcaaaaaaagcctcaataataattattattggtctggaagagagtggccttataaacaagtgccgcctcagattattgcggaaaaatatatggttgataaatcgggaacggagttaaaagattataaaattttatgttttaatggtaagcctgataatattatgatttgtactgggcggaattcctctagaggcgttaaatactatttcttttcacccgattggcaatttttgagatataattatggtgatgaagatttaccggaggactttacgatatcaccgcctgataatttgaatgagatgcttgatattgcgagaaagctatctttcggaacaaaattgtcgagaatagatttatatgaggctgatggccgtgtttggtttggagagataacactatatccagattctgggtttgatactgatattttaccaagtactgatttgttgtttggaaaaaaattggatgtttcagagtatttaaatagataaggatgataatatagaatgcgaacgaaaaaagctgtcattaatacaatgacgtcaataatggcagaagttgtttctataatttgtggcttaatactaccaagacttattttaggagcatttgggtcaagttataacggaataacgtcatcaattacacaatttttaagttgtatagttttattacgtgctggcgttggaagcgttactagggcagcactgtataatccgctgtcaaaaaaagataaaagtgagattagtggaatagtaaatgcgactgcaatttttatgaaaaaagttgcacttatatatgtgggagcattaattgtatttgcttgtgtctatccatttcttgtgagaaattcttttagttggattttttcagcaacacttgttttgatcatagggagtagtacatttgtagataactattttggaattgcctatcaaatgttattacaagcggatcaaaaaaattatgttaatacaattccacaaattgtcactacgattctcaatacgattgttgcagcagtcttgatacattgtggagcaggaattcatctagtaaaattaggaagtgcgattgtttattttatccgcccattgtttttatcatattatgttaagaaaaaatatgaaattgatgcagacataaagccaaataattctgcgatttctcaaagatgggatgcgtttgctcaacaggccgcagcatttgttaataacaacacggatgttattgttttgacgatgttttcggatattaaagaagtatccgtatatactgtatattatatggttgcaaatggattatataaagtcgaacaaacatttacggatggtatagaagcagcgtttggcaatatgcttgcgaaaaaagagaatagagtattgcaagaaaatttccgggttgttgaatatttggtttttacatctgcagcattcttgtttatatgtggtgcagcgttaattgttccttttgcagaagtttatacattgggaataagtgatgtatcgtataatagacctcttttcggcatgctgatgtgcctgaatcaatttcttttttgtgtccgtctcccataccatatgcttgttgatgcagcaggacattttaaacaaactcgtaatggagcaatctttgaggcttttcttaatgtgattgtgtctgtaacgcttgttattaaatttggattgattggtgttacaattggtacgttttgcgcattactttttagaacattacaatattctatatatgcttcaaaaaatattttgcagagaaaatatagatttgtagcagagcatattgctctatcaatagttcaagcagtaattgtttctttagtgttgaagttaatatacgtgccgatcttctcttcatatataaattggattctatatgccattgaggttgcgattgtagttgtgattgttttgattatttcgtcggcaattttttacaaacaggaattgagaattcttagaagaaaagctaaagttttttgggaaaggagaagcaaagctaactgagatgaaagtatgtatagtgacggtatataatagtgaaaattgcggtagctattggcaagcttttgcattatgctcatatttgaaacagggcggctgtgatgtttcatttatgaaacgaaaaagaaagggaacctcacatagtatagtttatgttggtcgccagactttaaaatggatactaaaaggtgaaattgaaaaagctaaagcacaggtacaacagtattgggcttttaacgaatcaattaagaaatttaaaattgttgatgaaatagatgctaactttgatttatgtatcattggtagtgatacattgtggaatttagaagatcagtattttgaagataatagagcaattttctttggggaaaaatctaaggcaaaaaaaacaattacatttgcggtttctgcagccaatacttcgtatgatgcttttaaaaaacacgtcgagataatagatgacttaaaaaaaatggacgcaatcgctgttcgagataaatatacaagctcgattgtaaggaaacttcttgggaaagtaactcctatcgttgttgatccaacgatgttgcttgaaaagacagaataccaaagatattgtattgatttacagattgataagtttatatttgtttattattttggacggattcccgacgatttacaaaataaaataagagagtatgcaaatagcaagaaacttaaaattgttgtaatgggacatggaatgaagggtgattataaattcgatgttttttcaccgagggtattcataagttgttttaataaagcagattacgtagtaacgaatacatttcatggtgttatgtttaccttgattttcgaaaagcaagctgtttttaatagttgtggtaaggaaaaggtaaaagacgttatgaatgaatatggtttgaacgatagtgactattcggaaaacatggcaatcaacttgataaacaacaatattgattataatcgtgtcaaaataaagcttaatgaaaataaattagcagcaaaagagtatattaatgcgtttattggaggacgagcacaatgagtattaaacaaaaactaagaatgagatggaatacatataggcaggttgattatgtaaaccgaatttgtggaaataaaaagttgacaggctattatgaaggagaaatcatccgaaatgttcattcaattgaaaaaggattgtcattagataaaccacgacagttctttggtattcctaaaataattgagatgcttaatctggtggcagaatatgttggaatgggcggctactctacagatgttgtaaatatggcacttgacgctgtagatgcgtataaagaataccatcgagacgtattaaataattcaaagctaaggaatataattaataaacatgatgaacttcgaggaaaatatcctaagatgccaaaggcttatgcgggaacactgaaaattgaaagaaaagaaaaacaaaatcaatttgatgaattgagtagccttataaacgaaagacatagtgtcagagattttagtaaagctcctgttccaatggaattgctacgtagtgcttgcgaattggcattacatgcaccgtctgcctgtaatcgtcagggaacgcgaatctatattctatcggaacagaaaaaagacttacttgacgaatggctttcaggagttggtggatttgcagaagaagttgataaatatattatcataacggcaaaagtcagtgtctatcggtttgaagaggcttgccaattccagtatgtcgtttcaccagcaattttggcgggatacttatcattatcacttcaaagccttggtattggtgcttgcttgatccaaagaccgcttgttcgaacgggatcttgggttaatttttcaaaaaaactgggaatcgcagatgatgagcaaattgttttgatgattggtgttggtatgcttaaaagtgagtataatgttccaatctctaatagattagactataaaacgatggttaaagaattataatcctattgttttttgactgtgaaggttatatatgtgccaactagaggcaatgccattaagataagtgttcgataaagtgttctgtgtaaaaaatactcgtcggtaatctgaggtgacagctgcagataaacattctgaacaatagaacatatttggggtattagagtaacgttttagagaaatagagatgtgattatttgagcctgaatataatgtgtacgagcctgttgtaagaggtgccactgttgtaagaggtgccactgttgtaagaggtgccaggtacaagtgaacatttggtgaataatactaagttttgggcgtggacgaatgaaaattgatgaaatatataattattggaatatgccagagctgtactaaactaaaccgtttggtgggaatttacgaacgtaaaaaatagtatatattattatctgattttatttgcggataataatatgatcagaaacatattggttatgaggagaaaacaaatggggactaccttactaattatggccgccgggatcggatcaagatttggaacaggaattaaacagctggcgccagtagatgatggtcagcacattgttatggattattcaatccatgatgccataaaggcaggatttaatcatgtagtatttattatccgtaaggatatcgaggaataatttagatctgttataggtgatcggattgctgccatttgcgggaaatccggtgttacggttgattatgcatttcaggatattgaggatattcccggggagctgccggcaggcagaactaagccatggggaacaggacaggccgtgcttgctgctaaagccgtgctgaagacaccatttgtcgtgataaatgcagatgattattatggcaaggaaggcttcagactggttcatgagtatctggtgaacggaggacagtcatgtatggctggattcgtactcaagaatacattgtctgataatggtggtgtgaccagaggcatttgcaagatggatgatcagaataatctgacggaggtggtggagaccaagaatatcgtcaagactgtggatggtgcagctgcggacggcacagccattgatacggagtctctggtgtccatgaacatgtgggtattgacgccggaattcttggatttgttggaggaaggatttgtggagttctttgagacggaggttccaactgatccgctcaaggcagagttccttattcctacattcataggagagcttctggatgagaagaagatgacgattaaggttctccggacgaatgatatctggtatggtatgacgtataaggaggatgttgaggctgttaaggagagctttaaggggatgattgaggacggtgtgtatgagaaggatttgtttggggatttgtagataggatgtttatatggatgtgatgtgattgccagcccgggagggctggcaattggtggttataggagatttttaaatagaaatgttgtatacagagtatatgagattgaaaaagctcgaaatgcattatagattgtaaaggaaagtatcgctttactatattatgtagattggagtgtgaatgtatggtataatgattaccataatatgttatagattcacgaggaggtggtgaaatgccatcattaagtaagataattgttgacagtgttgatgaaaaatacataatacaatatttaaaaaaacataatatagtttattctgatgacgatcagggaaaagaagtgaattattgggttgatgagttgtttaaagaaaacaaggtggacattggtgattttgagaatttcttattcgacgagcttttctatggtaaaagaaaatactcacgtatgtatagaatagaaaaaccatctagcttgtcgaatccaatagattggtttgagaaatatcaaagaacatttggaattgatgtgctagattttacaaatatattaggaagtgtagccaactctgctgatcctatgaagattgctgcatctgtttcggagataaatagtaagggagatttaatttctttaaaaatcttgttttcatgttacgctgagtgcagtgataagggggattatgctcagacaggcatgtattatcctgtggaagtaaatttagaaaagattaacaggcactcgccctatctctccataactctccataagtgctacccgtattacctttttgggatttctactttccctaactcggcctatcacaccacagcacgccgtaagtttagtattacgatagtataaagaaaagccttgactggttttagttcctgtcaaggctctctttgtttccacatttattttaatgtaaagttttctgatgggaagtatcgtccacctgcttcattttcttttatgctgtctttgtcacatacgaccttgccaacatctccaaaatcaactgttatcgtgttccattgactgtcgtaatcagtaagttcaagtatagcgtctgtgattgaacttgtacgagagattgccaagtcctctattgtaagagggctggggtctgctttactcaaatcaactgttacacataaatctttgtctttcaacgcaacatctgtgattgcttcattgtcactgtcaaaagcaccagaaatagcggttttcacatcttcaacgaatttgtcagatgttgcttgctgttccgttgaattgattgcgtcttttactccgtcctcaacgccgtcctttgctcctgtgtttccaaagatagcggccagaataacaacgattattacccaaaaccaccacttcttgaaaataggtttcttgccattgcttttggttgatttatctttcataatgctatacctccaagtttggttgatattagcattatagcagattgtaacacaaaagtacagtataatttcaactcattattgtgtcatagttttatgcgccttgtcaatactataatgtaattaaaaccaatggaggaattgcattatggagaaatttatcgtgacacccaaagaagataaatctgtcaccatgacgatacgcatagatagagccttgcaagaggaatataacgatttagcagctaagacgaatcgttctcgtaatgaactaatcagcatggctttacaatatgcccttgaccacatggaattgaaagatgaatgatgactaaatgagagcctttggattttttcctctggctctcaattatttatgcgttcaatcgtaagaactcatttacctttgttgctacttcctcttgctgttcctcaaagctatgagcatagatgttcattgtagtggaacaggttgaatgtcctaatgtctttgatatttcaatgatgttgacttccagataattgagcagggtagcacatgaatgtctcaacccatgaagcggaataatcggtaattcctctaatccctcggcctttgctttgtctggattattctgcacccattcattatagcggtgtaaatgctttgtgaaatactgataaggtgttgtatgccccataagttttccgtctgcttgaatgaacatattaccgccattgctcaaatcgccttgccatgcagtaccatgactaaatcgtgtctgtatgtactcaaagtgatactgcttcaaaagtgggattacatcatctggaatagatacctttctgacagatttctttgtcttaggttctttataatcaaatccgttttctgtcatacccacagactttgaaatagagattttcttttccttaaagtcaatgtcattccagtgcaaagcaagtgtttcgccttttctgaatccacagaacaatgagagagtaaagaacactttgtattgtgtaggcacagtataggattctgtgtactcattcacatagtatggtttacctgtatcatcaatacgctgatggcctttgtaggttacctcgtatgacatatccagagatttcataaacatcaatgcttgctttggagtaaagaactttaagccctcgtcctcgtcttttctctttggtttttgtgcgtcttggcaaggattgttctcaatcatgctgtaacgcttggctgtcttaaaaatcagattcaacacattagcaaatctctttattgtacctgcggaataatcgtcaaccagagttctataaaaggcttcaatgtgtggtgttttgatatgagcaatcttgtctcccttaaagtagggaattattctgctttccaaaacctgtttatatcctgcataggtgccataagcaatgttatctttaacactctcaagccatttgtatgcaaaatcttcaaatgacattttttctgcattgaagtcatagccatattttaattta

SEQ ID NO: 262 - DNA, 21910 bp, unidentified
  source 1..21910: mol_type = unassigned DNA
  misc_difference 19314: note = a, c, g, or t
  misc_difference 19315: note = a, c, g, or t
  misc_difference 19316: note = a, c, g, or t
  misc_difference 19317: note = a, c, g, or t
  misc_difference 19318: note = a, c, g, or t
  misc_difference 19319: note = a, c, g, or t
  misc_difference 19320: note = a, c, g, or t
  misc_difference 19321: note = a, c, g, or t
  misc_difference 19322: note = a, c, g, or t
  misc_difference 19323: note = a, c, g, or t
  misc_difference 19324: note = a, c, g, or t
  misc_difference 19325: note = a, c, g, or t
  misc_difference 19326: note = a, c, g, or t
  misc_difference 19327: note = a, c, g, or t
  misc_difference 19328: note = a, c, g, or t
  misc_difference 19329: note = a, c, g, or t
  misc_difference 19330: note = a, c, g, or t
  misc_difference 19331: note = a, c, g, or t
  misc_difference 19332: note = a, c, g, or t
  misc_difference 19333: note = a, c, g, or t
  misc_difference 19334: note = a, c, g, or t
  misc_difference 19335: note = a, c, g, or t
  misc_difference 19336: note = a, c, g, or t
  misc_difference 19337: note = a, c, g, or t
  misc_difference 19338: note = a, c, g, or t
  misc_difference 19339: note = a, c, g, or t
  misc_difference 19340: note = a, c, g, or t
  misc_difference 19341: note = a, c, g, or t
  misc_difference 19342: note = a, c, g, or t
  misc_difference 19343: note = a, c, g, or t
  misc_difference 19344: note = a, c, g, or t
  misc_difference 19345: note = a, c, g, or t
  misc_difference 19346: note = a, c, g, or t
  misc_difference 19347: note = a, c, g, or t
  misc_difference 19348: note = a, c, g, or t
  misc_difference 19349: note = a, c, g, or t
  misc_difference 19350: note = a, c, g, or t
  misc_difference 19351: note = a, c, g, or t
  misc_difference 19352: note = a, c, g, or t
  misc_difference 19353: note = a, c, g, or t
  misc_difference 19354: note = a, c, g, or t
  misc_difference 19355: note = a, c, g, or t
  misc_difference 19356: note = a, c, g, or t
  misc_difference 19357: note = a, c, g, or t
  misc_difference 19358: note = a, c, g, or t
  misc_difference 19359: note = a, c, g, or t
  misc_difference 19360: note = a, c, g, or t
  misc_difference 19361: note = a, c, g, or t
  misc_difference 19362: note = a, c, g, or t
  misc_difference 19363: note = a, c, g, or t
  misc_difference 19364: note = a, c, g, or t
  misc_difference 19365: note = a, c, g, or t
  misc_difference 19366: note = a, c, g, or t
  misc_difference 19367: note = a, c, g, or t
  misc_difference 19368: note = a, c, g, or t
  misc_difference 19369: note = a, c, g, or t
  misc_difference 19370: note = a, c, g, or t
  misc_difference 19371: note = a, c, g, or t
  misc_difference 19372: note = a, c, g, or t
  misc_difference 19373: note = a, c, g, or t
  misc_difference 19374: note = a, c, g, or t
  misc_difference 19375: note = a, c, g, or t
  misc_difference 19376: note = a, c, g, or t
  misc_difference 19377: note = a, c, g, or t
  misc_difference 19378: note = a, c, g, or t
  misc_difference 19379: note = a, c, g, or t
  misc_difference 19380: note = a, c, g, or t
  misc_difference 19381: note = a, c, g, or t
  misc_difference 19382: note = a, c, g, or t
  misc_difference 19383: note = a, c, g, or t
  misc_difference 19384: note = a, c, g, or t
  misc_difference 19385: note = a, c, g, or t
  misc_difference 19386: note = a, c, g, or t
  misc_difference 19387: note = a, c, g, or t
  misc_difference 19388: note = a, c, g, or t
  misc_difference 19389: note = a, c, g, or t
  misc_difference 19390: note = a, c, g, or t
  misc_difference 19391: note = a, c, g, or t
  misc_difference 19392: note = a, c, g, or t
  misc_difference 19393: note = a, c, g, or t
  misc_difference 19394: note = a, c, g, or t
  misc_difference 19395: note = a, c, g, or t
  misc_difference 19396: note = a, c, g, or t
  misc_difference 19397: note = a, c, g, or t
  misc_difference 19398: note = a, c, g, or t
  misc_difference 19399: note = a, c, g, or t
  misc_difference 19400: note = a, c, g, or t
  misc_difference 19401: note = a, c, g, or t
  misc_difference 19402: note = a, c, g, or t
  misc_difference 19403: note = a, c, g, or t
  misc_difference 19404: note = a, c, g, or t
  misc_difference 19405: note = a, c, g, or t
  misc_difference 19406: note = a, c, g, or t
  misc_difference 19407: note = a, c, g, or t
  misc_difference 19408: note = a, c, g, or t
  misc_difference 19409: note = a, c, g, or t
  misc_difference 19410: note = a, c, g, or t
  misc_difference 19411: note = a, c, g, or t
  misc_difference 19412: note = a, c, g, or t
  misc_difference 19413: note = a, c, g, or t
atgggccatcgtcagcccttcaccaaggttgagatcactgcgatcaacggctaagtaggaggtatattacaatggcacataaaaagggcgtaggcagcaccaagaacggccgtgattctgcggctcagcgtctgggcaccaagcgtgcagatggtcagttcgttctggccggcaacatcctcgttcgtcagcgcggcactcacatccagccgggtgagaatgtcggcaagggcagcgatgataccctgtttgctctggtcgatggcaccgttcgtttcgagcgcgtgggcaagagcggcaagaagtgcagcgtcaagcagtaacttctttctaaaatctgcaacacagagagccggaccctcgtggcccggctctttttgatgaatttcttcttcctcgatcaggctcccctattaggggagctggacgcgccaagcgcggactgagaggttattttcaaataaaagcgcagagaataagcgctgagaagaattttttctgagaacaggagggcctgtatggcagcacaaaccaattttatcgacatcgccaccatctggctccatgccggcaagggcggcgacggcgctgtgagcttccatcgtgagaagttcgtggccgctggcggcccggacggcggcgacggcggccggggcggcgacatcgtcttcgttgtggacgaccacctcactactctgatggacttccgttataagcgcaagtacaccgccgacgagggcggcaagggcggcgcaagcctctgccacggcaagaatgccgagaacctcgtcatcaaggtgcctctggggacggtcatcaaggacgcagagagcggccttgtcatcgccgacctgtccgaccatacccctgtcaccatcgccaagggcggccgcggcggctacggcaatgcacactttgccacccccacccgccagatccccaagtttgcaaagcccggtatgcccggcgaggacattcaggtgaccctcgagctgaagctcatcgcggatgtgggcctcatcggcttccccaacgtgggcaagtccaccctcatctccaccatcagcgccgcaaagccgaaaattgcaaactaccacttcaccacgctggtgccgacgctgggcgtcgtgtcggtgggtgagggcgcaagcttcgtctgtgccgacatccccggcctcatcgagggtgccagcgagggcgtcggcctgggccacgacttcctccgccatgtggagcgctgccgtctgctgctgcacgtcgtggacgtctccggcagcgagtgccgcgaccccatcgaggacttcgagcagatcaacgaggagctggcaaagttcagcccggctctggccgagcgtccccagatcgtggtgggcaacaagtgtgaccttgccaccgaggagcagatcgacaccttccgcaagtatgtggaagagaagggcctgactttcgtccccatctccgccgccaccatgcagggcgtcagggagcttccgggtctggtctacaaccgcctgaaggacattcccgccgtccccgtgtttgcccccgagtacaagaagcccgaggcaaaggccggtggccgcgagttcaccatcaagcggatggaggctcatgtctggagcgtggatgcaccctggctggagtatatcctcgcgggcagcaacgtggacgactacgagagcctgcagtatttccagcgccagctgggcgagagtggcattctggacgctctggtgcagaagggcgtgcaggagaacgataccatcctcatcggcgagtatcagttcgattatattttctaagcaagagcttttgcgggataaacctttccgtcattgcttcgcaatgccacctgtcctagcgaggagaggccttggcatttcgtgaagctttccctcttcgccagaggctcccctcggtaggggagctgtcgagcgaatgcgagactgagagggtgagcaaagaagaagctttaagaggtatcctatgaacgaacccgaaaagatcgacccccgggagctgagcccgctggcactggccttcgtgggcgacagtgtactggaacttctggtgcggcagcggctggtggagcaccaccgtctgtcggcgggaaagctcaacgccgaaaaggtcaaatacgtctcggcccgggcgcaattccgggaagagcagctgttggagccgcttttcaccgaggacgagctggctgtcttcaagcggggccgcaacgccagcaaggccagtgtggccaaacatgcctccccggaggagtaccgcgcgtccaccggcttcgagtgcctgctgggctggctgtatctgaacggccagctgagccgggtgcatgagctgttcgagacgctgtggcagtcgttcgaccccaacgaaaaataaccggaacacgcgaaagcccactgctttccgcactgggaaacagtgcaaagagagcagtgggctttttgttgtcccgccagatggtccgttcgggcggggcggcgctcagcgcagaggcttagcggctgttgcgggcggagttgtgagccgagttcttgccgccctcgtcgtcggcacccttggtgtactggttggggtgcttgtgctcgttggtagcagagttctggctggaattggtgttgcggttggtgctctgattgctggtgcggttctgagtctggttcttgcagttggtgctgcggttctcgctgcgattttccatcgtatcgtcgctcctttcgatttcgggaggtgttctgtgctccctgcccatagtttgaccggctgcggcggctttatgcaccgcagcccgaaggaggtctcataaaaatgtctgccgaatattttgaagcccgggaacgcgcccttctgggagagcgatacgatacgctctacgctgccccgcaggagacagcggcccgtggcgtgaccgtctctgccctccgcactacgccggaagaatttgcggcccgggcagacttcccgctgcggccctcgcccttctgcaaggcggcgttcgtggtggaacagcccgacttcaagccgggccgccatccctaccatcacgcaggcgtcttctactcgcaggagccatcggcctcgtcggcagctccgctgctgggcgtcaagcccgggatgcgggtgctggatctatgtgctgcccccggcggtaagagcagccagctcgccgccgctctgcaggggcagggcctgctggtgagcaacgaatatgtcgcggcccgtgcagagattttgaagagcaacctcgagcggatgggcgtgtccaacgccgtcgcgctcaacgagacgcccgcccgcatcgcagcggcactgccggagttcttcgaccgcgttctggtggatgcgccctgctccggtgaggggatgttccgcaaagagcctgccgcgctggcccagcactgcgaagcgctggtgaagcagtgcgcagagctgggcgcagacatcctcgcgagcgccgctgcggccctcgcgccgggcggcgaactggtctactccacctgcaccttcgcgccggaagaggacgagggacaggtggctgcatttctgcagcgccacccggagttcatgctggccgatgtgctgggcaatgtggactatcccttcggcagtgagggtgaggccaaccgcaccggtggtctgccgctggatgtgagcaaggtgcgccgcatctggccctgtcagggcggtgagggccactttatggcccggctcgtcaaagccggtacgccccgggctctgccggctcccggcgagtacacccccgaagagcagctctggatgaccgctgccgccgaggcaggcaaaaaggccaagggcagcaaaccacagaaggctgcaaagcctgcggatgcccgcagcgcccggcgggagaacagccgggcttgccgagaggctgtgcagggccgcagttcccgcagccgggacgctggggcaggggatgcatcgcccgcccagagcctcgctgcatggcgggaatttgcggaggaatatttcccggagctggcaaagcgccctgccgtggtgcatggcggcggcgttctgctgccggcggctttcccgcagacgaatcttcacgttttgcgtgcaggcgtcttcgtgggcagtgtgcaaaaggggcgcttcgtgccggaacatcatctgttcacggctttcggcgcgctctgccagaaccgtgaggaactgaccctcgccgactcccgaaccgtggaatatctctctggccgggagatagaagctcataccgctgccgatggatggtgctgtgtgacggtggacggctggccgctgggaggcggcaaggtatccggcggcagggtcaaaaaccattatcccaaggcacttcgtctgctgtaaaacgtagtttttggcagaataaaccggaaaaccatcggtacaaggcttgaacgccggtggctgttgtgataaaataatagagttagattttgtgtgctgccacaatgcgggcgaccacagcccgtctgcccgcaggcggagatcactgataaaatacaggaggctctttcccatgtctggacatagcaaatggaacaatatcaagcgcaagaaggagaagactgacggcgcaaaggcaaaggtctttaccaagatcggccgcgagatcagcgttgccgtccgtaccggcggccccaaccccgcttccaacagcaagctggctgacctgatcgccaaggcaaagcgtatgagcgtgccgaacgataacatccagcgtatcatcaagaaggccgagggcggcgataagaccgagtacgaggcaatcacctacgagggttacggccccggcggcgttgcggtcatggtcgagactttgaccgacaaccgcaaccgtaccgctgctgacctgcgccactacttcgataagaacggcggcaacctgggcgctatgggctgcgtgggcttcctgttcagccagaagggcgtcattgacatttctctggaagacaaggatgccgacgaggctatgatggacgccctggatgccggtgctgaggacttcgatgcaggcgaagatgccgctgaaatcaccaccgaccccgagaactactccgctgtcgtcaaggcaatggaggagaagggctacgagatcctctccgacgatctggccatggtccccatgaccaccacccgtctgaccgaccccgatcagctcaagctgatgggcaagctgctggatgccctcgaggataacgatgacgtccagaatgtctggcactctctcgagaacgaagaggacctgccggaataatgctctacaagtctgaataaggacgtaacaaagccgctttttgtgctgtgaggcacagaaagcggctttgttgtttcatagcggcttctaatattgggagtgcccgtaaaagataaaaaacgctttttgccgcttatttataattctggatctattgcaagcttagacggtggctgctaggcaaaagctgttcaaaaaatcatttatagcgattcaactttgtagaacaaaaatagaacaaggcaaagagagtgataaatcggcggctatagaaagggtagatgtttgagtggaaaactattgaagtaatggtaaaattatgataaaattggtcgaggaataaatcataatatgaaaataggcaggggttgtggctctgaaagaaaaaagctcagaaaaacgataaaaatagaatgaaatctcaaagtaaaagggtttgacttttgcagagtgcgtgcaggagtctattgaagttgtgcgaaactgaaagataaaaaagaaatcgcgatttcaaaagtgttgatggaatgacacatcgaatttgaaatgcctctggtcaaaataccggagaaaaggtacttcagatgtgtccataaaagctctggtggtcgtcatgctcgaaaagctccgtttatgcggtagtcgagcgattttggcaggctgagatgagcggtgaggcagagcaaaaacatcgaatcgtaagtgaggtatgcggaatgtcagcaagtgtggttggaattgagaagccggtcgtcatcgaccgaaagcagaatctgcgggaacatcggttatattgggtcggacgccggacacaggatgtggtcttatcggcactggcgctggtggtgttgtcgccggtgatgctggcaacagctatcgctatcgtgatagatgacccttctgccgggcctattttttcacaggagcgtattggacgcgatggcaaaccgttcaagttctacaagtttcgttccatgtgtccgaatgcggaagcaaaactggacgaccttctgggccagaatgaaatggacggcccggtgttcaaaatcaaggaagacccgcgaattacccgcgtgggcaagtttatccgcaagacgagtctggatgagcttccgcagctgtggaacattctgaagggtgatatgagcatcgttggcccgcggcctgccctgccccgcgaggtggagcagtatggggattatgagaagcagcgtttgtatgtgacgccgggcctgagctgctattggcagatcgcgccgcaccgtaacgacctcacctttgaagagtggatggatctggatgtgaaatatgtcaaggagcgcagtttctgggtggattggaagattatttttaagaccttcaaggtgtgcttgctggggcatggagaataaaaagacatgcctgcgtatggattgtggctgcaatctgtatacagacttgttgtcgtacggctcattatgagatttacatacattgttgatgaaaaggtttcaggaagatatgggattatgaaaaagactataaagttgcagtcgccggtaccggatacgtcggcctttcccttagcgttctgttagcacagcataatcaagtgatggctgttgacattgtgcaagcaaaagtggatatgattaacaatcataaatctccaattcaagatgattatattgagaagtatcttgcagagaaagaactgaacttgaccgcaacgctggatgcaaaggctgcatactcggatgcggactttgttgtaatagctgctcccacgaatgtctactcaacaaaatcagttgaggtctgatggtctatggtggagcgtaatacacatgcgataataggcattttttgcataaacatacgccacattttactctgaaaatcatgttttgtgcagtaggacgttaatactgataactgcatttatctgcgtggcgttgagtaacggacggaaattactaatattctgtcgtgtagacatcataaaaatgaataaatcattgtgcaggttgcaacaagaatgatgagtttgcttgtatgattattacaaaaaagatggaatgggaaaatctagcaaaatagaagcgaaaaaacgggtctattcaacagattaatactttgatgtaaagggcggagagtgcggcgtatgaatatgcgccggagaaatgcggaagaagatgcaactgattttgttgagtgaagctgtctggataaagatatataggaaatagacgaaataccgagaaaaaagtattgattgctggggtagttggatacgacagcataagaaaacacttagccgtgtgagcggcaagaggaaaaagaaatactatctgtgaagagcagatgtgtacatagatgaagagatgagatgttaacccgatgaggggtggaggagttcattatggaaaaatttgattatttagtagtaggctctggcctttacgggtcgatttttgcacatgaagctaaagcacatggcaagtctgttttggtagtagacaagcgcccgaatattgccggcaacatttacaccgagaatattgagggcatcaacgtccataagtatggtgctcacattttccatactaacaacaaaaaagtatggaactacattacacagtttgccgagttcaatcgctttacgaactcacctgtaaccaattacaagggcgagttgtactcactgccgttcaacatgtacacatttaacaagatgtggggtgttgtaacaccagaagaagccgctgccaagatcgaagagcagcgcaaggagattactggtgagccacagaatcttgaagagcaggccatttctcttgtcggccgtgacatctacgagaaacttatcaaaggctacactgagaagcagtggggccgcgattgcaaggagttgccatcctttattatcaagcggcttccagttcggctgacttttgataacaactacttcaatgcactttatcagggtattcctgttggtggttataccaagatgattgccaatctactggatggcattgagattcggctgaatacagactatctggagaataaagctgagttggatgcattggctgataaggttgtatacactgggccgattgatgcttacttcgactataagcttggtacactggaatatcgttctgtccgttttgaaacggagactttggataaatcgaacttccagggcaatgctgcagtgaactataccgaccgcgaaactccgtggactcgaattattgaacacaaatggtttgagttcggtaaggatgagaacggcaatgatctgcctaagacaatcatcagccgtgagtacagcagtgagtggaaaccgggtgatgagccgtattatccggttaatgatgctaagaatagcttgctttattctgagtataagaagttggcagatgaagaaaacaaggtaatttttggtggtcgtcttggtgagtataagtattacgacatggatcaggtgattgcggctgtgttggataaatgtgagaaggaactgggagagtaaaaatggcaaagaaaaagattttaatggtctgtgaagcctttggaggtggcgtatttacttacgtatctcagctctgcaacgatatggtggatgattttgatgtctatctcgcatattcgctcagaccgcaaactcctaagaattacaaagattttctggatcagagagtgcatttgattgaaatgcaaaatgtcggtgttaagggactaaccaacttaaagagtgacattgcagcaattaaggaattgcgtcagattgaaaaagatgttcagccagatgtgattcacctgcattcttcggttgcaggtggtttaggtagacttgcatataacggaaaaaataatactgttgtgtatacacctcatggatacgcacatattcttatgggtccggggaagaagagcaaagtctataagtttgcagaaaaggttctcggaaatcgagcacttacacttacctgttgcgaaagtgaagatgaagaagcaaagaaattctccaagagaacagcctatgttgaaacgggtgtgaatcttgcagacctttcggcatcccttgatggtattaagcctgtaaaaaatgacaagttcacagtctttacgcttggtcgtgcctgcgttcagaaacagccacagctttttaatagaattgctgaactagtaccagatgcaagatttatttggattggtaacggagaacttgaaaatgagttaactgctccaaatattgaagtgacgggatggaaacctcgtaaggaagctttggcaatggccaagggggcggatgcatttattttgtgcagtcttggtgaagccattgcaatgagccttattgagaatatgtacattaaaaagttgattctcgtcagcaatacaatgggaaataagagtgttatcaatgatggtgttaatggctatgtgtgtgataaagcagaggagtatgctgaacatataaaagcggctatgaaggaattccccaaagaacttcctgaaagagcctatcaggatgtccttgaaatttataacaccgaagctatgaagaagaaatatattgagttttacagtagtctataagaagagaggaaaatagaatgttatgatgacaaagcttgttaatctggcgcgaaagaataaattatttgagattgtgattaaggcatttgtctggatcatgatggctgttattaatgcttggtatgaatttacaggatttttaagatgccatggggtacttagaaatcagtatagtgatataaaagcattaaaaggaaaatacgatggaaagcgttgttttattatctgtacgggtcctagtttgactacagaagatttagaaaaaattcgagatgaatatacttttggaatgaattctatttgcctgcttgctgataagactagctttagaccgacattttatggatgtaatgatttaggagtttacaagaaattaaaatctaacatagaacaatattgtggtaatcagattgaagtatttgtgtcggatagaattaagcgccacggtgatataaaaaaaggatggcatgtgtttccagaaaatgtagcataccatacttatgatcggtggtttaaacaaagcttttggtgtaagtttagcggcgattgttatagaaccgtttacggcatgcatagtattacgcactcccttattcaacttgctgtgtatatgggatttaaagaaatatatttattaggtgctgattgcaactttccgaagggaaagcaaattcattttcaagattatggtgttcctgacacaacaatagacacagcaagagaacgtaatattgctggttataaagaagtgaaaaaacagatgaatcaatacggatttacagtatttaatgcaacccgaggcggtgctctggaagtatttgaaagagtaaatttagatgatttgctaaaagaggataaatagaatgaaattattatttgtgagtatgagtgctaggacaatagaggattcatcaggaaatatatatcttaactctcatatgaatcgaaaaaccataaaacgttatgcagatatctgtgacgagtttcgcatgattttaagagatagcggtattcgatgcgatgaggaagaagcgaagcataaatatgatttatttccatatgatcttgcgcagttagacattggatttaatccgtacaatcctaaaactaatttgattaaggtaaaaaaatacaaagagctggagcgtttaattgaaaaagatatcttatgggcagatcgcgtgattctagcatcagctgtaggcgtttattctgagatagcaattaaatactgtagaaaatatcatagaaaatatatgctgatggttggtggatttgcatatgaaacagattggaatcatggaatagacggaaaaatagttgcgtggaaacatgaacgcatttgtaagaagaacatggcaaatgcaccgtatggcttgtatgtgacgcaaaagagcttgcaggaaagatatccgtgtactggaaaaactataggttgctcagatgtcgaaataatggatttgagctcttcaattcttgaagaacgattaaaaaagatgacaagcggaaaggccattctttcattaggtacagcagcaaatatcgatgacaagctgaaaggccatcggtttgtaataaaggcaatttcattgctcaagctgaaaggccatcggtttgagtaccatctacttggcagtggatgtggcgaggaacttctttcatacgctaagcaatgtggggtagaggatcaagtaatcatagacggatcaaagccacataatgaagtgtatggatggctagatagcatcgatatatatattcagcctagttttacggaaggtttatgcagagctgttgtcgaggcaatgagccgtgcatgtccagttgtttgtacgaatgttggtggaaatagcgaactatgttcgaatgaatatttagtaaagccaggagattctgaaggtattgctaaagcactcgaatttctgatttcagacgatgagaggaaaaaacaggctcaaataagctttgaaaaggctcatgactattacagcgaaacgcttgatcaaaaacgacaggagtttctgttggattttatgaaatgagataagaggagaagagatttgacaaacatatatactttattgggttgtttagcaattttattttttttgagctatgtactttgcggaaaagattttttttctccagcaacaatgttatcgctgacatttatgttttcaacaatgtgcgctatatataaatacccagtatggagatatgatttttctggatggacaacttttataattaccagttctttggctattacgctgattataaattattttgttgtgatgtttggccctaaatatctcatcaaaaagagattggcgtactcagagaatataacgccaataacaacatcaatgactatagttgctattattattattttagtgactgctttagctctagttaaacagatagtgcgagttggcggtactggaggaacgatgcagtcaattatggcgtcttatagaaataatggatcttattctacagatcttgataatcaaatgccacaatggataaaaatcttgcagtattttacaaatgctttttcatatttattcgcattcgatttgatgtttttttggaatgaacttaaagcggggagaagaataggagacattttcattgttgtactatgtgtgataacaggtcttttatctggtggaagatttggaatggcatcattattgattgctatttttttgatgaaacatctaattgaaataaaaaagagaggatattacaaacaatataaattgtcatcaattatcaaaatgactcttgctgttttactggctttttttgttttttatattgttagaacacttgtaggaagagatgatgatcaaggcctttttgattacattggtcattattttggtggaggagtacctcttttggatatttacttaaaaaaagatagagttgagccactggtttgggggcaggaaacattttactcactcataaataatcttcggcgtttgggtcttataaatgtatcatattatgtccgacatcatgagtttgtatacagatatggaaattcactaggaaatgtatatacagcatttagagattattatcatgactttggcttagctggaatatatatttttcatattctattttcatggatttattgtgttcagtatcaacgaatgaaaaagtatggaaatctattgaaaattattgttttttcgacaacgtattatgcagttgtattttatccattcaataattctttgtttgcgactattttttcaatgggatttatgattcagcttacaatacttattgtactgtatgagattatgcttagaaaaagggttggctttaggtgttatgagtgaatttatgctagaaaattataagtatatttcatttgatatttttgatacattggttaaacgctgtgttacaaatccacatgatgtttttgatttgattgatagatactgcaaaaaaaatgaaattccggtgcctgatgattttaaagataaaagaattacggcagaacgaatggtcaatcagaaaaataaaagaccaagtacaataggagaaatttacgattttttttgtcaggaatatggtggtaatccggcaaaactagaagaaattgaaaaattagttgagcttaatgtctgcaagccaaatactgaaattataaatttatatcataagtgcattgaagcaggaaaaaaagtatatgtgatttcagatatgtatttggatgcagcttttttgaaaaagatattgtccaactgtggaattgaaggatacgaaaaaatatttgtatcttgtgaataccatgagacaaaaacaacaggagaactattcaaaaaggttatagaggagaaaggacttgagcctgaacgatggcttcacattggagataactcaaaaggcgatgtaggatctccgaagaaattaggtatttctacatatcatgttccttatgaaaaaccgcaagtctatcctgtaaaagctacaatcagagagaaattggattttgaaattgcgaacaggaatgtatctattctcgctcatacgctaaatactagcaaggcaatgggggcaaaagtgcttggcccgttacttgccggcttttcaaaatggctttctgttcaactaaagcaaagaaatattttcaaagtgttttttctttctcgtgatggatattccatgaaaaaagcatttgatcttattaatccaagtggatttgaaactgcgtatatttatgcttcaagacgttcatggacggttcctgcaatatggatggagccagagtatgaggatatattaaaaaatatttcgatgtcacccaaaacatcagttaaaagctttctgactcgaattggtcttgaagcggataaatatgggcaagaagtaaaacaatgtggcttaacactagaaacgacgattaataaaaaggatttattggattctgataaatttcgccagatttactctatggtaagagaaagggtaatagaaaactcaaggaaagaatataacgctgttgttcagtatcttcaagaaaataacgtatgtggaaaaatagccattgttgacattgggtataatggaacgatgcagaaggcgttacagcgaattctggaggctgcaaagattaatgcagatgtcgttggtttttatatgggattaaatccaaaatcaaagctgattgagagtcgtgaaatcgatacgcttagctttttgtacggaccggagttgaaaaatgactatcaggataagataaatgcgtttatatccgtgttcgagagcattttcctttcgcagcatggttctacacatcgcttttgtttagaaaataatgtacctgttgttgagttttatgactatgagtatgatttgcaagagtcaaaatatatagatgaagttgaaataattaaggatttccaacaaggagcaatggattacgttgagtttgtagcaacaatgttaaataacgagttgctggtaatcgataatagtattgcaattaacaatcttctctatatggggctaaaaccagaaaaaagtggtgtagatttgttttctgatttcagaatgtttgacacaaggatttcccatattgctcatccagatactttaatgcattatttgagaaatccatcaagatttaaaagagattttacagaatcaacttggaaaatagcgttcttgtatcgattgtttaaacttccaattccgtatgagaaaatttactatatacttaaaagttttgtgaaatcgtgaggaaaatcaactttgaaaaatgatttaacaaaaaagtttgcttctaatttaacgtatgcctttttagcacagtttctcagtttgatgcttagcgtcttgatgtcattgattgtgccgaaactattgggcgttgagcaatttgcttattggcagttgtttatattttatagtggttatgtggggttttttcatttgggtttgccagatggaatatatctcagatacggtgggacagagcttgataagatggataaatcattattgggttcacaactgcgagttatgaccacaatgcacattatttttagcattattgggattactgtattgtcgttctcgccaatggaaggtgacagaaagtttgtctggataatgacggctgtgtatatggtggtgaccaatgcattttggttccttggatttatctaccaagctgcaaatcagaccaaaaattattcgatagcaacgataataagcaagatatcttttaccgtttgtgtttttacactgatggtatttcgaccggaaaattttcaaatttatattcttctatatgttttggcacagggattgtcactaatctactgtatcgttaagggaaaggcgtttgttttttcaaaacaaatttcgatgaagaaaactttatctgaaatgatttacaacgctaaaattggtatcaaccttactttttcgaacttggcaagtagttttatccttggtgttggtcgagtaatgattgatgcgacgcaaggaattagttcatttggaatcgtatcgcttgcaatttctttgacaaattttttcttgcaatttatttcacagattagtatggtactgtttccgatgctgagacaatttgacaaagagaaaatgaaaaaggtttttgtgcttgtacgaggtggtattagttatttactatgtgcaattttggttttatatgtcccagtcaagttcgttttgagtatatggcttccgcagtacaaattaagtctggaatatcttgctattttgctaccgttatgtgtttttgatggaaaaatgcaactgttatataacacatacctaaaagtattgcgaaaagaaaagatgttgctcctcattaacattatttcattgggtattagtgctgggttatgttcgattggcgcatatgttcttaacaatatgatggctgttgtgatttgtatggtagcagccatagctattcgtagtttaatcacaaacatatatttatcaaagattatgggagtgtcaaatgagataaatgttatctgggagtgcgttctttccctgatttttattgtgattaatcttacccttccgatgtatattgcattttttgtttatttgacggcatatgtaatttattgtttggttactagaaatacacttatggagtgtatttcttttataaaaaagcttagataagagaggtaattattatgaaagtagtatcatttattccaattaaacttaataaccagcgtcttccaggcaaaaatacgatgatgcttaatggtcgaccgatgtgcgactatttatttgaaactattagtaatgtggacagtatagatgaaaagtacatttattgttcagatgaggcaataaaaccatacattgcaccttatgagccaaagggactcagatttttgaaaagagattcatatctggatggatttcaggtaaagggattggagattattgatcgtttcgttaaggacgttgatgcagatatttatgttcttacacatgttacacaaccatttactaaggggtcttctatttccaatgcgttggaaaaagtagtttccggtgaatatgattctgcattttccgctgttatgctccaagattacatgtggatgaacggaaaaccctttaactatgatatgaaaaatatagtaaggacacaggatcttgatccaatttatatggagacaggtgcctttttcatttttcgtaaagaggtctttactaaattgggacaacgtattggaaataaaccgtatatatatgaaatagatcagtttgaggcggttgatgttgatactgcagaagattttgaattcgcaaaagcggtagccacatatttagctaataagggagaaaaataaaaatgaaaaatgttagagttctcgattgtacgttgcgcgatggtggacgaatcattaactgcgcctttcctgatcaagaggcaaaggaaattagtcagagactggctgatgcaaagattgatattattgaaattggtttcctacgtgattggagaaaagtcgcttataagggtaacagtacgttttttacagatgtggatcaaatgagagcgtttgttaacaaatcaagaaagaatacgttatacacagcctttattgattttggcatgtgtgatattgattcactaaaaccatatgatgggacttcaatagatgcaattcgttttggatttacgaaaaaaaattatgcagagcaaaaagatgaagtgattcgatggattgaggttattaaggagagaggttataaactttttattcaaggagtgaattctttaaattattcggatcgtgagcttcttgagatagttgatatggttaatagcgttcatccgtatagttttggaatcgttgatacatacggggcgatgtatatggacgatgttgaccgactttatggattgattgatcataatatggattctgatatttgtattaactttcattcccataataattatcaattatcttttgcgtttgcacaggaagttataaagcttagtggtactggcaataggcagatcattattgacggtacactagggggaatgggtaaagttgcaggtaatttgaatacagagcttattgtagattatcttgttcgtaagaagcattatgattatgaatttgaagatattctcgatatgattgacgattatatttacaaatatagtttaaaccataagtggggatattcaacgccagctatgcttgcaggtgtttacaaatcacacccgaataatatcatttatctaacagaaaaatttaggctggatacaaaagacataggaaaaattttatctatgattgatccgggaacaagacaacggtatgactatgataatattcagagattgtatacggaatatgtagctgacaaggttgatgaccgtaatcaaatcgatttgttaaaaaaacaaatcgaaggaaaagaagtatttattatggttcctggcaattcgctcaatacatatagaccagaaattgataattacatttcggaaaacaaacctgtggtcataagtgtaaatttcgttgcagattattcagaagcaatgtcgttttttggaaatgcaaaacgatattctcgcttaaaaggaaagagagaagggcgaatggttatcatttcatctaatataaagtctgatacaaaagaggatattgtggttaactatcacagtattattaatcgtggatataaatattttgaaaattctacaattatgttattgagtctcttaaagagagtaaatccgaaaaggataacaatggctggttttgatggttttgatgaatgctctgaaatgaattattccgatacctctttccaaaacgaacgccatattgcagaatttaaggagttaaatgaagaactaacaaagatgtttgaagaaattgttgagacaatgactccgggatgtagctttagcatgatcacaccaagtaaatttgaaaaggttattgaagatcactgcatattgcgaagctaaacagttcattccagaattgaacgaccactgaataaggcgtaagcagaacaatctattgttctgcttgattgttacaatcaacagtttgagattaagtcaatggggcattatgccggctttactccttgccattgactcgaatcgaagactgtggtaagatgaccgtttgatttcggaaagtggccgttctaaagcggaatagtgaccgctgaactccgtaaactgcagattacggcattttataatttattgagccagtgtacggtactaaagcagtatctaatataagtacgtgcgctggtttttaaattataagcttgacagacgagtagaggggagaacataattttgagagcagagcagagcagagcagagcagagcagagcagagcagagcagagcagagcagagcnnnnnnnnnnnnnnnnnnnnnnnnnnnnnnnnnnnnnnnnnnnnnnnnnnnnnnnnnnnnnnnnnnnnnnnnnnnnnnnnnnnnnnnnnnnnnnnnnnnnagatatctatatgctgttaaggcagtagcagcacttttagtagttgttttgcatttgaaggtgaattctgcattattaaatgggatttctcgttgtgcggttttgactttttttatgataagtggctactatacttcgattgattctcaagatattcaaaatattctggtgaaaagaattgaaaggttactaaaaattttgttgagtgcttcaagcatatatttgcttaaagatttggtattcttagctattcatcatcaaagtgtatcgttgtatttagttgaagaattctcggcttatagaatccttaaaatgcttatatttgatgattccttaataagacagcatcttgggtttattgtggcaatgatatatctatattttgtgttgatattatctgataaatatggggtgctgaatagaattgtacaatttcaaatgcctttgataactatattgtttattgctaatttattaataggggaaataccacatctaattggctatgatactcctgtctgtttttctagaaattggttgattactggaatgcctgcatttttgcttggaaattatatccataagagtaacaaaaatcatagcagatattttgtcattgttctttgtattcttggtatcgtagaatcatggatggcatttagaataattggtaagggcgatacttatttcggctctattttagtggcatatgtattggtttatggtgtgagattgttttcaaaaatcaggtgtgttgctttaagttatattggatcaacatgctcgttatttatttacttgtatcatattttaattggagagattctcacaggagttagacatagagtaatgattgtttatatatcctgcattatactctcattaatatacaaccgcatttttagaattataaaaaaatatggtaaaagagcacttgaataatattgggaaaggaaacataatcttgacagacagacagacagacagacagacagacagacagacagacagacagacagacagccgtggatagatattgctaagggaattggaatattactaattgttcttggacatattctagaatcaggttcatttcgtatatggatatattccttccatgtcccactctttttttgtatttctgggatgacatatcgtttgtcttctagattccaaagtaccccttggaaagaacagataaaatcaaaatttaaaaggacagttattccatattttgtattcgggagccttagctatttatattggctgttaattgaaagaagatttcgggtagatactaacgtctcggtttataaaccactatttgggatgttttggggaagcggcagtgacaatcttacatttaatgctgcattgtggttccttccatgcttatttatagttttttgcttgtttatatttgttgaatcacattatacgggaacagtcaaaattatttgttatttgattttaatttcgatgggtgttctaatcgaaaagtatctatctactagactgtcatggggagtagatgtggctctttttgctttgctttttttattggtgggatactatatgtattcatatttagaaaatctaaatggtctttcgctgtacttgaagatatggtttgcaattgtttcgttgtccattaatattccggttgccttgtggaatggcgttaccggaatggcatctgttatatacggaaatgttgttctatttataatagctgctgtaagtggatctgtggctgtcattgaaattgcgcagattattaaatccaatacagtacttgaattttttggaataaactcgattattataatgtgcattcatgaaccaatacgacgtattgtgattaagcttttttctgtccttataaggggtgatgtttctactattcgagataatgtgttgtattctttttttgtgtgctttattgtgattttaatagtatgtccagcatgcattatcgtccgtaataaaatgaaatggatgttaggcattaaaagtaagtagagaagaggtgctaacagtatggttaaatacttagtgatggatgtcgatggaacattgactgacggtaaaatttatatgggaaatgatggtgaaatgatgaaggcatttagcatcaaagatggttgtggaattcatgatattgccattccttcaggtattgtaccggttattattactggtcgaaaaagtaaaattcttgaaaatcggtgcgcagaaattggaattacagatatttatcagggggtatccaataaggttgaaagactgaaaaccataactgaagaattaaaggatgttgcttatataggcgacgatattaacgatttatcagcaatgatgattattaaagaaaacgggggcataatcggctgccctaaagacgcagcggtggatgtgacaaaattggcaaatttcatatcttcacatgatgggggagatggggcagtaagggaatttatcgagtggcttgtca

SEQ ID NO: 263 - DNA, 20736 bp, unidentified
  source 1..20736: mol_type = unassigned DNA
taaagagttctgctgtctgatacaagaggataaattgaattgatagaactcacctttagacactatatgtatgtggaaagcaaccagtccttctatccgaaatttaagggtggcttgtataaacggtaatatgcctattagtacgaaaacgattgggtatattgtattctaaaatcatagtgtactttgaactgcgataataaggctacggaaactctattgtttcgtatgaaatgagagtatttccatttcttctgtattacttgtctcctttcaagggtataaatcctatttgttccaattgggcgattttttgatccgacaagcttcctcttcgataattccgtctttgaaccgtacaccaacgccccaacgccccttcacgacatccaggccaccgtccattttggacatgaaactggtgcaactgttccaagtagcttcgccagacctgctccaccgaccaaacaaatcctattcgatctaatagtgtttgacgattaggggaaagtttcccttgcttgcgcattttccgctgtgtactgcaccactcgcccaaatagccttcggctgatttgggaaagcgctgctgtttgtcgagaaagattttcaacgcttcataatttttcatccattcaccgttcaagtcctgactccacacaaatccgatctcatccaacacacgaatgcgttctttgctcaaacgtcctttcttacgtctttcccgttgagtataacaccaggtagccaaggcaccatcctcccgtttgggccagcgaccttgagtcgcaaagaagactttcaatgattggaattccttcatccagtttgaatccagcaggttccattcaaagccgacagactccagcagtttgtaacgctcctccgagagtctgccccgtttgtaagccatgcgctgcgtattgcaccacaagcccagcttcccctctgtaaccgaaggccagtcattttctttcttacggaactcaataagcctctcatacatgatctgccaaggttccaactctgtcaatatctcctcaatacgaagccgtatgtctgataggaaacctgtggtcagaaaagaagtcaccccttcaaatcccttgggtgaaggctgacaggcaaggcgttccatgtgcaaggccatcatgtcatatacagatttgcccgataggttattcacaaaatccaatacgacaggctgtttcccgcttccggcatccaagcaacggcccagctgttgcagggtaacaatataggattctgtccgccgtagaaacaagacggcatctatgccctccacatgcagtccttctatcagcatattgacagagaacaatacatgcaatttcccagattctttttggaaagcctttagtatttgattattagtccgttcgctttgagtgtgatggatctcaaatggtatgattacccgtccggcttgtgtcagccagccacacacctcaggaaccatctgtttcaggtcggtaagatcacggcaaaaaaccagcagtttacatacatctttgggcaagaactttcggattacctcaggagctcctaacgcccctttaaaatcaacgcgagccacatccagtttcttttggacttgttcttttcgtcgaattgaacatccgcttcgatccaatcgcttttgtaaacgattcagttcatcgtctaatccataggcactttgtaccaggattgggactggtaaaatacggtaataccaagcctgaggtaaggtaagttcataaaacagatttccctcgaaataaagatccaccgtatcaatcattccctccgggcgaataggagtggccgatgttcctaatatataggcctgcggattggattcaattacctcctgcaaagcagccccccatatttctgcaccgaaatgatgaaactcatcaatcaaaatatgatctgctttgagttgtttatcattttttcgataatatatcaatgactgaaacgttcgatagcagatataaggagaggtaaagcctaccgcctttttgatctcctccaggattgtgacatttggagcaaatacgcaaattcgttctgtggcatggtctgatatataacgagccagcagatatgactttcccgtcccggtcgcttgcacaacggtaccgatacgatgctgttcaaagccttttataatagcacgataagctttctcgttatgcgggtaaagttctacatgtctgccggaattaaggcttctgaggtagttgtcgtcagaaacagtcaaaccatgcaactcataagccaacgcctctttcagaaatccaccatgagctacaatccgaaaataaagactccctttaccttgggttaatactgtaaactcctcataatatctctcaacgtccgttcgggtcaaggggcgaatattccaaacttctttcgcaataaaatgtaccattcccggcttgaatccgacccataggaagccgtccgattctattacgtgataagtaagttttcgataataaaccgataacgaagaaaccatgttatacaatcaatgttttcaagatatcaaaagaacaaaaagtgatgtaccagacgcagtttgttccaacacttcttgttctttcttcattcccatacgaaatagcataagataaattcttaatggattaacaccggaatattttgatactatccactgaacatttgcatttttggaatgcaatataaattttgattctcccataaactcgattttcataatcaatggaagaatcataaaagcccttaccttttataattctgaattttgtgtaagatatttaatcgaatttgattatctggaagttctcgccaaactttgtatctacttttgccaattccaatcaaacaattccacatcatcttcaagaagatcgcttccggtttgcgtttctatcagggtcaagtcatttatggcttttagaccgtggcgcatatcttgaaggatacaaacagtatctccccgtttagctggggtaatttttccttctatagccaacattccctctccgtcaacaactgtccatacctctttccgtagatgatgagcttgatatgtgagactttttcctgcctttataatcaattgcttcgtcaacgactgaaagccatctgaatattgaacattatgaataatcttgtattctccccaatgtctttcctcatacattggacaacactgtagccggtctgcatatttttttatgttctcgctcttgctcttttcggaaattaaaataccgtcattcgatgctgcaatcaccaaatctttggttcctatacacataatcggaagatccaattcattaatgatatgtgtattttccgcctctccatctgtgataacattacctattacatggtcttccaactcatctgtaagtgtattccaagtccctaaatctttccatttgccagagaaaggaactactgctaccaatttggccttttctgccacctcataatcgaaactgattttggggaattcactatatctgttacggatttccgaaaaagaaacagcccggatatattgctccataatattcatcatatatcccaacttaaaagcaaatacgccaccgttccaaaatgcattttcttttataagatattccgctgtagctacattcggtttttccgtaaaccgtttgaccgaaaagattccacctttcagtttcgattcatcaggcactacatatccatatttaacagatggataggttggagtaatccccataagaaccagctcagctacattgtcatccaccgcatgtaccatctgctcaataactttgaaatatcctgcttccgtaaaaggatcacaaggcataacaacaactacttcttcatcggcacatgatttctcatatttcagatatgaagcagccaaagcaatggctggaaatgtatcacgtctttctggctccaccactacatcaatgtattcacccagctgattgtaaataacatcagcctgagacaagctggtagccacggttacatgaccttttaaatcggattctcccaattgacgaataacccgttgtaccattgactctttttgactatcgggagaattgagtaattttataaactgtttggaacggctgttatttgacagaggccaaaggcgtttcccagagcctccggataataaaagaatttgcataaataatgttttaaatcgttacctttctgcccgcatgggattatgcaggaaatcattataagccaatcggataccatcttccaattctgtttggtaagaccaccccaaagccaaagctttcgatacatccaaaagctttcggggtgtgccgttcggacgtgacatatcccacttgatttcgcctgtaaatcctacaaccttagccaccaattctgtaagatctttaatggtcaattctttaccggttcctgcattcacagtttcattccccgaatagttgttcatcaagaacacgcacagattagccaaatcatctacatatagaaactcccggagcgggctgccgtcaccccagcaagtcacttcatccagacccgcctctttcgcctcatggaaacggcgaatcaaagcaggaagtacatgactatgttcgggatgatagttgtcattgggaccatagaggttagtcggcatcacgctgatgaagtctgtgccatactgtcggttcaaaaattcgcaatacttcaaccccgatattttagccaaggcatacgcttcattcgttttctccagttctgatgtcagtaaacaagattccggcatgggctgaggggctaaacgcgggtagatacatgaagaacctaagaactccaattttttacatccgttcttccaagctgcgtgaatcacgttcatctccagtatcatgttgtcatacatgaaatcagccaatgcagattggttggcaatgatgccacctactttggcagcagccaaaaagacatattccggtttttcttccgcaaaaaacttttccacagcttcttgccgtgtcaaatccaattctgcatgagtacgagtggtaatattcatatacccttgccgatgcaactcacggacaatggcagaacccaccattccacggtgtcctgccacatatatttttgcgttcttatccatcattttacaatccctttctccaggtattcagctaagttgatatgcattacactggctacatgctccgctgccaccttccgcatatcatgtgcgaccataattttcaccagttcctcgaaagaagtagattgcggattccaacccaattcattcttagctttcgtaggatcgccccacaaattaacaacatccgtaggacgatagaaatcttcactgacagctaccagtacttttcctgttttcacatcaatacctttctcttctataccttcaccttcccaacgcagttcaatgccggcatagtggaatgccaatgtcgcaaattcacgaacggtatgctgtacacctgttgcaataacgaaatcctgcggtttgtcctgttgaagaatcaaccacatacattctacataatctttagcatatccccaatcacgtagggaatccagattacccaaatacagacaatcctgtttcccttgtgcaatacgggaagcagccaatgtaatcttgcgcgttacaaaggtttcgcctctgcgttccgattcatggttgaacaggatacccgagcagcagaacatattataagcctcgcggtactcttttacaatccaaaaaccataaagtttagcgatagcataaggactataaggatgaaacggtgtattttcattttgaggaacttcttctaccttgccataaagttcagaagtagaagcttgataaatcttacaagttttctccaaatgattggtacgaaccgcctctaatatacgaagcactcccaccgcatcgacctcggctgtatactcaggcgcatcaaatgacacctgtacatggctttgagcagccaagttgtaaatctcagtaggctgtactttacccactaatttcactaaagacatagagtcccccatatccgcatagtgcaagtgaaaatgaggtttcccttctaaatgagcaatacgttcccgataatcaactgatgaacgacggataataccatgaacatcataccctttctccaatagaaactccgcaagaaacgaaccgtcttgcccagtaatacctgtgattaatgctgttttcatctcgtcttatttccttttgttgtttttgttaataatatttcatgaatcttgtaaatataccttaatgattccaaaaagatattactgtatataccattacgtttaaatgccttttgatgatcggatataatttgtttatggctggtaaatccactggtagaagcacctcctgtacgcatggttacaaaatccatcgggatatatgttgtccgtattttatgtacgaaaataaaccgtaaaagacattcaaaatcggaggcaatcttataagacaaatcaaagcctccatatttgtcatatataattttacgacaatagaaactggggtgggcaggcataaatccaagtcgcatccaactacgtcggaaagtccttgacgaataataacgtacacatcgtttcaaatcattatcatgtacaaaatgtatgtcgccatacacagcatctataattttattatccagtgctttggatactttttcaaggactttttcgtttgtataaaaatcatcactattgagtatcccaacaatatctccagttgccattttaagccccttgttcatggcatcatacaaccctttatcttgctcgcttacataacgtaaacgcccgtgatattgcggttccaactcccgtacaatttccattgtgttatccaaagagccaccatccacaatgatatgttctatatctggataagtttgcgacagaacgctttccattgtgtcacgcaaagtcgcaccgctattccaagtagcagtgataatactgattttcatactaaaaagttaggaaagttatgattcggatataatccttttggttacaaaggtggcaggattgccacgatagacggaatatgatgcaagatctttggatgctactgaaccgacagacaatacgctgtgcgaggacatagttacgccaggacaaacggtagacttagcacctacccatgctccgttttctataacaataggtttaacaatcaagtcaaatgttggaagtttgtaattatgatttccacatagaagcattgctccctggcttatgcagacattagaaccgatggttacttgaactaaattgtctatccatacattttctccaatccaagagtaatcacctatagataaattccatggatacttgatatttaccgatggcttaattacaactcctttgcctatatttgctccaaaaatccgtagtagtcttacctttagccccgatgatgggttccaactacaattcagaaaaaagacattgataaaataccaaacgacaactttcaatcgtctggctccaatgtggaaccatgaattatcatacttggaaagatctgtttgtaccattcttattataattgaaacatattcagataacgttttcgggtttcgtcattgctaagatatgcactgataaaagctataacacaacttctcatctgcaaatattcatcactgcccacacgtgaaaggtggtctataaccagtgcatatagactttcatctaacggcaagtcccagccaatattctttttctccaaacccagccatggtgttttgttactaatcacaaccggacatccgttcataaaactctctaaaatggcatgaccatagttttcaccggtagaaggaagatacagagcatgataatgggtgtatattttctgcatgtcgtgaggagaaacacaacctttatattcgacagtaacattcgttggcaattcggctattgccttttgacattcctgccaatagatttctgaatttatctgcccatagatatgatacacaactttctctttacattttctcaatgcttttaatgcaaacaatgtgtttttctccgacgatatacgtgcaaaactcactaatcggacctcaccctttaccttgacacatccatttgcctgcaagtccattttacggggaagattttcggctacatccacaatgtttttcttggatatagcggattgtatatattccttctcctcttcattcgtggcgtgaaaaatgacattcctgtaaagatttacaatcttagctaaagtcaaaaagatctttttacttactgatttcacagccaaagcatgaggagacaacatacctctggcacaaacgatcaccttcttaggttttagaatcttcgcaagcaacaacggatataggctataataccgtgaatatataccattgatgtaccaaacatcgcaagcagcttcctcaacagcctttttcaagacgttccacgataaacaagacggattgatatatatgacctttgctccttgccaatcaacccacttattttcctgaatatttttatagggtgccgttgcatgatagtcgaaactgcttgttatgacataaaaatccaatttatccgacaggtgctccactatatttacattggatgtaatcggacctcccgccttatatcccggagcaaaccaatcaatgaaaatcaatactttactcatcactcaattctttataaacttcgttgtatttttcagcaattgctttcggagaaaaacgttctatattcttcaatccctttgccaccaattcctccctgtattcgtcatgctctatcactttgacaaagccacttctgatactatcaacgctatatggatttacaaaacaagctgcatcattagccacttcatgcaatacaggaatatctccggcaataatcggtctgccagctgcatttgcctccaatatcggcactccaaatccttcataaacggaagggaaactcactatatcacatctttgatagcattggattatctcttcatagctaacatcataatggttttcataatcgatagtagaactttccaataacaacaattgcttctcgctcattttacccacaatgatcaacaagcaatccattcccttcaacgcttctaccacacgttcaagatttttgttgggctttgtacccatgtgaagaataacagggctgctatcccttattttttttacataccctattgtcggattaaaagcattgtgtatgacaagtatcttattctttgcaaagggaatgatttttgaaagctcgttttttgtaaattctgaaattacagtgatacgccttaccgtcaatgccggcagccaaaaccaaaacaatttgacatataagcgtttcagaggattattgatttgcattgccgattgcacatcgtgaacggttaagacagtgtttctccccagccctaaagctatataatgagcatcacctgttatatgattaatcttcgctttgttccgataggcaaaaagaatattcttaaataatactttaggagatgccccttcgcagggtaattgaatagaagtatgcaatggcaataggctctcaattgttgaaaacaccatttcaatactgttgaccccttcgcgtttctttcgaaaaaaatatgttatcattattcaccaaaatatatatcatcgtcttctttttcaactattggttgcaactgcataaccaaatggcgcagtaaataaattacaacccctacaaatagtactgattttactgtccaattcagaactgacatcatgcttatttcagctttaatcaaattgaaacaaataatgggaaggaacataatccacaaaaaatccttcatggacaatctatctatgaaagatataaacttggctataaataccccccaaatgaacatgaaaacagcccctcctaaaagaccgaaatttccgtaagattcacctaaaatgcttaatcccattgatgtccctcttgataaatgataacctgtcatttctataaaatcttcccttgactgtgcacctgcaccttttttgtttggaaataaaaatcgaggtaaaatagcagaattaagagcatccacataagttcgtcctcccaagaaatcatgattttgcggaatattgttatatatacgactgattatccatccttgattgtaccgagcaatagttgtttcttctttttccgaccggacttcatttatatttatggcattattaaccagtaaagagaagaataattccactttacttcctgtgtaaccattgtaccatatagcttggcgataagaagcttttactgtttgcaataaaaaaatacccacaaatgacatgataaaaataaatatcctttttttaagtagaacttcattaacattaaaccatgtcataatcataaaaatgccccaaattagcagttcgtgaaacattcctgcccgaatactatttaacaattgtatgcctaatccaagcaacaaatacattgtagatttttcgggattcacatacattcgtataataaagccaataaaaaaaagataagaagccaatgttttaataaacaataatgcggaaattgatgcaggtaaaaaaataaataacaggccgatacatataagtatagtactcagtttttcagcagtactacaacattttattaaatctatcctgcttagtagcaacgaaggtctgaatgcatagtagcctatcataaatgcaatatacataggaactgtgtacatcatatattcgttacaaggctgtgacatactatacacattattttctgtcatatatgagaaaaatggagaaattacccactgtagtccacctaataacaaagccaattctcctatgggcaaccaaacttttttttgggtaataaagtcatatacaacaaatccgacagcaccaacacccaaacttccgaagatacctccttgagtgtaagcccaacatacgcatataattataataagataaccgagtcccttatctattgtcattccattcaatttaaaaatttattcatacaagtattagccttgttgcatatccaaaaattgcataaacgactcatacaccccttcactaaacctgtcatacgacgagttatcaacctctctgggcgatagctctacattagggaataagccttgagtaatatccatttctacaatctgcggagcaaatacactcttatccatttcgtggagaagagtcatttctttaggataccacacatccaagccacttatcaagtattcatagaatttattagtttcgcaatattttacattcattgtcttagctttataaagtaaaacccccacatcgtatcgatcaaacaaatcaggtatctctgagtattttacaccctctttgtgaaattcaatatacggacatcgaagtttctctatggcatcaagcgtattcttatggaaattgaatgaatagatatcaaattggaccttgccttgttgtttcgcaatccattggcagaattccaatacgtaagtatccgtcaaagataatgaacccacatacacacacttcacaatctcattggcatgcagtttacgctttctgaaccaactggcaggcggataattgggcaaaatgcggcaaacaccttcggacaattgcggctcatcattcataaagagttctttccggtattggttggtttgagaaacccatgttgccacgtgatataaataagaagtttcgagcgaatgattcagttttgacagcctcatccccgtccgacagtactcggcaggcgtcatgtattcgtgatagtggatgcagagttttaccttacgaccaacaaatcgcttatagagataggctgggaaagccgaaatcgactcataataaagcactgcgtcaggcttatatcgtataagctgatatagcgtaaataagctaaagaagatatactgaaccaagacaaaaagggagcttctctttttgttctccttaaatcgacgataaatctttgcctttttattaccatatgcatccaacgaattagacttctgcaatgtcgatacccttatctccactttttctcccagcgagtctatcagattcatcaccggggggaaataatctattggataataatgtataacgaacagtttattcatagaatattttctctaattttcgggtatatatttgcggactacagaccaccttcatcctttcttttgctttttggtaatcattgacaaacctatttggctgttcaactaatctattgatttgttggcagaaagatacctcccaacctgtttcatagggaatcatgtaatctgtaattccaaactgctgtgccaactccccaatacctccagtattgaaaccgaaaaaaggtattccaaaatcaagggcttccatcacaatacgccctaaggcttctaccttattgaaatgaagcaatacatctattgactgatatatctgtttcttatcattaacaaacccatgaaacttacaatttatatttttataggttccagcttttacaacaaaatctttcacttcagaaatatgattatctattccgccaaaaaaatggaattctaaatgcactttggtctgattattttcacaatagttacagaagtgcgaaatatcatacaagcccttcgttgtggtaagacgccccacaatacccaatcgtactatatcattttctatacgaaactctttgataccggcaatgccagatgatggcttgtaaatgtcatacatcgtatagcattgtattcctgtgttttgctttacctctttcgtaatatagtctgaaatagaaatataagaaacgtttttatgcatttttctcaatcttgcagccgagcaatcctccaaaagacgtatgtgaacataaaagtttttattggggaataagctggcaagcaaatttaaatatttgatatgcccaccctcattgatataaatcccatcaaactctccgcatagtaacatccaagctaaatgcaaatacaatttctttactgatgtaaataaatgcggagtatgaacacctggattttttattttatcgtaaaaagtaccctcaggcacatatatgacatacttgtgttgcgtggtgcagaggaagtcgaacaatacctgctcgcttccataaaacttacccgaaggactaatgattgctattcgtttcatatattgatttgatcaactttttcaagtagatatagaaaattgataataacaagctctctagaaagattatacctgttttgaataagggataatcatcaagattactcactaaaagatattgtcccacaaatatgtggaggatgtatatagagggagaatatacgctaccgattttcacggcaatcgtattttcacctattgatggatttttgactgccagacaaattaagcaaactgacattggtatactaaatatgtatatttcgctaacgatttcccccccccatataaatttatgtgataaaaattcaaaagaacaaagcattaaagaaaataatgtaaaaacaatcagttgagtgtctgtgaaaagactttttattttctcttcatactccctgataagcattcctatggatatacaaggcagcccctcaaacaaccagttgcggtaataacagtttggataacgtagatatcttaacagaaaaaaagcaagaagcaacaagggaatagcataatatagataatgcgtttttttctttctggtcagaaaatagataataagaaggtcatatgctaatgcgtagaaataccaaagatgaatctgaaacagatcaagatcaaacagggtataaaccgctattgtctttaaattaaacttcgaatcaaaccaattatcaaaagtcccaaagtagattgccgaggaaaaagagagaaacccataaaacaaagaagcagaaatcgtcatgatcaaaattttcctgaaatgcttacggaattttgaaattgctgagaaagtaacgaaataatagccggttatcataaagaacagagggaccgctattctggaaattggattaatccaataaggtccgtaatggatggctactaccaaaaaagcagccacgcatttcagcacatcaaaactactttgtcggatatgagcaggatgggatattaaagataatttacaatcttccataagttaaagcactttgattttttctagcaggtttcgaatgattgattcataatcaaacccaccggtctgtactttatgatagcctttctctacaagagtttttagctcctgcgaatgcccattatagtattttatctttgctatcaaatcctcaataccgtcgtaatagattacctcatcttcggaaaagaatccttcaatctcatcatttcgttcggtaagcaaagctgtcttgcaagccggaatctcgaatgtacgagtggtatgtttctcaggaatccatttagaaacagaaccccaagcatacaagcaaccactgagtgcacgaacataatcttcgccaaatacaccatgtcccaaataattcagacagggggaagggtaagatttgacaaacttatcccaacctattccggccagcgtcacatctattccactttgtaacagctttactataggcatccttctttcttcttcgtaatgtccgataaaagcgactccttttttcttctcccattctacgagtggacggtgtaatgccttatcaaaaccttgagttgcatatagaactttatccttactgcccataattctaatgaagtcttccatttcaaaactttttgtagtgatcatgtaatcatacaaaggcatgctctcatagaacaaatccgaacgatggaatgaaaatgcagggtcaggcgtaaaatgcactaaggtagatgcatgctgtcgcaactgcaaagcagtttgctttttcaggtagatagccttatccacccatatcaaatcgtaatgtttatcttccaaattattcagcacataacgattgactttatttatcaaaggcccttttttataacgaaagccgatagactgccacacacgccacatcgcccgtttaggaatatccgtgtttatcacattcatattccaatcagaaagaatgcctttaagcttatcagctcgcatcttagaggtagatccctcgttgtatatacctatatatagtatgtgcttcattttatttcaaataattacaggaacaaatcataataatctgaatttcctttttattgaagttatagaaaataatattctgaaaccaatatatccaactattggtggatattgagccaatttagccttaaaaactaaaggtgatacttcttgttttaatattattttataatagtttacataaagtttattctttataatttctttgtattttttataaccttctataaacccaagacgacgcaaatacacgtaagtaccaagtatgtattgatggcaaaaaagaacatattctgattttaagctatatgcttgtatataatcagcaattttatttgctatagtcaaataggaatcaatatgtacgatttgcttttttgcagttgtaatagagttccctcttattatataattataagtagatttgcggactacataaaaattgtcagctcgtaatgacaacataaaactccacaaatcatcctcatgaattaaaccttcttcaaaatatagatgagcttttcttagaaaattggtattacacaatttattccatgccatcatataccatttatgattaagataagtttcgcgaacaacttcattacccatatattctccttcatccaaaaagagtgatggtgattctgatacaagccccattgtattaatctgacctaatacaaaatcataatggtaaaactcaagcggttttgacaaattatataaactatcttcaggtaaagtgtcatcactgtcaagaaataagatataatcacccatgcattcgcttaatcctgaatttcttgcaacagaaagccccctatttctttcatgtaccacaattttaaattcaacatccccactatattcctcaataaagtgtttggcaagttgcattgaattatcttgtccgtgatcatcaactaatatgcattcaacagaatgaactatttttttttggttgactatagaacttaaacaattcaatatatattcttctacgttatatattggaacaattatagatatcttcatgattctaattttatggtgtcaatatctgacaaccaagctttatacaaattcaagttctttccgtaagaattatcaattaaagtaaaaggtttacctaataaaacagataaaatagctacatgcaaacgcgaagtatagatgtaattatattgagaaataaacctgacagcctctttaactatatgcggtctcaaaattttatcagcatataaatctgtcagaccttgcaaaaggaaattacggcgattataaattcgataaaagttaatctgaacaaaatcatacgacatcattgtaggccaatcttgtatatccaaagtagtatcatctacatcaatcttcaaatgactgtaatctggcatttcggaatcttgtctttttacccaaagcactcgtccattattagacctctcaaactgtagaagatatttagaattaatacaaaacgccatatctggaagtaaatatacattcttgatgtttttatcctttacaagttcgcaacttggcatatctcttacacatatatgcaaatccggatgcttgaatagttctgtggcatctttttcccaattatccaattctttataatatattgattggggtaaaataattattcggtgattcttgtatttttggattacttttaatctaaacttttgatgtctatcccataaatccccccaatttccacctccttgcaataatatgattgtattttctctcaatttagggaatttaaaacattcttcagctgttttcatcaagcatttatatgaacattctttcaaaagacattctgtcccttcccatattaaagtatctccaggattactataatacggaatatcaagaaagatataatcattgttaatcaaaggtaataaagtgtcacacaacaatgctctcagttgagctactttttctgcactcgtcattttcttaacctattcattcttaaataccatcttcttaaaaaagttttcactctcctcatgtaggggatacataacgaaaataatctctcatattttacacgttcattctccccatttaatttttttgataaaaacgattctaattcttcattataccaagctgctattactcgatttctcaattctgcatacgaaggtgtagaaatttgaggtataactcccaacgacagaaaatgagaagaatttacacaataatctgcacagcaacaacctaatggcttaaaaactattggggcattcaagtcatgatatatattttgatgtattccttgtccataacaagctgtcattttacctgtatacaaatccaatgttgcagcccaactaccagcatagcaatatccgttctgctgtttattaaaattacgcaatgtaaattcaaacaacggagattccatttcacgccctttctttacatagttttcgactgtaccatcagtcattattctatacccaggataattttcctttctcgttaatgcaacttgaggtaacgccccaacacgttccaatgaaacagatttgatttcatcccaataaggaagatactcatcaactaaattgatttgcaaaacaaaagaacatcctgcagatctaactttgtctatattagaaaaaaaacgattaaccatattatgctttttaagctcaacataatgacagctaaaagaaatatttaaatgacgaagtaaatttttatcaaaatcaagtaattgttcaaaacgcttgtccaaggttccatttgtagtaatatttacataatttcctgtcttcaatatttcatgcacaatctgaacaactttttcttggattaatgtttctcccaacccagtaatacttatataacttacaccacctaacctatcaggcgaaagagcttttgctatataagatggagaatattgtgtatatatccgtttttttgattttcgagcttgttgttgcacataacaatatgaacatttaaaattgcaaaaactatctggaacaaggcattctataaatcgtttcatattcttttaattctttttataagcattgatttgatttgtgttttgtattctttatctataaacaaatagaaaaacaataaattacaaatcgtggataagaaagaaataaaaataaatcgagacaaggacttttccatattcgattgcataaacaggcatatcaacaaagctgttacaatcataagaaatgaggaacccaagacattttttaaataaaacaccctactaaaccctaatatttttttgataaaaaaaatccgagcaatgagtgttattattgatattcctatagctatttccaaagctacaaaagaatttgctcctaacttaaaagcgcaataagtaagaggtaaattaaacaaagataatccacttacaatcaactgataagctttaattttaccacttgcttgaatagcagtccctattgaataattgaaactttcaatccaagacaaaataataatcaacttacaaaacgttggcgtataaacaggatactcctttaaccaaatattcaaaacatattctatttctaatatcaatggcaatcctaatatggcgaccaaaaggaatgacaatttacctccccaatgtaccaacgtctctgtttcttgatattttccctgtgcaaaagtcttgaatatttgaggatttatagctgtagtaaaatttgcagaaaagttagttattgcgttattaacttgataggcaatcgcatttgcagcattcacaagaggaccaaaaaaaatattcaaaactatattgacacctgaattctttaaagcaatagataaagaacccaataaattccaaaacgaaaaagaagttatctgccttgctattactttatcaaatccttcttttatagaaaattcatcaaatcttttctttccatataataaataaaagacacataaagaaattgatatcaaaagattaagtaccccccacaaaatcagtttatcatataaccaaacaaacaacaaataagatgataataacttcgcaataacttcataaataccaatatatgcaaaaatattaaatctttcatgtgctataatggaagccgtcatcggtatatttattaaattaataaacataatcacaatggaacattgaaatataacattacaagcaaataatctatttgcaggaatagaaagaacctcatttactaaatatattcctataatctctgcaataaacattacaattacaccaagcagaaaatgcactttatatatcgtactaaataataatttagaatctgatatatcacctcttcctaatgtaattgtaataaaacgagatgatgatgtccccaaagcggaattaagaaaggttaccaaacctattattccagcaacaatattaaacagtccataatcttccagccctaatgcctgtatatttattctggatgtaaataaagatactcccataacaaacagcatacgaatatacaaaaggattgtattggatgctactttcttaatttttggcattgatctaacgattttatcttccacctgttaacaatttaatcaaccaagcatttctacttattatttcacccaaaacaaatgaaatagcatatgttacaaggcaagaaaaaagataaatgaatactgtttctatattattaatatcataaccaaaaggaagcattataacttttataacataggtcaaaaataaactatgacttgcaaacactataaatgtattcctcccccacttttccataaaatatgcctttttagaaataccaacaactgctaatgctgcacttccccccaacagaatatatgtagaatgtaataaattgtaaaaaagacttgttgtatctttttcaatcacagaataaagataagttataaccatacatacaattgtgatgactaataattccaaccatctttttttgattttatcgaaccaattacaatctatcatttgtaaatatatacctaaagaaaacattaataggcaagttatactaaaacctgggaaaatataccaagagattgttttggttgcatatataaaatagacagtacaaataaacaagaaacccatttttcgaagtataaaaattattactggagtcaaaagaaaaatgaccattaaatctctaagaaaccataatggaccatcccatggttgtgttaatactcctgtaatcccccccctaggtaaaaaccaaaatcctttaataaactcatatactgtataatctttatcaagcgaaaaggttataaaaaaaatcaaattccaaataatatatggcaataataatgttgtagactttttttcgagaagactgcgatatccatgccttctgattgaataaaagcacaacatacctgatattaaatagaaaagaggtacagctatatctgccaaag

SEQ ID NO: 264 - DNA, 11547 bp, unidentified
  source 1..11547: mol_type = unassigned DNA
aattattaattaaaaacttaaagttatgtctgaaattgcatcaagagtgaaagcgattatcgtcgacaaattaggcgttgaagaatcagaagttactaacgaagctagcttcactaacgatttaggagctgattctcttgacactgtagaacttatcatggaattcgaaaaggaattcggtatctctattccggatgaccaagctgaaaagattggtactgtaggcgacgccgtttcttacatcgaagaacacgctaagtaatcctatccatcaatttaatatggaattaaaaagagttgtagtaacaggtctcggcgccattacccctattggcaacaatgtttccgatttttgggaaaaccttgtgaatggggttagtggagcaggacctattactcatttcgatgcttcccttttcaagacccaatttgcctgcgaagtgaaaaacttcgaagctaccaaatatatcgaccgcaaagaagcccgtaagatggacttgtatacacaatatgccatcgccgtcgcaaaagaagcggtcactgattccggtcttgacatcgaaaatgaggatttaaacagaattggtgtcatctttggcgccggtatcggtggtatccgtacattcgaggaagaggtaggtaactatgccttgaccggcaaagaaaacggtcctaagttcaatccgttcttcatccccaagatgatctcggatattgctgccggacagatttctattatgtatggttttcacggtcccaactatgcaacttgttctgcatgcgctacttccacgaacgctattgctgacgccttcaacctgattcgtctgggcaaggctaacgttattgtgagtggtggttcggaagctgcaatcaccgttggcggtgtaggcggtttcaatgctatgcacgcattatcaacacgcaatgaatctcctacaactgcatctcgtccgttcagcgcaagccgtgacggtttcgtgatgggtgaaggtggtggttgtctggttcttgaagagctggaacacgccaaagcacgtggtgctaagatttatgcagaagttgccggtgtaggaatgtctgccgacgctcaccatctgaccgcttctcatccggaaggacttggagccaagttagtgatgagaaatgcgttggaagatgccgagatgagccccgaggaagtagattatatcaatgtacacggtacttctactcctgtaggtgatatatcggaagctaaagctattaaagaagtatttggtcaacatgcatttgaattgaacatcagttcaacaaaatccatgactggtcacttgctgggcgccgccggtgcggtagaagccatcgcaagtattcttgcgatcaagaatggcatcgtacctccgactatcaaccacgaagagggtgataacgacgaaaacatcgactatgaccttaaccttacgttcaacaaagctcaaaaacgcgaagtgaacgtagctctgtccaatacatttggatttggcggtcataatgcatgtgttatttttaagaaatacgcagaataatcagtcgtgttacgtaatcaaatagacaaaataaggctcttattccgtaaggacaaagagtcttatttttgtttttataagattctggggttctatccccgcaacattcagctctaccaacaggctttgttgcacaaatccacctccatccgctctgaaaagggacgccctttgaataatgaacgactggagttcctgggtgacgccattcttgacgccatcgtgggagatattgtctataagcatttcgaaggccgtcgcgaaggttttctcacaaatacacgttccaaaatcgtgcaacgggaaactctgaataagttggcagtagaaataggcctggacaagctggtaaaatattccacccgttcttcctcgcacaatagttatatgtacggaaatgctttcgaagcatttatcggtgccatctatttggatcagggctacgagcgctgcaagcggttcatggaagaaaagatattcaagaattacattgacctcgacaagatgtcgcgcaaagaggtcaacttcaaatcaaagctgattgaatggagccaaaaaagcaaagttgaggtttcatttgaacttatcgagcaattccttgatgaagattataaccccatgtttcataccgaaatccgcatagaaggtatttcggccgggaaaggaaccggatactctaaaaaggagtctcagcagaatgccgcacaagctgccctgaagaaaataaagaatgatgcttcattcaaagaacaaatagaagccacaaaagcgcagaatcatttgcctgagaatacagaagaaacagatgaactcacagaggagactctgattgaagaaaatcttgaaacgattctgcctgtagaaaatcctgagacggacgaatgtaagggcgaatagccttcgcccacatcattatcagccgaaacaaattcccatccggcgcccttgaacaaccagatcattatcttctgtcaccagtttcaactttccggctatttcctccagtggtgcagaagaaatctcatcccctttcaacgtaatcatccggccaaactgttctgttgcaatcagttccgtagcatgcccacccatgcgggtagacaggttccgatcgaaaggtgtaggcgaacctccccgctggatatagccaagcacagtttcgcgggtttcaatgccagtttcatactctatctcctgggcaatgtattcagcggcacgtttccggccatccgtctgtattccttcggcaaccaccacgatggaataaggttttcctttcttcagtcggttcagaatagtctcaccaatattatggatattataaggaatttcgggtatcaagataacatcaccgccacctgccatacctgaatacagtgcaatccagccggccttatgccccattacctcgatcaccatcacccgtttgtgcgaactggcagtagagtgcaggcggtcaatggcatccgtagcaatacttacagccgaatcaaatccgaaggagaaatccgttccccagatatcattgtcgatagtcttaggcacagacacgatgttcaatcccatggcagccagtttggcagcagtcttctgcgtaccgttaccaccgatacaaaccacacaatccaatcctaattccttgatattctgttctatcaatgccggtttattgacatcggatatcacaccgttcttcttgaaaggtttctcgcgggaagtgccgagcattgtgccgccctgattcaacaaaccggacaaagatttatcagtaaacgactccacatccttggtaagcaacccctgaaagccactatgaatgcccacaacttccatcccgtaatgattgattgcagttttgcacactccacgaatggtggcattgatgccgggacaatcgccccccgaagtcaaaataccgattctcatgacacttttgtttgaattattgttctttaggtccgtaaagatagaaaaaaaagagaaaaaagatagagaagccgataaataagattatttttgcgcaacaaaatagttttaactaagagagatgaatatcacaacattgctggataaggtgtattttgcccctcgcctgaaaaaaatcgacttctatgctaaccgcgcaggagaacttcaacaccgagttcttgaccgcttagtgcgcatggcagaaaatacagaatggggaaagaaatatgattataaaagcattcatacttatgaagactttagaaacagactacccatacagacttacgaagaggtaaagccgtatgtggaacgcctacgtgcaggagaacaaaacctgctttggccttcggagatacgttggtttgccaagtcctcgggcacaacgaacgataaaagtaagttcctgcccgtcagcaaagagtcgctgaatgatactcattaccaaggtggcaaagatgcagtcgccctctatctgggtcagaatcctgacagccgctttttctccggacaaggtttgattttaggtggaagccacagccccaacctcaactccaggcacgggcttgtaggcgatctttctgctatcctgatacaaaatatacatccgttagtgaactgcgtccgtgttccgagcaagaaaattgctcttatgagcgactttgaaaagaagatagaagcaatcgccaacagtgccgtatcaaaagatgtaacgagcctttcgggcgttccttcatggatgttagtactcattaagcgtatccttgaaaagaccggtaaacaatcgctggaagaaatatggcccaatctggaagtcttcttccatggtggtgttgctttcaccccttaccgtgaacaatataaagaagtgatccgatcacccaaaatgcattatgtagaaacgtacaatgcctccgaagggtatttcggtacgcaaaacgatccgaatgatccgtccatgctgttgatgatcgactacggtatattctatgagttcatcccattggaagatgtaggtaaagagaatccccgcatctactgcctggaagaagtggaagtggacaagaattatgcattggttatctctacttctgcgggtttgtggcgctatatgattggagacaccgtgaagttcacgcaaaaggatccatataaattcgtcatcaccggacgtaccaagcatttcatcaatgctttcggtgaagaattgattgtggataacgcggaaaaaggtttggcaagggcttgcgaggctaccggagcattgatttccgattattcggctgctcctgtatttatggatgccaatgctaaatgccgtcaccaatggttgattgagtttgtacaggcaccggacagtatagagaattttgccaaaatactggatgatacactgaaagaagtgaattccgattatgaagcaaaacgacagaagaacattgccctgcaacctctggaggtgattgttgcccgcaaagacctattccatgactggctggcacaaaaaggaaagttgggtggacaacacaaagttccgcgtctcagcaatacaagggaatatatcgaggaaatgctggaactgaacaactgattcctgcaatagcataggacaatacgataataaataagaaaggccgcatcagacaaaaccgatgcggccttttccatttttgttccatgccttgaaactcacagtttcattacttgaaaccaacagtttcatgccttgaaactgcaagtttcacgccgagaaaccagtagtttcacaccgagaaactaacagtcatcccagactatcagaaattataagccaatccgatgcccagtatctccttgaactgtaccttcggccctctttcaacgccctcatcattaaaggttttcacatcattatcatacttcagtgtcatattcagggttgctgatagcactttattgatcttcatactgatgagcacatcccagttgacatccacattaccaaagtctttattataaggagtgaagaaatcggctgtagtaatcagattcacattttccatgacaggcagctctgcacgggctttcaggaaagctccggcttcgatcttaaagtgatcccccggatcaacaccgaaagaacctaaatcagaaagataatcatcgctcacaaaggtcatctttgtggagacaggtgaaaggaatatagaataattactcttcggacgatattccatacccaatgccacattagaataggcgggagcaaagaagttagatatatagtgactcttgtccggataattatatcctttggcaaactgagtattcaagtcagccataagcgtataataccaaactttagtggctgcatagcccaactgggtagataatcctattttatcagaactctttctcatcccttgcgatttggttttcgaaagaccataatccagcaccaggttcgtcacccatagccagtttccgctcttatgtgtcagtgacccattcaggtaagcattcccggcaatagaattctcaccaccggccgaccagtttgtcattgcagtttgcgacatatttatacctgtcacacccttcagtacccaagctccttctttatatcccttatcgtccgtttgggcagagacgattgttgccaaagtggcaaatagtatcattaaatatatacgtttcatactgttattcgttttaattgttccgcaaaacaaagacgtctttgtatttcaaacagagtaaactatttttttgttcagaaacaaataaaagaatgattgtatggaaattacaggatgatacctcctcccagcaacagacctgcctcatcgtaaaatgccgcagcctgtccggaagcaatggattccagtggttcgcgcaatagcacatgcaagagattctcatccgttatactgacagtgcagtgattagcttgcttccgatagcgaatcctgacaatgacatcctcggaattcagtaaacgggaagtatccacaatattccagtctttcaacagcatttcctctttgtaaagagaagccagaggcgcaagtatcacttcgttcctctctttatgtatctcttttacgaaaacaggacggttcagatgaatacccaatcctctgcgctgaccaatcgtatagaaaggatatccttcgtgccaacctaaaaaagtcccgctttcatcgagaaattgtccttttcccggcaaagcgttctgcggaacttcacgctgcaagaaagagcggtaatccatcgggcagaagcatacaccaagactatcctttttggttgctgtccgttcaaagccccgcttagcagcataggcacgcacttcatttttagtccagtcacccattggaaggagcatacgttctaaaatgttctgttgcagtccccagaggaagaaagtctgatccttatcacggtcggcagccggggctataaagtaatagccatcccggaaaactttacgtacgtagtgtccggtagaaatccaataaatgcccatttcatcggcaatctttgccagcaacggccatttcagttcattgttacagagagtacagggaacaggggtatgggcggaaagatattcatctacgaaatagcggataatgcgttcacggaataattcgcgggcatcatagatgatgtgcgggatattcaggcgggaagcgagattacgggcatcatccaaagattcttcaaagccttccgaatcatagaaacgaaacgttacaccggttacttcataaccgacctcttgcaacagcatggcggcaacagaactatccgtacctccactcatacctaacaatacacgcttcttcgatttcatggatgcaaaagtaacaaaggaaaaagaaaatcactacatttgctacctttaaaaacaacaacgccaatgaactactatatctgtgatgatatcacctggaagaaatccctctcactactaaaaaatgacatggaagggcaacgtgtctattccagcctctggcagatgacacgagacgtactgatgctttcactcagccttagcgctatggcaagtctcgccatattagtattcggactcataaggttcataatcgataccctgtccgggactacagaacagacaatgaccctgttcgatgtaatcatcttctcaatgacttgtccggcaacatttgttgtccccctcacttgggtattagcttatttcggatggtataaaaatctccgaaagatcaattcccttttacaaaagttcatagcctctctttccgagacagagaatgtcaaacgtacttctccggtatcttatactttccgctaccatcaaaaagagtttcatgcactattcgaagaaaaggaaaattcgacaaccgtggcagtagcaaaaggcgatctcatactcctattgccttatcaagatacgcaacaacgaactacagatgaactatttgaagaaataaaaggtttccttatagggaaacaattcgcttcctttgccatggggccgaaatatatgctgttcgcattcaatagccgccctgcacccgctcagacagaggtaaaacagtccgcagagatgctactctacctaacagaacgttttcaactacaggaccccatccctgaagaagaggaagaataagttcatccgatagtcacttccctcttaactatcagcaagaaaaagaatgaaagaacttattatcttatgaaattgttgtaactttgtgctctttaaagaactaaaattcaaacgttatggaacatcaactgacaatttacaacaccttagataggaaaaaggagctattcgtgccactgcacgctccacatgtaggtatgtatgtctgcggtcctaccgtttacggtgacgcgcacttgggacatgcacgtcctgccattactttcgacttgcttttccgctaccttacccatttgggatataaggtacgttatgtccgcaacatcaccgatgtaggccatctggaacatgacgctgacgacggagaagacaaaatagccaagaaagcacgactggaacaattggagccgatggaagtagcgcaatactacatcaaccgttaccacaaggcaatggaagcgctgaacgtactttcacccagtatcgaaccgcacgcttcgggacacatcatcgagcagatagagctggtgaaagagatcctgaagaatggctatgcttatgtcagtgaaggctctgtctactttgacgtagagaaatacaataaggattaccattacggaaaactctccggccgcaatctggatgacgtgctgaacaccacccgcgaactggacggacaagcagaaaagcataaccccgccgactttgccttatggaaatgtgcccaaccggagcatatcatgcgttggccctctccatggagcgacggtttcccgggatggcatgccgaatgtacggccatgggtaagaaatacctcggcgaacatttcgatattcacggtggtggtatggaccttatcttccctcaccacgaatgtgagattgctcaatcggttgcatcacagggcaatgacatggtacattactggatgcacaacaatatgattaccatcaacggacagaagatgggtaagtcttacggtaacttcatcaatctggacgagttcttcaacggcacacataagttgctgacacaagcatacagtccgatgaccatccgcttcttcatcttgcaagctcactatcgcagcacggtagacttcagcaacgaagccttgcaagcagcggaaaagggattaacccgaatgatggatgccgtgaacggactggaaaagatcactccgtccgccacttccagcgtagatgtgaaagcagtgcgtgaaaagtgctatgaagccatgaatgatgacttgaataccccgatagtcattgctcatcttttcgacggagccagaatgattaacaacatcattgcaggcaacgataccatcactgccgatgatctgaaagagctgaaagaaactttccatctcttctgcttcgacattttgggactgaaagaagaaaacaattccaatgaagaacgtgaaattgctttcggtaaagtagtagatatgttactggaagagcgcatgaaggccaaagccaataaagactgggctaccagtgataagattcgcaatgaacttacagcactcggttttgagataaaagacggtaaagacggttgcgagtggaagctgaataaataagctccaccaccctataaaaaagctgcctccctctgatccaagcgaatcaagggaggcagtttcatttagaaaagagagttttagtaaggtatcatgtcggaaagaatacgttccttataccagggatcatctatcgccttcaactccttgcccatctcacggcaaagttctgcaacgatttctttattttcttccaacggaagattattcatctgataagggtccttttcatcatcaaacaacaggcttttcttcagcttatggtctttcttatcaatatagaaagccaaagtatagcgtgccgtcttatatcctcttgaagaagggaaataagtctgcactttaccatccgcatccttttctccgtccagattctggatatacaaagcaccaccgggacgttcaatttccgccttttcatcgaagaaaagaggtgcccagttgcgtccctgcacattagacggaatggaatcgcccaaaccacacagccccaggacagtcggcataatatccggcgcggacattagaagattgtctacacgcggctggatatgaccgggataacgtaccaggaacggtatattcatagattcggaataaggagaattcttcggatcatccgtgaactggctacacattgtttcaccatggtcggaagcaaagatcacaatcgtattcttatccaaaccctgctctttcagtgtttcaaggatctgtccgaaagcacggtctacaccggtaacagaggcaaagtagtagcgaacgctctctgctttttcacgcttcttatctgcattgggacggataagaaggctgtccagaggttgatctttgtacagattgaaatcttcttccatacaatcatccaatgaacggtacgggctgtggggcggattcatacccaccattataaagaaaggtttcttcggatcacgtacattcccttcgttcttcagataggaaaccaccatcttggactcatgcaacggtgaccattctttcggatcgtgacgatttccatccgtatcccagtaacggggatttttatgttcatcaaaagtaccgtaggagtaccagtaattaaagccgtgacggcgttctttcggcgtataggcatcccaggcaggtatgcgatcttctacatagtgaccgggacgttgcggatcgttcggtgtagggaagtcagcgtgtaacttaccaaaataagcgcagtcatatccggatttattaaatacatcacctatacaatccacgtcggcacgcagggaactgataggccggtttgaattacagttcaaaggtattccgcttttattgggatacatccccgtcaacagcataccccgatgaggactactcaacggacagttactttgggcagaacttaacaccaacgcttcacgggcaaagctattcaagttaggagtatgcaccggatcattgcggaagttcaccttgtcgcgaaacccatcctgtccccagaactccatagcctgattacggtactggtcggggaagacataaataacattcggaagttgtgcctgctctccctgctgagttttgcagccttgcagggcaaacaggcccaagcctcccaaaaacaaactaaaccgatttatcattttattcttattaaattacgttgaaattataaatgggaatttatcggtgagatactgttgctatcacaccgaatggaaactttgccaggacgctacgcccctaaattatcatttatagtttcagcatgtgaattaaaacagcttcttgtttgattccaagtctcttttgcgca

SEQ ID NO: 265 - DNA, 18746 bp, unidentified
  source 1..18746: mol_type = unassigned DNA
gctcgcccagagagccgggctccttggtgcggtccagcacagccaccttcttggcggtcttgggcaggaccttcagcagggaagcggagacccagggacggtacaggcggaccttgacgataccgaccttctcgcccttggcgttcaggtagtcgatgacctcatcagcaacgtcgcagatggagcccatagccacgatcacacggtcagcatcgggtgcgccgtagtagttgaacagatcgtagttggtgcccagctttgcgttgatcttggccatgtacttctcaacaacagcaggcagagcgttgtaaacgctgttgcatgcctcacgatgctggaagaacacgtcgccgttctcgtgggagccgcgcatcttggggttctcggggttcagagccttcttacggaactcttccacagcctccatgttgcacatttccttcagatcggcgtaatcccacttctcgatcttctggtactcatgagaagtacggaagccatcgaagaagttcaggaagggaaccttgccctcgatggcgcacagatgtgcgacaggggacagatccatgacttcctgcacgctgctctcgaccagcattgcaaagccggtctggcggcatgccataacgtcgctgtgatcaccgaagatgttcagggactgggtagcaacggtacgtgcagaaacatcgaacacgcagggcagctgctcagcagcgatcttgtacatgttggggatcatcagcagcaggccctgagaagcggtgaaggtggtggtaacagcacctgcacccagagagccgtgcacagcgcctgcggcgcctgcctcagattccatctcgacaaccttgacctgattgccgaagatgttcttctggccggctgcagaccactggtccacagagtcagccatcggagaagacggggtaatggggtagatggcagccacgtccgtgtaggcatacgctacatgggcggcagcggtattgccatccatagtttgctttgctctaggcatttttcttcctccattattcagaatttggtaccttttgcgcggggcaatatgccccacatgggaccggagaaccccataaaggcactattgcttgtatactataataacaaattctgcccgcaaagtaaacgcaaaccgcccaacaaacgcaccaaaaataaagaaaattttttagctgttttgtacgtctttagtacggtaaagcaagcgttggtgcggatttttggttttagcctgcctgccttgccagatcctgtgatttttttcgcaaaaaggggatggaaaccctctcaggcaagcgtcctagccctctcaggcgctaacgcgccagctctcccaaagggagagcccttggcatagcggcaaagtttctggttgaattgcaaagttcgaggtttcgccagggcctctccctttgggagaggtggatttgcgaagcaaagacggagagggcgagcccgctaaaggtttctccgctctcttgtatttatcatctctttattgacaacaaaccgcactttgccgtaaactgagagcagaaaaccggcgctgtgccgggcagagagggtaaatacaatggaaaagaccacacattatgaaaagacacttaccagcgaggtcctctttgagggccgggtcatcaccctgaccaaggacactgctctgctggaaaacggcaagaccgccacccgtgaggtggtgcatcaccacggcggtgcgtgcatcctgccctattttgaggacggcaccatctgcatggtgcgccagttccgctacgccatgcagcaggagctgtgggagctgcccgccggcaagctggaaaagggcgaggacccctttgaagccgccaagcgggagctgggcgaggagtgcggcctgaccgccgacaattacatctctctgggccagttctaccccaccgtgggctacgataccgaggtcatctatacatgggtcgccaccggcctgcacaagacccagatgcatctggatgcggacgagttcctgacgccggaccgcgtgccgctggataaggcctatgaaatggtcatgagcggcgagatccgggacggcaagaccattgccggcatcctgaagctcaaggcgctgatcgctgagggcaagctgtgaacatcctgtacgaggatgcctccatcgtggtgctggacaagcccgcgggcctttccagtgaggagggcgttcccgcagcgctgcggcagcggtggaacgccccggacgcctttgtgggggtggtgcaccggctggacaccggtgtttccggcctgatggtgtttgcccgcacgcccggagctgcggccgcactcagccgtcagatcacccagagccagaacgcctacgctgtgcaggacggccgggccgagggcagggcagaagagccgcagttcatcaagcagtaccgcgccgtcattgcaggcgggccggacgaagcactgcccgccgaaggcaccctgcgggactggctgttcaaggacagccgccggggccgggtgttcccggtcagccgcccccgcaagggcgtgcgggaagccgttctggaataccgcatcctgaaaacagcagggaacacgagccttgcgggcatcactctgcacaccggccgcacccatcagatccgggtacagttcgctgcccggaagcatccgctctccggcgacggcaagtatggcagccgggtaaagggagacatcgctctgcagagctgcggcctgcagttccggcatccggataccggcaagcccctgcagttcagcctgcccctgccggacgccgcaccgtggaaagagtttttagaataagattgttgtatacggtcagcatcctagccctctccgtctttgcttcgcaaagccaccttgttccccttctggcactttgtgccacctcccccgaccgggggagtctgtcaaagggagaggccttggcatagagatacagtccgcgtggactgccaaaggctctccctttgggagagctgccgagcaaggcgaggctgagagggcgagcccgctaaaggaatacatcattttcattaggtgagaggtatggaacaatatagaaccgatgctgaaatttacgccgtgctgaagcgggagatcatcgatctgaccatccgccccggctccctgctgagcgaaaacccgctgtgcagccgctttgcggccccccgcagcatgatccgggtggttttgcagaagctgcaggaaaacgggctggtgaagatcgtgccttataagggcaccaccgtcacccggctgaaccgccgcatcgtggacgagctgatctacgagcgcaccgccgtggaggcccgcatcctgcgggattttgcgccccagtgcacccccgaacagcgggcgctcatccgcagacgggtggaggcctatgcggcccttgccgccacggaagagcccgattacaaccggctgtacgaggccgaccgcgccctgcacgggacatggtttgccgccatggacaagatgtatctgtggagcaccctgcagaacgcccacgccgactacagccgcttccggatgctggacaccatcaccagcggcggacttgcggaagtgatcgcagatcaccggagcctgctggatgccattgagcggtgcgaccttgccgcctttgagccgctggtggaaaagcacctttacggcggcatccggcggctgggctccaagctgaccgaggaatacgccgactactttgagccggaaaagtaattgttctatgtggaacattttataaaacaaaagggcacagcgcattgcagcgccgtgcccttttgttttatgctgtctgaatttcagaacaccccggaaataaagatctccagaccaatgccaatgaggattatgccgcccagaatggacgccttgccggaaagcttcgtgccgaactttttgccgatgcgcaggcccgccatgcagatgaagaaggtgaccaccgcaatgatgagcgatgccgccagagccatcagccagccgtactccgaaatggtaaagcccaccgaaagggcatcgatgctggtggcgacgccctgcatgagcagtgcaccggcgctgagctctgcggcttcttcggcttcctcgccccggatgccatccacaagcatcttgccgccgatgtagcccagcagtgccagcgcgatccacgggatgaatgtttcaaaggaagagaacatctccacgatggtgtgcacgcacacccagccggtcatgggcatgaccgcctgaaaaagggcaaaggtgcccgcaattctgcacatggtccccctgctcatgcgggggtcgtgcaggccgtttgccatcgacaccgaaaacgcatccattgcaaggcccacgcccagcagggcgctgttgaggaaaaatacaaagctccattccatattgtctgcctcctgaatctgaccagaatatcgggcaatacaaaacccggcctcgggcgcacctgcacgtccgaagccgggtcaatttttatcatcgactccatgtgcacgggcggcattctgcgcgccaaaaacacatgagtctcgcaaattaaagcaagccagaccgaaaccaccggccattgtgttgacttgctgcgccttctgcaaccggcgcttgctactcccccacgggtatttgtgattgttctgttattgtagcatatcccgcgccggaagtccagacaaaccgtggaaaccgtttttataaacaatcgccttcaggtcctgtttttccagcgggtctcaaaataccggtcctgcgaaaggataaagcacagggtattgcccagcgcctgcggggtgacggcatgctcctgccgcagtgcccggcgggcgcggcgctcatactcccgggcctgctgcatccggggcgttttccgctcctgtgccgtcaggtgggagcccacatcgatgagcgagtgcagcagcacccagtacagctcgcacagcgagccggtgacgccatggcggcgggcgcactcgaacaccgcatagtttgcctccacccggtcgagattgcgcagggtgactttgctgttcacgatgctgcccgccaccttgcggtagaggtacatcgcatccgggatgttggcgatcttttctgctttttcgtaggcgtaggcgatcagcagggtgtcctcgttcagtttgccctctgcaaagcgcagctgcgcaaagatgctgcggtgatacagcttgttccacaccaccatgtagggcagaagggtgctgtgctccaacgcctgctccggggtcagcacctcccgccgcacatgcagatactgctcccggatgggggtcagtgcttcgtccacctgccggtaattgcacacagccatctgtgcaccggcctcctgcgccgcatggtaaagctttgcacagaagtccggcgtgatggtgtcgtctgaatccacaaaggcgatccattcgccctctgccgcgtccagcccggcattgcgggccccgctcaggccacggtttttctggtggatgacccggatgcggctgtcctttgccgctgcggcatcgcacagggcagggcagccgtccggagagccgtcgtccaccaggatcagttcaaaatccgtgaaggtctgggcaaggatggaagcgatgcaggcgctcagaaaacgctctgtcttatataccggcacgatgatgctgatggttttcctgctttcgggccggatcgtgtgctgttctttcacggtaacttcctcatcatttcaggttctgcagttttgcctgccgttctctgcgcagttccagatactttgcaggcgattttgtgtaccggatcgtatccgagatcccccgcagggtgatggcccgggcctgccacagcttatgccgtgcgtcccgttcgtatcccatgcactccttcatccgggggcttctgcgctcctccggggtcaggtgccaccagatatccacaagggcggtcagcacggtgcggtaggcttcgcacagggtctctgcgttatgccggtacatgcccagaaacatctggtagcaggcttccacccggtccagtgtttttaccgaatagctgctgtgcatgatgctctccggcacctgccggtactgatacagtgactccgggatgctggccatcttctgcacccgctcatagatccggggtgcggtgtaggtgtcctcaaactttttgccctccggcaggcgcaggccgtcgaacagttcccgccggaaaagcttattgcacatggactgatacatgccgatgaccagccggttatagatctcctgctgcgggatgacctcatcgtactgggtcgtatcccatccctcatagaccttgccgttttcgtccgtgaacgcaaagccgtacagtaccacgtccgcaccggtcttttccgctgtgctgtgggccttttccagcgcctgcggcagcagcatatcatccgaatccacaaaggcagcccagcggccccgggcaatgtccagcccggcattgcgtgccccgctcaggccgcggtttttctggtggatgacccgaatgcggctgtcccttgccgctgcggcatcgcacagggcagggcagctgtccggagagccgtcgtccaccaaaatcagctcaaagtccgcaaaggtctgggcaaggatggaatcaatgcagtcattcaggtatttttccacccggtacaccggcacgatgacgctgatctcgggacggtttctgaccttctgctcactcacaacggtttctccttacctgcattttttcggttttgtctgccggatcttatatttgcagcggttatacagcggcgcattgactgcccgcagctctgcttccagccagttctgcaccgtaaatgcccctgcctgctttacctcggcccctgcctttttcaggcaggcttccatctgctgtacctgtgcatcatttcttttttccggcggcagctgcctgcgtatcttccgggcaaagtttttcataatgatatactgcagataagcagtgtctttctttccatgtctcaaggcacattccagcaaagcgtagttcgcgtacacttcattcaaatttttaaaatcgaacttcgtcctcacgatccccacagggttgaatttgtaatgataaagcggttctcctacacaggcggcttttgtgacctgttccagaatcagcggtgtcgtaaaggcatcctcatagtttttgcccaccggaaaacgaagtgtatcaaaaagttcccgacgatgcagacgagtcgtcaggtggataaatggtgtgagccgcatccggtggatggcctcgtccccggagatcacctctgtccggagtgctttttcctgatatccgctcagtgaaccatccgcctcaaaatagaggatatctccaattgcgatctctgcaccagactgcaccgcagcttgatgcagcttttcatagtaagaggggtcgatggaatcatccgaatccacaaagccgatccagtttccgcggacagtatccagcccggcgttgcgggctgagctcaccccgccgttcggtttgtgaatgacccggatgcggctgtccttggctgccgccgcatcgcacagggcagggcagccgtccggggagccgtcgtctaccaagatcagctcaaaatccgtgaaggtctgggcaaggatggagtcgatgcactcgttcagatatcgttccaccttgtacaccggcacgatgatgctgatctccgggcggttctccgctctcttttcactcacaacattctctccttcacgacttctgatcaggcccagcctttcaggtgataataaacggttttgttccggaaccacacggccgcttccagcttattgcgcagggtatctgccccggcctatctgacctctgtttctgccttgcggatcagatcgatggtctgctgtaccttcgggtcattccggtcttccgggggaaggtttttcatgatctttttgaaatagcccttcataactgcatactgcaggtatgccgcatctttttggccgtacttcatcgtgcactgaagcatcctgtaatttgcttcgatctcatccagatttttcagaatgatttttctatgcgtaacactttgaggattgatccggaaatggtaaagcggttccgccagacatgccactttattgatctgttccagaatagccgaagacataaatgcatcttcataatcttttccatcgagaaagcggtttgcttttaccagttcctgccgctgcagcttgcttgtcacgtgaaccatcggtgttgcacggatccgccgggccgcttcggcagcagtcaatacctcatcgcggagcgggaggtctttatacacacttgccgagccatccgcttccatgtataaaatattgctgacggcgatctccgcgccggcctgctgggccgcatggtacagtttttcatagtaggtcttatcgatgagatcgtcctgatccacaaatccgatccaatttccacgggcactgtcaatgcccgcatttttggcaccgtccacacctttgtttttctgatggatcaccctgacccggctgtctctttttgcaatggcatcacacatggcgggacagttatccggggagccatcgtccaccagaatcacttcaaaatccctgaaagtttggttcaaaatagcgtcaacgcacccattcagatatttttcgcctttatacaccgctacgatgatgctgatctccggacgcttttgttctgtcatgcttctgttcctcttctcacattcgtgtttttccgacacatgctgtttctattatacattgtttttccgccgctgaaaagtgcaaaaaatccccgcagacagcacaaaggcatctgcgaggattttgcagcgtttatccggccagcgggccgggagtttctccgaggaccgtccgctggggtgggaccctgtcgccgtcaggcgatagggcgggcgatggaatggcccgtctcgtgtccgaggagaaagctaccggcacactggcccattacagcttattcttcgctcttatcgtccgcttccggagtctcggcggcagaggctgcatcggcggcctccatggcggccagctgctctgcggtgggctcggcatcggcgtcggaggtgtcgatctgttcggtctgtgcctcgtcgtcgtggtcggtgcgggccagcaccatcaccttgtcgttctcgcccagacgcattacccgcacgccggagccgtagcggctctgcagcgggatctcgttggcgtgcagacggatgatgatgccctcctgactgctcagcagcacgtcgtccacgtcgtccacgatcttgaccgcagccaccttatccttggcggcgtcgtagttgcggatgcccttgccgccgcgtgcggtgatgcggtaggtgtcgatgtccgaccggcggcccttgccgttctcggtgacggtgagcaccgtgccgccctcgcggcagatgcacacgcccacaacttcatccccctcggccagacggatggcgcgcacgccgtggccgctgcggcccatgggacgtgcatcctcttcgttgaagcggatggcctgaccgttgcgggtggcaacgatgagcatatcgtggccggaggtcaggcgggtccatgccagtgcatcgccctcgttcagggcaataccgatcaggccggacttgcggatgttggcatactgctccagcggggtgcgcttgatgaggccctgcttcgtgaccatggtcacaaagccgccctcagtgtcggcttccttcgactggcagatcatgttggtgaccttttcgccctcggccagctgcagcaggttgacgatgttgctgcccttgctggtgcggctgccctcggcaatggtgtagcccttgatgcggaacaggcggccccggtcggtgacaaagagcacatagtcgtgggtggagcctacgaacatctcctgcacgatatcctcttccttgcgggtcatgccggagatgccgcgtccaccgcggcgctgtgcctgataggtggccttgagctggcgcttgatatagccggcctcggtcagggtgtagacacactgctcctcggcgatcagatcctcgatatccacctcgccggtcacggactggatctcggtgcggcgctcgtcgccgaagcgcttcttcatttccagcagctcgtccttgacgatggcaagcacacgggcgtcatcggccagaatggcttcccagttctcgatcttggcctgcaggctggcaagctcttcctcgatcttcaaaatctcaaggcccgccagacggcccagctgcagcttgacgatggcatctgcctgcgggtcgtcaaagccgaactgctccatgatggcagccttggcctctgccatgccgcccttgcaggcgcggatggtggcgatcagctcgtccacgatgtcggtggccttcttcaggccttccagaatgtgggcgcgctccttggcctttttcaggtcgtactgggtgcggcgacgcaccacctcgtcctgaaactccacatacttctgcagcatctgcttcagggtgaggaccttgggcaccttgtggtcgatggccagcatgatgacgcccacggtatcctgcagctgggtgtactggtacagctggttcaggatgacctgtgcgttggcgtccttgcggatgtccaccacgatgcgcatacccttgcggttggtctcatcgttcaggccggtgatgccctcgatgcgtttatccttgacaaggtcggccatgttctcgataaggcgggccttgttgaccatatacgggatctcggtaatgatgatctgggtgcggccgttcttggtctcctcgatggtggcgcggccccgcagggtaatcttgccccggccggtggcgtaggcggcgcggatgccgctgcggcccatgatgatgccggcagtggggaagtccgggcccttgatgtattccatcaggccgggcaggtcgatgtccgggtcgtcgatataggcgatgcagccgtcaatgacctcgctcaggttgtggggcgggatgttggtggccatgccgactgcgatgccctgactgccgttgaccagcaggttggggaagcggcagggcagcacgctgggctccttcttggtctcgtcaaagttggggtcccagtcgatggtgtctttctcgatatcggtcagcatctccaccgccatgcggctcatgcgggcctcggtgtaacggtaggcagccggggggtcgccgtccacagaaccaaagttaccctgaccatccaccagcggatagcgcagagagaaatcctgtgccagacggaccatggcatcgtagaccgatgcgtcgccgtggggatggtaagagcccagcaccgcaccaacggtgtcggcggatttgcggtagggatggctggggtcgttgccgcgctcgtgcatggtgtacagaatgcggcggtggacgggtttcaggccgtcgcgcacgtcgggcagagcgcgggacacgatgaccgacatggagtagtccagaaatgcggtctcgatctcctttttcacatcgcggatgatctttttggttccgctgcccggtatcatcacataatcttcttccattgtttcctccgtagggtttgaccctctcttttgtacaggaaagggatttttttctcggaaaacagccttgccctctcaggcgcttacacgtccagctttgcgtactgggcgttggtctcgataaagcggcggcggggctccacctgatcgcccatcaggatggtaaaggcttcgtcggccttctcggcatcgtcaatggtgatctgcacgatgacccggttgtccgggttcatggtggtctcccacagctgttcggggttcatctcaccaaggcccttatagcggttcaccttggcacccggcatctcctgcgaaagcacggccatttcggcgtcgttgtaggcatacttgatggtgttgcccttctgcaccttgaacaggggcggctgggccacatacacatggccctgctcgatgagcgggcgcatatagcggaagaagaaggtgagcatcagggtgcagatgtgggagccatccacatcggcatcggccatgatgaacactttatcgtagcgcagcttggagatatcgaactcgtccccaatgccgcagcccagcgccagaaccaccggcatcagcttgtcgttgccgtaaattttatcggcgcgggccttttccacgttcagcatcttgccccacagcggcaggatggcctgaatggccgagtcgcggcccatcttggcggaaccgcctgcagagtcgccctcgacgatgaaaatttcggtgcggctggggtctttttcgcggcagtctgccagcttgccgggcatccggctggtctccagcgcgctcttgcggcgcaccagctcgcgggcctttttggcagcggcgcgggcgcgggcagcctgggtggccttttcaaagatggcctttgccacgccggggttctcctcaaagaactccatcagcttggagtagaccatgttggaaaccagggtgcggatctcggtattgcccagctttgccttggtctggccctcaaactctgcctcctgcagcttgaccgagatcacgcagatcagaccctcgcggacgtctgcgccggacaggttctcgtccttgtccttcagcaggccgtggctgcggccgtaatcgttgaacacgcgggtcaggctgttcttgaagccctcctcgtgggtgccgccgtccggggtgttgacgttgttggcaaagctcagcagcagctcattgtagctggaattgtactgcagtgcgatctctgccatgccgcggtcggtctggcccttgaggtagatgacgttggggtgcagcacatccagcttacgcttctcgcccagataggtgacaaagctcttgatgccgccctcatagcacatgacctcggtgcggtagcagggatcgccctccttgccgtcctccagcacgggggtatacatctcgcgctcgtcggtcagggtgatcttgactccggcgttcaggaagctctcctcccgcaggcgcttttccagcgtgtcgaagtcgtacacggtggtgtccttgaacatttccgggtccggcttgaaggtgacccgggtgccggtaacgccgtcggctacggtgccgatgcacttgagcgggccgtccgggtcgccgcggcggaaggtctgctcatattccttgccgtcgcggcgcacatcgacggtgagccactcggagcaggcgttgaccaccgaagcacccacgccgtgcagaccgccggccaccttgtagccggagttctcgccgccgaacttgccgccggcgtgcaggatggtgtaaacgacggtgacggcgggcaggccggtgtccgcctgaatgtccacaggaatgccgcggccgttatccgtgacctgaatgatgttgtccttgaggatcttcacctcgatgtggtcgcagtagccggccagcgcttcatcgatggcgttgtccacgatctcgtagaccagatgatgcaggccccgctcgccggtggagccgatatacatgcccgggcgcttgcgcaccgcttccagacccttcaggacctggatctcgctggcattatactcatggtcggtagcggtttcggcatttgtgctggtaatgatttcttctgccatttcctttctcccttttgttcgtttttgcgtttgttttttcaaattatagcaaagcgggaaccggtacaccagggtgtacttttttctcgccgttttgttgtgtttttactccccggccgcagagggcgttccggctggcgcggtgcggctttccgggcagttccggggctttcccatccctctttttctgtgggttttccgcccgttttctgcaaatttcactccaccatcttttcggctctgcggcgcatggcagcaggggacagctcggaaagatagaccgtatccaccaccgcgccgtctgccagcacatagctctggggcagctcgtccgaaaggctcaccaccgcgccgttcttctgggcatagttcagaaactcccggccccggggggtgatggtggtggtctccagattgaagatgccgatgatgtcccggtcattcagtacgtagtcgcgccccagatgaatatacatacagtattttcctcattccggcagctcatgcataaaatgctgtttatgcacaggctttgtatggacttttgcagcattcgtcccggtcaggcccggctcagcacaccgccgttcatgcggtacacctcgccgtccgttttcaggaacgcggtatcatcgcagctggtgacgaaggtctgcttttccttcatgcgggtgagcagatactgcttgcgaccctcgtccagctcgctgagcacatcgtccagcaggagcaccgggtgctctccggtgatccgggcagcggcagccgcttcggccattttcaggctcagcaccacactgcgctgctgtccctgacttgcaaacacctttgcgggctggtcgtccagcagcagctcaacatcctcgcggtggatgccgcacaggctctgcccggcgcgcagctcttcgttctggcgctgcttcaaaagtgcggacagcccgcccggctcaaactgggcggcatagtgcactgccatgcgctctgccccgtgggaaagctcggcatagttagcgcaggccagcgggccaagcagggccagatactcccgccgccgcttctggatggcctcgccctgcgctgcaagctccacgttcagcacctccagcagggcgcatttttctgcccacgggcgctctgtgccgcctgcagaatgacgcagaagcgcgtttttctgctgcaatgcccgcacataacggcggtaggtggcaaggtagccggggtacagctggcacagcgccgcgtccagaaaccgccgccgtccttccggcgcccccttgacaaggctcaggtgcccggggtcgaacaccacagccggaaagctgcccgcaaggcctgccgcccgtttgggcggtgcaccgttcaccgatgcataccgcccgggccgctgtgcgtccggtgtgcccaccgtgatgcgcactctggccgggtcgtccggctcctgattctcctgccgggtgcgctgggtgacggcttccagcaccgcgaatgtttccccgcggcgcacaagctcggcatccttgccgccccggaagcttttgccgccggtcagcagccagatggcctccaaaaggttcgtcttgccctgaccattgttgccgcagatcacggtcagctcccggcccggctccagctgcgccgccgcaatattgcggtagttcgcaacttccagtgacagcagacgcattactgcccctgcccgacttccacggtctggccgtccagctccaccacgtcaccggcacggcactttttgccgcgcatggtgcacacctcgccgttcaccttcacggcaccgccctgcaccagctccttggcttcgccgccggtctcgcacaggcctgcatatttcagcagggcatccagcttgataaactccgtatggatgagaattttctgcataaattatccctcttaatcgttcttgaagcgcaccggcagcaccagatacaggaaatcgctgccctcggcaggcagcacctttaccgggctcagagggccgctgatctccatgcggaccttgtcggtgcgggcgttgcgcagcgcgtccagcagatagcggttgttgaagccgatctccacctcgtcgccctcgcagtcggcgttgaattcatccaccacgcggccaaggttggtctggcagcggacgacgactttaccctctgtaaaggagatgcggaggggattttttaaacgttctgtaataatcagcgaagcgcgctcgatggtctcgacaaactccttggtgtcgatggtcacgcgggtgcggctgtcggcggggatcacgttgcggtagttgaggaactcgccctcgatcaggcggctcatgatggtgtagccgcccgccataaagaccacatagcggcggttggcgctgatgtgcaccagctcctcgtcatcgttgggcagcaggtgggagacttcggtcatggtcttgctgggcacgatgatgcggatgtccttcactgccgtgactgggcgctccacgatggccagacggtagccgtccagtgccaccacggtcagtttgtcgggcaggatctcgaacagctcaccggtatgggcgggctttttctcgtcctgactgaccgcatataacgtacgatcgatcatatctttcagcacgccggtcttgatggtcagggtctcttctgcgccggtattgggcagctcggggaaatcactggccggcatggactggatctcaaactggacgacgccgctctggatggtggtcttgccgttttcggcagaggtgatggccacctgaccggcaggcatccggctgatcatgctgctgagcagctttgcattcagcaccacctcgccggcttccttcacattggcttcgatggtggtcacgatgcccatttccagatcgtagccggtcaggttgagctggaagccctcggctttgagcagaatgccttccagaacggggatcgctgaacgcatggtgacggctttggacacaccatcgatggctgcgctcagcagaactttgtcacatacgatgttcaaactgaattctctcctttgttttccgggtccggatgctgttttgggttggaatgcagtctccggatcggtctatcttattgaacttgttgtagtaaccgtagtagggggtggggaacttgtggaaaacttggaaaagtcctgtcggaatgcgggggtttggttttccacggcattgtgaatgtgttgtgaatggatcgtggaaaggtgagaaggagcctttctttccacagcccatgtggagaacacaggttgaatgttgaaaactctgtggaaagtgtggaaaggtttgcgtttttaccacaagatatgggccatttttccccattttcttccggttcttccccatattttggggttagaggtcaaaatgagtatgacttttacctcgttttccccggtcaggccttcacgtttttgatgatgtcgctgacggtctcccgcaggtgctggtcgttcttcatgtcccgctccatggtcttgagggagtagacgatggtggaatgatcgcggccggagaactcgcggccgatctcctccatgctcatgccggtgacctcccgcaggatgtagatggctacgcggcgggcagaggcaacgttggcgttgcgcttggtgccgcggatgtcggcaggggagacgttgaaggtgcgggacacctcgccgatgatcttctcgatggtgaccggcaccggctgggtctcgttgaggatgtccttgatggcattctgggccacgctgatgaccggctggatgccctccagcatgtagtaggcgttcagctttttcacggcgccttccagctggcggatgttgttcttcaggtggttggcgatgaactcggccacatcctcgggcaggtccagatgcagaagctctgccttgcgcttgacgatggccacccgggtctcaaaatccggcggctgcacatcggcggtcaggccccactcaaagcgggtgcgcagacgctcttccagacttttgatctccttggccgggcggtcggaggcaatgacgatctgcttgtgtgcgtcgtgcagggagttgaaggtgtggaaaaactcctcctgggtggactccttgccggcgatgaactggatatcgtccaccagcagcaggtctgccacgcggtacttcatgcggaagtcctcggtgctgccggcgcggatggcggcgatcagctcattggtgaactgctcgcaggtaacatacatgatgacgaagtcggggtgggtgcgcttgatctcggtctggatggcggtgagcagatgggtcttgcccagaccggagccgccgtagatgaacagcgggttgtaggcgccggagggattggccgccaccgcctgcgcagcagcaaacgcaaactggttggaggggcctttgatgaagttctcgaaggtgaactcgtagttgccctgcggggaggcggggtttgcctcgtactgctgggccagcaccacctcgtggggcggggtgctgggcaccaccagcgtgatatccacgtcaaagcccagcacggtcttgaaggcctccttgagcaggccaagataacggtccgtcacgatcttgcagatgaagtcgttgcgcaccgaaagggtgatgtggctggagtcctcaaagctgatgggctccaacccgtcgatatagagattataggtcggctcggccatctgcgttttgcagtacgcctgcgcggcctctaaaacgtccttgaaagaatccataaaacatccactccgttaaagttttcaacaatgctgctgataccaggttagtataccacaaaaatggctgtgcgtccatatttctataatgtaatttataatacataagaaaagcccctgcggggccgttgtgtccggggcaaaaccgggccacaatatcttgtggcgatggagttttccacggcaaaatggtgaaaaagttgaaaatcttttcacagaaaaatccgcaaaaagtttgcggaaaagcgaaaaaaatgcttgacagaacgccatactatgcgatatactgttgaattgcaagcctgtccccaatctgggaccgcat

SEQ ID NO: 266 - DNA, 28058 bp, unidentified
  source 1..28058: mol_type = unassigned DNA
agcggattcacctcaatctggtgctggtgaagttgctggaactgcatcatctgggatacgatctacggcactatcacgcccagcaccatgcgtttattaaacagttcaaccttccggcacattttcagtttgatgttgccactgactaaaaaatttatctttgtaacataaaaaatccgtaggggcaagaatgatccctacggattttccatattattacaagattgtttttactttgctcagcatatgtgagcgatatagaatatagtataaaattatcggaatcaatgtagatgcgaagaaaatatctgctccatagtatctaaattcacgaaatatcagtgtataactaaacgccacccacatatgcgtaaaatagattatttcactaacatatctcatatgttcccatattggatgctgcggcaatgttactttacaggaagcactcaacaaaatttcagcaatcaaaaactttaacaaaaacccccatgtatcccctgctaaatataatgctcccaataatattaggccaagaattatgctaatccgcccacttaatattttctttttagcaacaatccatccaactgctatataaccaaatccagatagaattctcccatttccaaatataaatttgatgcacttaattaccatctctatttttctatattctgagaaatcaactgtcgttagtactcctatacccccccccattaaaaatatggccatcataatcttaaatatatttttatctttgattttatgttcagccataatacaaattgaagcaatcacaaaaaacacagacagtaaataccaaagttgccatgagtaaaattgttggcctataaagagaaatcctcttatacaatcgagtacgtatctcgcaaatgacatattattttccttgaatccaaaaatagttattggcagataaataatattccaaatgacatataatgagagtactcttgatagatacttcttacacacctccatacttttcctgcttaatatattcgcatcaatttttgaaaacagaagaaaccccgatactgagaaaaaatatggcacagccaaactagtaatcgtgtcaaataatcgttgcacaactatagactgtatgctataaagcggctgagtgtgaatagcgaccacacacactgccattataaactttaataaatctattccgtaatagtttttcttttctagcattatctttaataatcacttcacttttcttatattcaccagttctccaagctttgcatcccattcttcaggaacaaacggcataaaaccaccacatggggaaaacgtcagctctgagaagtacactttattgtttatctcgtataaatcaacccgtagaaatggatgcccaccggataaagattttgctattttcaccatttcatcgaactttgtgggcttcggaggaagaacttcaaattcaagatagtcagatcgtccaaacggagctttttcccaattcattgtcaaaaaactcagccgagcagtttcatggttatccattccatttgaaacatagagatatttaggaacaccattaaaacaataaaatttgtagtctgtcaatccattacctgatatatcttccatgtattcctcagcaataatccgcggctttacatttttatacggccactcacgtcctcctttgtagtagttcgttttcatagatttctctattttcttttttgccgcctttttatttagattgcttttgtccttgcaaacaaccaatccaccagaatcgtgtgtacattttagaacaaactgcgttggtaatttatcaaaatcaatatcatcaaaacgactccaaacgcctaaagtcggaataatatgttcttgccctattatacttgccacatattttttcgccatgaatttatctaccatttctgtatattctggctttcgatcattcaatttcaaccattgaagtttttcattaaacgtcacaggattattgaggtcaagctctttaccaaattttcttttataggccattttcaagaacgtctcatcatccattccatcataaagtcccgaagatattttaagccaataaatgtggtttttcaatttatctataaacaatttcattttgctcctcctgattaaaaaccatacaaaatcagaaaggcaaagcattaaatccttatttacttgtaggaagtttaatccaatcccccattttaatcgcccattcttctggttgaatcggcgcaaaaccactgcaatggtaaaaggtcaactctccaacatatagtcttccattcgcacagtaaaagtcaactcttaaatggggcaatcctttggacaatactgctgcaatttttttcatttcatcaaaacgaatcggtttttcaggtaacacatccgaattaggatctcgcattctaatcggcaagtgagtataatccatatcaaaaaagtccgtcgtcggattttctgccttgtctttcgatatataaacaattttaggtattccaccaaaacagaaaaacttataatctgtcaagcactcctgctcgcccactttcgttgcatcatctttaagaagaggctctgcaataattcgaggctttacatttttatatggccattcgcgccccccccgaaataattagaatgcaacgatttattgatcttttttcttgctttttccctgtcaagtttacttttatctttgcaaataaccagaccaccagaatcatgtgtacatttcaaaacaaacgcattcggaagctttgtaaagtcaatatcatcaaatttttcccaaacacctaatgttggaaccacatactcttcaccaattttttgagcaatataagcttttgcttcatatttatcaaccatcgttgtatactccggctttcgatcatgaagtttcagccattgaagcttttcattaaaggtcacaggatttttcaaatccaattcttttccgaattttcttttgtaagccattttcaaaaatgactcatcatccattttgtcatagaatccccattcaatctttttccaataaatatggttttctactttggacacaacagctttaatgttcattttctctccttttaaccatcaacgcttaacttttcttttaattatcaaattcatacaagccaagaactgttttttttctgtaataaaatatataagtccagtcgtcacaagtactattatgcttgcaattacagcatacataatccactcaccccaaccattcataatatattttccaaccaacaacttatacagtatcacattaatagcaattactagcgcaactctcaacacccttaaaacggattttttgcaggatatatttagaatatgcttatgtgagtaatagataatatccgttgttctataagcaaaagaacaaatagttccaatcagcagaccatacatacctaatggtttaatcagcaaaagggaaaccgtaatatttattacagcttctaaaattgctctccattgcgtttctttgaaatgccctgctgcgttaatcattgtcaaacaaggaattcgtatattattcgcaaagcctatcaacataaacaggacagcaagctttacatccacataaggaatatctgtatatttcttcgtgtaaacactcacaaatggcaaaatcattgatgctgaaacaccatagacaaatgttattataatataataaccatattcatacaaatcataatttcgcagtagggactctctcttattttcactcatcaactgtccaaaactcgctaaagttccagacgaaaaaatgttcgtcaacagttcatacagtttttgaaagaccaaattgtagacagagtatatactaacttgcacaagacttccaaatagcgtcaataacgtaacatcggtattataaacaaccaaacctgctaattgatgggccatcgcagaccatctttttgacagtgctgagttatccctcacgacctttttatccagtcccggataattatttcgacagtatatggacaaaatcatcattctaaagataaccataaccgcaggaattgccattacgatcacaatgcttgccttagcccaaatcaaaatcacctgaagcccaacacgaacaaaatacattatggtatcggcaacagaaaccacaaatagcctctgatccgcttgtaagagaactttgtacttactataaatgaaacattctaatgtgctacttgcgcctatcacaatcatcaaaagcacaataagtatcggaggcaactgatttgacaaaacaaacggtaatacgctcgcaattattgctatcgctatcgtataaaggcatcccgaaactgtatagaaatggtcaatagcattcaaaacttggtttaatctatatgtgtcctttttagcaagaggcgtatataaggcttgcactgctgcaggagccaatcccgcattaacaagtgctacataactcataatattagaaacagttgttgtataaccatgtaaacttgcaccataggtgttcaaaatcatgcttggcaaaacgaatccgaataatgccgtcacgatctgatatgctcccataagtgccatatttagcatagatgctttctttttgctcaatggcttgctcatgttataatcccttcgctgcttcctctaaatattgtttaaacagtggaagcaccttttccaagctaaaatcctgtgatctttcaattgcacattttcccatttgttttcgctgttcaggctgctttaatatttccacaactttttttgcaaatgcttctgtatcgaagtgatctacaaggtatccatcaaccgagtctctaattatttcgtctgggccgtaattatgaaatgccactactggaataccgcaagacatagcttctagtattgtcattccaaagccctcccatcgagaagtctggaccattactgacgccctgccatagaattgataaacattatctgttgttcccaataggttaactttctcccctaatccagttctttctatctcagcttttagccaattatgtgatggtccgtctccaataatagtcactctcaacttcgggacttcttctgaaatcttttttattacatcaattaagtagtccaaccctttatgctctcgttccagtctcccagcaaacaagacatatccttcttcatacgttgtactaacgctgtcatttttcggaagtggattatagagtactttgctttctatacccaagttgttatcaaattctgttttgtcagaatttgtcaaaacccaaatgccatccaacgctgaataacatttttttacatatttcatcaatccatatccagttgctcctcttttttcaaagtatgaaccgtatgtactgtgttgccatcctatagtttttgctgatatatctttcttgatttcgcccaaaagcagactatattcaatgcccgcaccaataacaacatcaaaattttcttcattgaaatattttatgtacttttctttttcctgtggtgcgattcgattgtttaggacaaatggaagtgctataccattatctaaaaatccaattcttttgtttaatgcaaaaatatatcttacgggcttatgttctcgattcacagatagttcttcttgatttttcagcttaatacgttcatcaattttgaaaagtttctccccgctcatcttaaaaggcatcacaactgttatgtcgtaattttcgtcattcacaagttcatttaaaattgtagttacaactcgttggatacctcctagtgtatatagattttgtactagaacacatatcttcatttccatttcctcttaccgcatagcttaaattcagtaacaaaaataccgaaacacaataaagcaacatctgatcagattgcgtcgtaatcccgttataactgttcacatcgagaattagtataatcagaacaataaaaattttaatatttttgttcttaagtatcatcattgctggggtcaaaaataaaatgatgcacattaccactgaaaaccacactccaaatagatatgcccatcttaatggtggatactccagcgcagcaatcattctttccgataaatctgctcctgcatgacccattaaaaaattaaaatgcaagtatccatttctcataagtagggctaatgcagtgtttcttcctgttgttaaatctcctgatttgaagccatccaagaatcgtccgatcactgtatccaatagtccataaccataggcccaataaacagccgcggcgactagaataaaatattttattcctttcttattgacatacagcagtgcaaactctattgcaatcaatatcagtcccgttttgcttccgcagaatcctattccgattacacttactattgaatagtatactgtctctgttactgtttttttctctatgcagtaatttaccaatgtattaaatgaaaagcacaaaatcataacttcacttgtcaacaacggatgcccaaaatatgaaaccatccgtccttgacgaatagattcaatcaatgaatctgccgccgaaaattctgctattgtctttccaatgctcgtaccaataaaggtatcaaaaataccacacaaaacaacaaccgtgcttgcaatggttaataactttgcaaacattttaaaatatcgaatgatttcctgtcttggcaaggaaacatataatatatagcatggaagaatcgttgcatagatgtacttaatctttgattcagccgaaaaatacgggagcatcattccttcaatcagaaaaaggattattagcgttattatcaataatggatttgtaactccattgcttccatctttagataatactactctgccccccccataatatctctgtgtcagcagaataattcctatccatgataatacatttactaatgcccattgagatttcaacattcccactcttagtaagctcggtacaaatagcaatccacagcccaccaaaaaaaactgaatatccttttttctaattttcatttttccagttctcctctgtaaatccagttattatgagtggtaatacttaggtttcctcataaacatttacattacagcctaaagtcaagataatatggcatcagcccagatacatcatatactgtaaatagtcgaagcaccaaccaaatgggcattgccactttaactatcatatagtatgcttttcgagaatttttcgatatttttctcgaaaagtcggttattatatatcctaaaatcaaaagacgaggcaaaaagaaatagctcgctccacgccaaatccctaaaatgtagcatattggaattagcatcaaatcgaagtagcacatcatttgaagcatccgaagtttttctttttccaactcttccatttcttgcagttgtccatttacttttttataggacagaatcatatacccatcaatgattacttgctcaacaattagctttatgtagtcgaataaatatcccgcagatgatgatgcacttgcataatttgcatacacccctcctgttaaatacccaatactgccaccaataataactttcttcccgatatatccaacagcacatccgataataataaaagctgttgcttttttcatcgtcatcttattctttttataataaaaatagaaaatcggaaagattgcatatattaaacttgctctctgaataaaaacactcgcaataagtagtccccacattaaaatatttcttctatttttcaaagcaactatcgccaataaaatcaatgcaatagttatatgtgtgcgtatcgcgcaaaagctttgaataaacgggaacacaagcataaacagcggagttttattgctttgtaggaggtcaaactcatctataaagcgcaaataactaaatattatcagtccgtaaatgagtgcgaagtacacatggtagttagacgtaatagttcttaccgccttagtcattatctgaaacaatggttctgtccgcacaaaatagatattatttcctttaccagctagacacgtctggaaataatctatatatgtaggggcatcattacctccaataattatgccgctctcatatccaacatatcggtatacagctaggaaaagccacacaaaaaacagaattgcataggaaacttttaagcgccttcttactccattttgaatgcttcttctttcctctgatatacaaaagtagcctattgacgccatcacaagatataatattacgcttttaatatcccacatcttatctccttatcaaagtaattgcagccatttctgacaaatattaggtgcagctaactgctcacgaatttttattgcattatttgaaatatgctttacatacctgctattcgttgcaatcaatgtcattgcactgaccaaatcatttttatttttcatttgaataagaacaccattatctcccgtatgtacaaacatctttgatcctcctactggacaatcggttacgatagtcggaattcccattcctaatgcttccagcatcgaattagaaattccctcatgattcgatgttgaaatatacatggctgctttattgatttcttcaggtagatttgacgcaaatccgggaagtttcacactcccacctagcccaagttcctgtatttgcatttcataatctttcctcagtgcaccttccccatatattgtaagtgtatagtctgggaagctttcatgaaaagtcgcaaatccatctattagaagtgcaaaatttttctcctcggaaaaacgaccggcagcaacaattcgtttttcgcgttctccatcgtatctttctgggagtttatcaatatccaacggattcggaatgatcgaactctttttctgaattttttcagaatagtatgactgtgcatctggggtttgaaaaaccatccaatctgccaaagaaaaaaggccacattttctcataaagaaatttccaattttatctttccatggcaaattgttgaactgagctcgcggatcagctctttcagacatgattactttttttctcaacccaatatttgcaatcattgtatataacgaaataatgggaaggaacggaatcactacttctgcagctgattctttcagcaccctatgcagctttcttatgcgttttatagttgctagttttccgtcatctgtaaattgaactattttgactttatcagacacaggatatacgattttctttggtcttagtaccacaagcgtaacgtctgctccaagctctgcacagcccgatgctaaaattgacattaccttttctgccccaccgtcagccaatgagccagtaacaaaaatcacgctttttatcaccttgttttaatcctcctctatttttgagctataaattttaggatttccgcagtattttttccaaatgcacccataccatttgccatttgagggaaccatatactctgtcctctcgtatttgcttctatcagaacaaacactccattttgatcaactgttaaatcccacgaaataattccgagctgcggggcattcagatgtagcttcttcgctgttttgataagttcaggtacaaagttaagtttataccccttgaatacggtgtgtgtatcaggatgttctttatatctttttccaaattctgtaaacgcctcatcattcagttcacccaagtcatttacaccgataaacattccaccagcatgagcattatccaaatagctaccgccttgtcctattcttaatgcaagcggcacatggaaaacttctccgtcccaaagatatgtaataaccctaaatgtattgactgcctctgaatacaacatggcaagttgttcattttgagtgatacattcctgtactatatatgtacccttttttgctgctttctcttgcagattgttctttatcgcttctattccttttattttctcaacaccaacacctgatgatgtatcttgaacaggttttattattgcctctgtaccccccccattaaaattatcatttttcaaatccacaatatttttttcttcatcaaagcaaatgccatcgcatactgaatagtatgtacgcggtgttctgacgtgctctacgcccacacaaaacaatggaagcaatagtttatcatcaagaacatagcgataatccatcggattcatctttggctctaacacacttgaaaaaagatattccggaaaatagttttcatcaaatttccctgtaaaagattgatacagcctatgccaatcatatttaatctttttgccataagtagaaacaaacaatgtatcaattttattctcttctgctttcgtcaagtgtactgtttcgattaagttctgtcgcctaggatcattgattttcttcatttctccatgaagttgacccatactgtaacttttctctatgaagcctttcatcgctttacggctactatttaatacacccattatctaacctccggcaattcaatccaactgccaaatttgtaatcccattcctccggctcaaaaggcatcaatccgctccaatggaaaaatgtcatctcaccaaaaagaatttttccattgacattgtacaaatctacccgcacctctggcattccctttgaaagtatgcccgcaatgcgaagcatctcatcgaaattttctggtttctttatctccttgtccgcattaggatggccattggtaaagggcagatggtgaaactctgtatcaaagaaatcaaatttagtatccgttccacgatctgttgcaataaacattgctttcggttcaccattaaagcagaaaatcttatagtcttttagctcgtagccagattcgtccaccgtatattcctctgcaataattctaggcttgacatctttatacggccattctctatgattgaggaagtaatttcttttaaggcaatgttcaattttctttcgtgcttgttttaagtctaatgtcgatttgtctttgcagataatcaaaccgcccgaatcatgtgtacacttcaaaacaaattgatttggaagtttgttaaagtcaatttcgtcaaagtgattccatacgccaaggcatggaatcaggtgttcacttccaattcgttcttcaataaacttccgtacttcatatttatcgacaagttgggtataaagaggatttctgtcataaatcttcaaccattgcaacttttcactatatgtttgagggttatcaaagttacactctttccccatcagatacttaaataaaattttgagatatttttcatcagcttcgggactaccttgcagaatatgtcccaaagcataaatactatataatttccactcagaaagtttcattttatcttccacccttattcatcagtttcaaatacaaattctgatacctcttgctcataccctctgccgtgaaattttccataacagcggtataacttctttcgcccatttcaaacaggttctcatccatcatctgatccatcaaggctgaaagctgcttagcattcccaagtttataggaatgaccacactgggggtctgcttccaaaacctccatgtgctgcggaatgtctgacagaagcaccggcaagccgcaagccatcgcttccaaaacgccattaggcagtccttcggacttgcttgttgccaagtaaacatcagaagcatggagatattcatttacgttggacaccttaccccggaacaaaatatttgtattcttagaaaactcgtctttcagtgcttcaaaattcgttccatcaccaagcagaagtaaaactgcatctgcatttttcttcattgccaaaaatgcggtaatggcttctctttgattttttctgtcgataaatccaccgctatacacatagatgacttttcctaacggcaaatcaagttttctccgcacgtcatctatttcgtcacagtttctttttgtatattggctcacatccacgccgttgcggatatacggaatctccatattctgacggcttctatacatttttgtcaaactttcagaacacgtcacgaaaggttcgcctgctgccatacgtttcttaatcaaattcaaatcgagaaaggccataactgttccgggaattttcccatagtagtcaggataatcctcatagcaataatttctgagcgtgacaaagtgaattgctctcttatagccgagcgtcattctgtacggcggcataccgacaccctgcacaatatccggctgcaactgctctaaaagttgtccaacctctttctttccaaagagaacagactttttcttgctcatgtttgcagacagtacggggatacccagctttttatactcatcaatcattgaattgtctgcatcttccggccacacagttaccagactaggctcaaagacctctttgtccatattgcgaataatattcagtgtctgtttgattgggccattctttttacaatttgtttctacaaaggtaactttgattttgctcattatgttcgttgcctttctttacttgttaaacaactcatctacgattgactccaagccctcattgaattttgcattgttgctgctaatcccatgacccatgcctgctacaatccgatcgtaattggttataacatctccaagggtttcaatatcttccacttcaataatcgttcccatccgttttgcgacatttcgtgcaaattccacctgatggtcattaacgtgttcattgaactgatgctgccgtggcacaacaataggtgtttttccaatctgaagcggcataataaaacttgctgggccaccgtgggtgattacaatacgcgcatctgctacattcttaatcatttgctggtacggaatcaacttgctccactggcaatattttggttcgtatgtactgaaacccgtctgaataatgacatcttcggttataacgccatctttttttaattcatccaccttttgaatcaaccgattaaatggttgctcatgtgttcccactgtcacaaaaatcatgttggctttctccccctactatcttagaatatacttccgagatttactgctttggggtaaaccttcttctgctcatcccattgaacgacaaatttatcagcaatagggtaaaccatctttccagtcatagttggtttatcaatacgatcaaacacctcgatgtataccacttttgctcccatcatttttccgatatagaaaaacggaacggctactgctgcaccacaggaaacaatcaaatccggcttttccttatgcagaacatcccatgcaattttggtgttttttaccaatgctttcaaactacgatttgtcgggtaatagcacggataaactttttctccctcaagcagactacgcgcatcttctttatcaaacgtaacccaaaaccgctctttatccttccaaaacggtttcaacatatataagtgcgttaagtgtccgcctgacgatcccactaaacatactttcatcttcgtactcctgctaattagtcacggcggaaaatatcgcgcgtataaaccttatcctccacatcatccagacacttgtcatagcgatttgcgatgatagcatggctcatttccttgaacttagccagatcattaaccactactgatccaaagaaagtctcaccgtccttcagagtcggctcataaataatgaccgtcgcccccttagccttaatgcgcttcataacgccctgaatggagctctgacggaagttatcactgttgctcttcatcgtcaagcggtacacaccaactacaacttctttttctttgctctcatcccagctgtcatttgcttcataagcaccagcaatttcaagcacacgatccgcaataaagtccttgcgagtacggttagattccacgattgcttcaatcaaattttccggtacatcggcataatttgcgagcagctgtttagtgtccttgggcaggcagtacccgccgtagccgaagctgggattgttgtaatgagtaccgatacgcggatcaaggcagacaccattgataatttgctgagtattcagtcccttcatctctgcataggtatccagttcattgaagtagctgacacgcagagccagataggtattagcaaacaatttaactgcttctgcttcggtaaagcccataaacagagtgtcgatattttccttgacagctccttcctgcaagagttcagcaaaagtgtgtgcggcctttaccagacgagcattatctacatccgtgccaacgataatacggctcggatacaggttgtcatatagagccttgctctcacgcaggaactccgggctgaagataatgttatcgcagtgatatttttcacgaacacttgcagtgaagccaacaggaatcgtagacttgattaccatgattgcttctgggttatactcaatcaccaacttgataactgcttcaaccgcagaagtatcaaagaaattcttcttgctgtcatagttggtaggagctgcaataacaacaaaatctgcatcgctatatgcttcctttgcatccagtgttgcagttaaattcagttctttctctgccagatacttttcaatgtattcgtcctgaattggggactttttattattgatgagttccaccttttccggcacaatatccactgccataaccttatgatgctggctcagcagcgttgcaatggaaagtccaacgtagccagttcccgccacggcaattttcaaatccttaaaatctctcatgattactttctcctctctctttgtgtttttattttgaaaacacacttttcacatactcatagctgttaatatcgccaatgtcataccgcttacccggcatgatgtaagcgtgcatcggggtctgcttgctcaaccaagccgcaaagctgcccggtgcgtcatagccacagccattatttagtgcttcctgaatccgctttacatcacaggcacgatagcagtagaacggcggcacagccagatttccttttggttcctttggcttttcctcatagctcgtaatcagatccgagttatcaagcgtgatgattgctgttttctgctgcttttccagttcgttttcctcatggcacatcacacaggaagtatttttttctttggcaaaatcaacgaacttggaaaggctgaaatccagcacattatcgccagccataaccagcaaatcatcagccagattcagcttttctaccgccagttgaatatctttgactgctcccagacgagtttcattggtgcttgtaccatcgtcgatcacagtaatctcataaggcctcgtcttttgcttattacttttccaatccccaaaatgctgtgcgaacttgtggttggaaatcaccacaaattcgtcaatgtcagtggtgtccaccagatcatccaccaaccaatcaaggatggatttctcgcccactttcagaagcggtttcgggaaattctctgtcagcggataaagccgtgtagcatagcccgccgccaaaatcaagcatttcatctatgtactctccttacagttccacgccatcggcactctcacacaaatggaaactatactttccattcagtgctgggaacgctttcagatactctgttgtcacctttacttcaatatcttcggccttatctgggtcaatcagtgccatacagcagcccttgaagcccgcgccagagaatcggccaccgtagataccatcggtatcggtcatgatctcatacagctttttcagttcatcgcagccacactcatagctataaatagaggattttccgctttcaaaaacaagctgaccgtagccctccaaatcacctttacgccacagttctgcacccttttcggcacgagcgaactcactgtaatagtgttctgcacgtctgcgccacagttcgggcagacgttctttataggcttcaaagacctcaaacggcacatcacggagccgggtgtttgcaaaggtatcgtagtccatccctgcatagcccatcagtgcataggccgctgccttgcactcatcttgccgcagattgtacttagagtttttcaaagaacgctccaagccagagaagaaaattgcaaccttgtagggcttcatcttctcactggtaggaattagttcgtagctatcatctttcgtgtcgaggtaaagcagatgattcttcttggaaagcacctcacaactctggtcgagcttgccgcaggatacgccaacatactggttttccgccgcctttgccgtgagaatcatctccatcggctccagatggatgccgttcactttacataatgcagacaaaaagcaaataatgaccgaagccgacgaggacaaaccgccaatcggcagactaccctcgatgatgcccgacagaccaactttcaggcggtacttttctcccagcatctttgcagcaccacgcagatgatcagcccagtcaccctgcttttcatccggcactgcactcacaaagaactgggcacgttttgggaagttcaaagactgcaattccacaacaccattctgtttcgggtgataggccatgtggattcccttgtcgattgccaaaccattgatttttccgtactgatggtcgatatgcgcacccagtggactgatgcggtacgggcagaacgccacatcaaacggttcctgatgatataattccttgtaaacctcaacacacttcatcggtttattttcctactcttcgttatttgtaaaactttgcgtaccactcagcgaactttcgtaaaccctcgcgcaagctcgtagagggcttatatccgaagtcacgctccagtgcgctagtatctgcataggtcacaggcacgtcaccgggctgcatcggaaccagcttcttgtgtgcttcaaagtcgtaatcttccggcagaacaccagcacgaatgagttcttcctgcaaaatctgtacgaagtccagtagattctccgggttctggttgccaatgttataaactgcatacggaggaataggcagaccatcttcacccttcttgcgctccggcgcaccctgcatcacacggacaacgccttcgacaatatcatccacataagtaaagtcgcgcttacagttgccgtagttgaaaatttgaattgtctcacctttcagcagcttgttggtaaagccgaagtacgccatatccgggcgaccagcaggaccatacactgtaaagaaacgtaggccagtggacggaatgttatacagcttagaataagcatgagccatcagttcattcgatttcttggttgccgcatacaaagataccgggttatcaaccttgtcatccgtgctataaggcacttttttattgctaccatacacggaagaactggacgcatagaccaaatgctctaccggggtatgcccctcatcgtaagaatggcggcaggcttccagaatgttatagaagccaatcaagtttgcttccacatatgcatcgggattcgtaatggaataccgaacgcctgcctgcgcaccgaggtttaccacaatttccggcttatactgctcaaaaatagattcgatcacagccttatcagccagattgccttttacgaagctgaatttttcaaactgctccagttccttcaaacgtgcttctttcaggcgcacgtcatagtaattgttcatgttgtccagacccacgaccttgacaccctccaccgtggagagcagccgctttgcaaggttggaaccaatgaaacccgctacaccggtgataaaaatgcttttgtttttcagatcaatttttgttttattttccatcataatttttcttttcctcccttgttaaatctcctgctatttcattgcacgacaacaagcctgtatacagattgcagcagcaatctatacgcaggctcaccttcgtacctccttattctgttttctgctctatcagctttcgctgtggtgggttaagtatagagcgcaaccagaagccattagcacctgaaatcacgctggccgcaacgcaccatgacaggcaaaaacaggttgaggtgaaaaggtcaagccgcgtaaacccgcatgaaatcaggattttctctggttgtccatattatttcacactccccatggactgttacgattacctttttaccaaatattttaggaatccaacaaaaaaaagctggtccctctgcgtggatatgcaccacatcatattttccaaacgcactataaatagctgcaaaaaaagaagaacttactgctgccaatccccttttttcaatggtaggaactgatatctgacgaattccttcataccttatttcactttcatcatattcggcaccgctgatatgatggcctgatctgttataacaagttacatcattaccattttttgccattctagtacataattctcttgcaacaatttctacgcccccctctcgggatagccgtttttgtccaaacatggcaattctcatttgactttttacaccatcttatccttattttctctgtatcacaaaaagcctgtacccagcactcccaccacatacagacttttcactttccattacactgctccgtccttcttgagcaccgctcctacagtcttccacagtatcttcagatcctttccaaagttccagttctcgatatattcccggtccagcttcacgacttcgtcgaaatccgtgatactgctccgcccgctgatctgccacattccggtgatgcccggtttcatggcgagtctggtacagtgtctgagctcgtactgttctacctcggagacgaggggcggtctggtgcctacgagggagatatcacctttgagtacattgaagaactgcgggaattcgtcaatgctccagtcacggatgaagttaccgatcccctttttataggtaccatccggcaggatcctgctgccaatgatacggggatcattatccatcttgaacatcttgccatcagacattttattctgtttcatgagctctgccttacgttcctccgcatccatatacatgctgcggaatttatagaggcggaactgtttgccattcttacccaccctgatctgggagaaaaaaatcggtcccggagactggatatagatggccggtgccaggaaaatgcacaggataccggtcaggatacatccgatcagacctcctgtgatatccaggcatcgcttcatgaacaattgtctgggagaagcataattcatcgtagccgttattaccggcatatctcccagcttttccatgataatttttcttctggattgtgtcaaaatatcggggacccgcacatgcgttacagtacccatttccaggaattgtctgatcagtgattcagcagacacatctcccggttccagatcgatatagatctcatccacccagccggtacgggtatattcaatgacactatcagcattcgctatcaccgtatagtttccgatctgctgtcccatcatatccgcatctacgactgtgatgcccaggatctcataagaggcataggtctctccctgcaactgctctgtcagaataggcagacggtctgctttggtcacgatgatcagggagcgctttggcgcatacttgttatgatgcttcaggtatgtcttccagaggattcttcccgcataacctaacacccagtagaatcccatggtgagatataatacagtacgtgagaactgttctgcactctgtacagtgaccagatagatggcaaacagtgcgaatacctccagcacctgcttcgatgtctggatggcctcattccagaagccacgcttcatgacattatgtaaattttcgaaaatgattccaatgacaacatctatcaatagaagaacgattgccataccggcatacagctgattctcatacatattatcgatcccatgacggatgcaatatgcaacataaaaggagagctggagaacgatgatatccagtatcagaaagtctgcatgtttcagccagccactgtacttttttttatacataattctccctccctcctgtttgcaccttcgcttactcttccgttccgtagttaccgtaatatttgccatagtacttcccgtagtacttgccataatatttgccgtagtatcccttgccgctcatctctaccttattcagtacgcagccgaggatcttgcatccggtcattgccagctggtccttgaccctcttggcgaagcggtagctgatctcaccacaggcgaggatgatcaccgcaccgtcacagaacttggacacgactgcagtgtcgatgacgcttccgagcggtggtgtatcgataatgaccatgtcgtacttcatccggcatacctctaccatcttctgaaaccgggtgttgcccagcagttcactggggttgggcggtaccggtcctgcgaagaggagatggaagttcggaatatccgtctcgcagattgccgtatcgagatctacctttcctactaagtaattggtcaatccaaagcgaactttaccctttttatgtctgcccctcatgacgctcttacgcaggtcggcgtcaatgaggattgttttcttaccattctgtgcaaaggatttggcgagctcataggacacgctgctcttgccttcgtttggcgtacagctggtcacacagataactctgatattttctccggagaattcgatgttcgtacggagcgttttaaatgcttctttggtacggaaatcctgtttttccagttttaattcaatgctttgcatcttcctgctccttttctatatctacaacttcaatagcctcatccacttccatccggggctcatggatctcttcttcctcctttgatctgcgggatttctttttcttctccacggtatcaaagttggggatcagtcccagggtagacagctccagatatttctcgatgtcctcggaagacttgatcgtatcatccagcagatactgcacaatgataataccggctgacaggatcacgccgagcattgctgcgatcagtgtccacttcgggacagaaggctcacagggtttatccggcaggtttgcctcatctgctacgtttactgcctccacatctgtcacatccttgatatggatcgccgctgcatcgcggatgctgttggctatgatctgcgcattggcagggttcggatccttaaccgtgatcgtgatgatacgggtattggaagtattggctaccgtcactctgctcttcaagctttcatagctctcatccagcttgtacactgagatgactttctccagtacggtgcgtccaaggatcagctcttcatagtccttggtcagctggctggccagctgcgcatcgctgtaggtcatactgttctcatttcctttgctggtggagatatagatgctggtggtggattcatattgcggtgtgatcagaaaaaagctgacagcgaatccgatggcacctgccacaacagccgccaggataatgatccagatcttgtgcagaagcaggccgaacagatcctgtaaatcgatttcaatttcatcttcctgataagaagtctgcatggtatttttcctctcgttatacataaatgagttctttagttgtgtgtcaggaacctccgggcgttgcctcccgtcagttctgcggcatagacgtctccgtatttcctgcggaggatctctgcgcatttctctatataaggagcccttccctccggtctgtgtgcatccgtagatacaaaatccaccagaccgtttttcaacaggctcttcacattctgttttgtagtaaaaccgttatctccggtcacggaagcacagttcacctggatcagtgccccgatctccctcatccactggatggcagcgaatttccgttccatcagattccggtatctctccacatgggcgatcaccggctgatatccgaatcccagtatctcccttgccgcattgcggatgtatttttcttccgcatagggttcgaattctaccagtacacaatgggaatctcccaaggtgatgatcttaccttcttccatccattctgacatttcttctatgtaataatattctgtcccttttttcagggtgatgtgaattccctcttcgtcagccatctcctgcaccaggcggatcttctcctctacctttgcaagcgttgggcgtcccttccccggcatacagtggggtgtcgtatagatggtactaatcccctcttcttccgctaaccgcagcatggcaagtgtcatgtccatattcttggatccatcatccataccaggcagtatgtgggaatgcatatcgatatattccatgtaacaatctcctttttgatcccggcatggtgccggagcaccacaccggtctcatagaaaccactctacctttttacttcaatttaattcttatttcatttaagaccagtacttcataaggccttatgaaatcaagttcgtaagaagatcttagaactcgccggtcttgggagccttcactgcggttgctgcaacatcagctgcatcaactaccatgaatgcaacgggagagaagctggtgaaagtaccggttacggtgaggtcatcaccgagaacgccggaaccaactacttcccaggtgtaaggtgcgttgggctgtctgtgaaggacatataccatatcacccttcttagcgccgggaaccttgaaaggaacctgtacgccgcctgcagggatctctccgctgtaggatacatcaacagctgctaccagtttagcgctggtaggaacgtttaagtctttcagaacagactcagtggaagtaacagatactacctgtttagccagtgcctcattgggaactgctacagaagctgctgctacggaagtcttaacttcctttgctgctgctacgacatcaacaccggcagcggtctttacaacaggatcagcctcagggctgtttgctgcaaaggtaggaactgccatagctacggtcataactgcaactaataacaaagcatatacttttttcattggacatttatctcctttcgtagagtatagaatggtttctatatataaacggctgtttccaaccggttataccataattagtattagtttacttcctcatagaacacatcgaggatcagctgatacagagcatcgtcatctacgttaaactctgcgtattcctctcccttggtaacttcaccgtctaccgtatagatattatcagtgtcaaaggaactgttcatatattcagtgcacagatacactgcctgatccagaccgatactggtcaccatctgcttctccgcagtctggtacagcttcacgggaagggtcatatcttctttcatgccctgctttaattgattgacgaaagcaaccgcataggccttctgtctggcgatacgcttattattggaagcaatatcggtagacttgaagtcacggtcatggacaaaatggtatgccagttcgcccttcagagtcaaagtatctcctgcggtgaacagcttcggctgcatcgctgccagatcctccggcacagtcacagtcacgccgcctaccgtatcattgagactggcgatactgttcatggacaatgcgcaatagccatggatcggcaatccatagaacagatcggataccgcctgctccatgagctggcagctccagtccctgccgttgccataggcatactgcagagccagctgttcggtccgatcctccacatagcttccgtcggtagcatatacatgcaccggcaccatagaatctctggagatattgatgagctgaacagtcttagcttcatcatccagtactgccaggatcacgcagtctgcctgtcctgccttaccgggtgtcttctcctttgcgatgccatctctgctgtcgattcccagacagaggatattcatgaggttatctttatattggtaagtcttgccgttgtaacggatctgaccttcctgcagttcataggattcttccgcttcctgtgttgcggaagtttcagaatttttctcatttgcagcttcctgcattgcctgtgcggcattggtgctgttgccctgtgcatgctgaagcaggcttgcacggccggtggctctccacacgttgacgaggatcactgcgatcaccgcgaggattgcaagcagtgccagcaatattcccagcgcgcacaatatcttcgtgcggacacgctttttgtgccggatgacatgctgcttattgtattctgccgctttccggcctgtcagttgggattcgtcccggtcatcttcaagcggaatatctatgaggctgtctctgctatcttccttcttcatagtctgtctcccacacataaaatactttgttggtctattctgttgcagctgcagccaaggcagtctccgcgcccagttctctgtcagtcagtactgcctgcaccagaagtcggttattcggctggctgccgatacaggtcactaatgtaatgatctgatcgtccgttgccacagtgatgtccttgtcaatatttgcactcatatcgcgggtgctgaatatggaatccaggtatttctgatagacctccggattcgtaaagtcaaagctgtacagcaggtgtctgtcatcgtagatatgggctgcaaaaatggtgtaatgcagtacttctccgggcagatagatcacaacttctctattcgcatcaaaaaagtccggatcttcgaatttatgtaactgtgcgaacatagaaccgtttttcatattgtgtccatagatcacagtattgttatccgtgaagtccttactgttcatattctcggtgtagatacaaccgggatatccataggaaccgtcgatattatgcatgagataataagaattgtcggatgcatgctgcaggatcggataatcaatatccgtaccgggtacggtgatccaggcatagacatccgggttcaccgcctgaagctcttcaaacttcacagggatgacttcgctctgctcttctgtcgcagtctcggtctctgccgtttccgttgtcttcatgcctgccagcatttcgttgatctcgtcctcggtcatggcactttttgcttcctcagttccctgcacagcgctatccgttgtgctctcagtttcggcagccgcattgtccgtcggacgattatagatgatatgagagattccgctcgctaaaaaataagccatggtcagaccggccacgcccacgattacggaaatgatttttttcttcattagtatttcctctttccagactttttccgggctattgtaagaattccctctgtcactacgtttttaacgtaattttggcttctgttttaaacgtaaccattatatacgtttaaaactggtattgtcaatagtttacggtcttcataatgtaactgggaaaagttcatagaaaatgcttttatgattacactaaaaaatggggcaattcatggggataatgatattggaggtataaatgaaaaaaacatatgatcgtctggctgccggagaacgtattcgcctgaaaagaaatcttttgggattcacgcaggatgaaatggctgaaaaaatagaccgtgccgcaaaatattatgccgatattgaacgtggcagctgcggtatgagtgtagaaactctgatggcgctttccgaagctttagatatgtcactggattatattatttacggaaaagaaaacaacgaaaacggataccccgggcaaaccgccgaagtatccgctattttaactatgctaaataattccgaacaaagagaacgtgattatgcactcagacttttgaagctttttctggcttatcaaaaataaaaccctgactagttaaaaccaaacagcttctgacagatcttgtacccctctacggaaatcttgcgtccgcctcttccgggcaggttcatcgttccgcccatgatgccattgcgcatccacaggtacagtctcttatccttgctcttaagatactcccacaattctttcttcttatccaggtgttcctgagtaccggagcggataagcagaacggatgacactgtcataataatttccagatagttacgcatgtactgatacaggcgtctgttcttgaccaactcctgtttttttgccacaagataatcgatcatcagctttgtcacacggatctgctgatcgatacgggagatcatgaccgtctcgttcacggactgatcctgtcttcctatataatatctgtagaaattcacatccagataatacatatttttcacataaggtaacggttcaaacacatacagattgtccacatagaaagtatgctccggaagcttcagtccgcattcctgaagcagcttcgtacggaagatcacggagtgcatcagtatgtaatgtcccttgataaaatgatggcagtccgcccaggtgaacatcttctctaccggcagaatatgacggtactgaatgactttcttgcgacgctcgccttccttctcatagacatagttgctgatcagcatgtccagtgcctgaccgcctcctgccagctcccgcagagtgtccaggatcttaaaataggcatcctgcttcacccagtcatcactgtccaccaccttaaaatataatccggtagcattggcaattccggtattcactgcagaaccgtgtccaccgttctccttgtggatcgcgcggacgatcgtaggaaactgtgcttcatattcatctgcgatctccgcagtgcgatccttggtagatccgtcatcaacgatcagaatctccacatcctcccctccgactaacagggagtcaatacattttctcatatacttttcagaattataacagggaattgctatggaaagtaatttcatgattgctgtcctttcttcatattaaaacatagttcgaggtattccaagctgcatgctcagtcccttcgcataagctgcaaatgcagaaggaatgggatatctgtcttgcgtctcccggggttcaatatagatccagtccgcagaatccggtcccaccttcttcggtgcgagttcatcgacccgaatgagatatcccttcatatgccattctctgtgggagaaaatatgctttgcatcctccaacggctggatcctgagtacctgcagcccgttctctgtcagatattccttcacctcttccgccgtacagaatcccttcattgacgggaattcatacattccggcgagcaggcccttagacggtcgcttgtgcagcaccgcaagctccgcatcccggataatgaggatcgtcttctcctctatggtccgttcctttgcctttgccttattcgggtactgttgctgtgttccatcttcgtatgccagacagatctgccgaagcggacactcctcacaatgaggggcaccgtttggaatacacacgcaggctccgatctccatcattgcctggttaaaatccccgggcctgtccttcggtataacctcccacaagtccttctccacggcctttttcactttatcctctgagatacatcgatcatccttacgaatgcgggcgatcacacggagcacatttccatctaccgccgggttcggttttccataagctatggaagatactgctcccgccgtatagcttccgattcctttcagtttcagcaattcttcataagaatccggcataattccggcataatcttccatgatctgaattgctgctttctgcagattacgcacccggttgtaataaccaagtccctcccaaagctttaatagagtctcctccggtgcttccgctaatgccgcgatatccggcagggtatccataaatctctgaaaataaggtttcaccgcctccaccctggtctgctgtagcatgatctcagagacccatacgcgatagggtgtgggctgttctctccagggaagaatcctacgattattatcataccattttaaaagtggtttgggaattgcccgaaggtcacctttcctaaagatttccttaacatccgttaaattttcattgtatttatccatag

SEQ ID NO: 267 - DNA, 7424 bp, unidentified
  source 1..7424: mol_type = unassigned DNA
ttagtacagaattttattagctataaccaaacgttgaatttggtttgtgccttcataaatctgcatgatcttagcatcacgcatcattttttcaaccggatattcacgggaatagccataaccgcccattacctgaacagcatcagtagtcacctgcatagccacatcagcagcataacatttagccatagccgcctctttggaaaattccagcccctggtcacgcatccagcatgctttcagtaccatcaatcttgccgtttcaaccttcatagccatatcagcaatcatggactggatcatttggaaagaagcaatcggctggccgaattgttttctttctttagcatattttacagcacaatctaaagcagcctgagccagaccaacggatactgctccaacaaaaggacgtgcagaatccaaagtattcattgctatacggaagccctcgccttcacggccaacacggttagattctggaatcacgacatcctgtaaaatcaattcacaggtattagaggggcggatgcccattttatcctcttttttaccaacagtaaagccaggtgttcctttaggtacgataaatgcggtcaaaccacggataccaccggatttgcgggtattagcaaatacaagataagtatctgcaattccaccattagtaataaacgctttagtaccattaagagtataagttccggcttccttgttttttacagctgaagtagcgacaccaccggcatctgaacctgcaccaggttcagttaatgcaaacgcagccagtttaccatcattaagtaaatcacaatgcgcttgtttctgttcttcagtgccggcaattaaaataggataagacgccagggagttcgcagccattgaggtagcaacacctgcacagcctttgcccagttcttcataaataacggcaactgtaacgctgtccagtccaggtccgccatattcttctggaacaataacattcaaaagccccatatcagcagctttttcaagcagcccgggcatagattgattatttctgtccatttcggcagcgtaaggggtaatttctttttctacaaaatccctcaccatttcctgtaattcaagttgttcttcattaagtgcaaaatccattttgtcctccttgtgttaaggcttaagccaaattgcttgttaaggcgacttgccgtcagcctttaccatttacggggtatatccttaattgtttccacaacaaacaaagtcgtcagtaccgttgccaacagagtatcattttcatcatatacctcagcttcggccacaagagtcattcgtccgcaatggcaaatcttacagacagcataaagtttttcagctgctgtgtattttacaatgttacaacaaaaatttaatgtttcagcttcgacaccaacgctgacagcgctgatttgcaatacagattcaagaagacgataaataacgctgctacggaccttaccacgatgatcaaggtcagtaccggccgtcagagaaaaacttatccgtatctggccgcagtttaactgttctatactcagcgccggatcatctaaaaagcgcctttccagacaagccgattgcactaagaaaagtattcccgatacattttcagtactcacgaactactcatctcctacttgccataatcttactaaaacataaacatattttggacattataccttgtgtattttaccacaaaaaatttactaactcaatagttttcagacaattttatgcgatttatgtaaaaaaaataccacaactgcctccaacgcccacaaaactgacttgtcagtcatttttgttcaaaaaaatccgccaaagttttctttggcggaaagttattaatgatggaacaaacgtaaaccagtaaatgccattgcgatattatatttatcacatgtttcaataacattatcatctctgatacttccgcctgcctgagcaatatactctacaccgctgcggtgagcgcgttcaatattatcaccaaacgggaaaaaagcatcactgccaagagaaactccgtgcagcttatgaagccatacttttttctcttcacgtgtcagcggagctggtttttcggtaaagaactgttcccaaattccatctgcaagtatatcttcataatcgtcagaaatatacacatcaatagtattgtcccgatcaggacgtcgaatactgtccttaaaaggcagttctaaaacactggggttctggcgcagccaccagttatcagctttatttccggcaagccttgtacaatgaacacgagactgttgcccagcaccaataccaatcgcctgtccatctttaacatagcagacggaattcgattgcgtatatttcaaagtaatcaacgcaatcagaagatcacgtactgcatcctcaggaatttctttattgacagtcggacgatttaccagcagctctgacgtaattttagcctcattacggtcctgttcaaaagttataccaaatacatctttcgtttcctgtatctctggaatataagacggatcaattttgataatattataagtgcccttacgtttagtttttaaaatttccaaagcttcctctgtatagccgggggcaataacgccatctgaaacttctcgagccagcatagctgcagtctccttgtcacagatatctgataaagcgacaaagtctccgtaagatgacatacggtcagcaccccgagccctggcataagcagtagccaacggagtcagagctagatcgtcaacataatatatttttttcagtacatcgctcatcggcaatccaacggcagcaccggctggacttacatgtttaaaagatgctgctgcaggcaggccggtagcttcctttaattcttttactaactgccagctgttaaaggcatccagaaaattaatataaccagggcggccgttcaaaacctcaattggcagctcacctattttactataaatacgcgccttactttgatttggattacagccatacttcaattgcagctctttcacgactattcctcctttaaaatatataaaaaaaccgacacttctggggtaaaacgcccagacggtcggcaacaccggtcatactccacgtggttaatccacttccgtcagttatatgacctacttctgctttagattatactttttaccgctctttttgtcaattatccttttatctcttgtccaactatgctacaatttagaaaatactccaaaggagatgttttaatgacttactgttacgtctgcccacaccgctgcggagttgacagggcagaaacaatgaacagtccaaatggtattttcggttcctgcggctgcggtatgcaaccaatagttgcccgtgcggcactgcatatgtgggaagagccctgcataagcggcaccaaaggttcaggcactgttttttttagtggctgcaatttacattgtgcattctgccaaaactacgaaataagctgtttaaataaaggacaggaaatatccgttgaaagattaaaagaaatttattttgacttaattaaacaaggagcccataatatcaatttagttacagcaacacattttactgaggctattatcgcaagtttacaggaaccattgccagtccctgtaatttataataccagtggttttgaaactgtcgatacaatacacagattgaaaaataaaatacaaatatggcttcccgatctaaaatatagtgacgatttagccgcaataaagtacagtaatgcgcctaattattttaatactgctacaacggccataaaaaccatgtacaaacaagtcgggccctaccaaatcgatgaaaatggtttattaaaaagtggtgtaattatcaggcatctgctgttaccgaatatgttagaaaatacactaagagtaatagactggatcgctgacaattttgaaccggggcaggtcctgtttagtctgatgcatcaatatattccatgcggccgagccgctgaataccctgaaataaaccgtgttgttactgcagaagaatatcaaaaagttgagcagtaccttttcaattccggtattgaagacggctttgttcaggaagataccgctgccagcgctgattttattcccatctttgatgggactggagtttagttgacaaagattttataatcctatattataaaaatataattatgaatattgaaaggacacttgaacgaatgaaaaactgatccaatttcgcaccttatctgaaaaagacacaaaaacagcttaaaccaaaagctttgttaagtgttgtcttttatcagtaagtcagaatggatcattttctgcgatttgaggctaagtctacctttacacctcccattctgtcttgaatcgggaggtttttattgtcttcgaaagttaggagttgaaattatatgtacatcctcgaaaccaattcatttaaatattatttaggcgaaagactattattcaaactgcctgctttaaaactacatacaaaaagccgtataggcctgatcgggctgaacggaagtggaaaaacaactttattagagttattagcaggtataagaccaattcctgcagccgcaaaaatcatttgcaaaacaacaatgactatactaccgcaattaaaagaaagactctccaaaagcggtggcgaaacgactcaagcctacatcctgcaggcgctcaaacaacaatccggtttgctgctggcagacgaaccaactaataatcttgatatggaccatttgttatggcttgaaaaggaacttcggcattactcaggagccttaatattagtttcccacgatcgtgattttttagatgcattatgcaatgaaatctgggctttggacgataaacaacttcaaatatatcaaggtaattacagtaattatcagcagcaaaagataatttctgaaaaaactcatgatcaagcttatcgtaaatatattatgcaaaaaactcatttagaaacagctttttctgccaaacagcagcaagcgcaaaaagctgttaaaaccacgaagatatctttatcagaagccaggattaccggagctaaaccctactttgctaaaaaacagaaaaagttacagcaaacaggtcaatccctactgacgaggttagacaaacttaaacagatagaaaaaagacaatccttaccaataataaaaatgaatttactgtcttcaaaactatggcagggacaaattttagtaagagcacataactggtcttatattattgataaaaaaccgctctggcaaacagcaagtttttcagtaaaatccggcgacaaacttgccatcatcggaccaaacggctgcgggaaaacaactttactcaaacaatttttaaaagcacacaacaaacacttgccaaatgtgcaaatagccggcggagcaaaaataggttacttcagtcaggatattgatattcttgatcctgataaaaacctgctccgtaacctacagtcaacgtcttcacaaagcgaagctttattacgtactgttttaataagacttcgtttcaaacgcgaagatttttttaaaccaatacagcttttaagcggcggtgaaaaagtcaaagctgctttagcaaaaatattagtcagtgactgtaatgtacttatgctagacgaaccaaccaatcacttggatctggatgctgtaactgctttagaagaattattatgcaattatccaggaactttgatttttacaacccatgaccgccgcctgcttaaagccattgctaaaaatttattagtctttgatggaacaaaactgaactttttccctgggccatatgacgactactcaaataaacaaataagcactgagtatattgaagcaacagcagatattttacttatagaaaataaactggctgaaattatcagtcaccttagcctcaatccaactgaaaaattagaagcagagtttcaatcattactggcaaaaaaacgccttttattgtcaaagcaatcatcttaatttacaaaatagtttgcattagtcgaatttagctgttaaaatataacgcacaatgtattttattttgcaatttgtattcaaggagaacgatgataaacaattcacataataaatatatcattttcatattgttgcaaagttttctatacggcttaggtaatccactcactaaaattgcttttgccagtatcacacctttatggtgtctggcctttcgttttggtctggctttttctctattcgcaattttctttgcaacacgcttaaggaaacagctgcaggcactttctgcaagccaatatctgccagcaggattatgtatggcttcagcttatatttcatgtaatctggcattagaaggaactacggcaacgaatgttggctttattatgtccttatcagtaattttcgcaccgcttttgtcaataatagtcttacagcgaccttataaaatttcacatcttcctatacaactattagtcattctcggtatgtatctactctgtagtaatggaggaacgttttcttttaaccagggagatttatgggcattgcttacagcagtcagcgtcgcaggagcactggtctttggagaaaaatctctgaaagcaacagatgctatcactatttctgctattcaaacctttattacggcagttatcagcatcgcaggagctttattattcgacgatatcagcactatcactaaaattcaaccagaagcctgggctgttgttatctatctggctattacatgtacctgcctggcttattttctgcaaaacgctgccttgaaattcttatcttcctccttagtatcaatgctgcaatgtactcaacctattttaactgctgcggcctcatactttttacttaatgaaaaattaacttttacaggtatgagcggagctgtaataattttagcttgtataatttctgaaaatattttagaaaaaaagtaaaaccgcggtaaaccgcggttttacttttacttttgtactttattacgtctttcagcttccatcttcttaaaagcttctctttcctgacaaagttcctcatataaagccaggccattccaacttttattattttccgtaatcatcgcttttaactctattcttcctacccctacacgctgcaaagcaattaaaaatttttgtaacttgctgccgtcaaatccatgcagcaccaacatttcttcctgaaattcttccccctgataaacttctccgtgattttctattccagaaattcccaataaagctcccagcggctgctcatactctgctcttgcaacctctttaaacctcacctgcatcatcatacagaccattttaatcatttttaacttttcttcattgaaattatataataaagcaacagaattgttcat

SEQ ID NO: 268 - DNA, 8390 bp, unidentified
  source 1..8390: mol_type = unassigned DNA
atgaacggcaaaccgaacgtcgagcctgcgtggatgtcattgaaacgtctggtcgagacccgtatgatcgagatactccgcaaggaacaggacaacaaaagatacatccggctatacggaacggaagactattggcatgctttcgaagagtcggcctttcagttggagcggctcttccggaaaggagaaaccaccttgttcagacataaggactatccttttccagtggtgatggtcagcattcccgacagcgagttgcgggcttacatccagcagcatattccggtttgtgacaagcacgattacaagaaactgctggcggcagaattctccgccgcagagtatcgtgcatggcatgaacacgcggtgaaagagtttttgtaattctttacgattcccgatgttcgtatcgttttgcggaaattgaggccaaagtagtcacatgcgaccaagcacacgccttgattgatccctggctcacggaagaatcactcaaaaagagcaaggcacagctgattcgcctcttggccgatttcgaccgtcagtttggccgcggaggagagggggggggcatggattcgagatccgagcaggctgttttcggtcttcgaatttcaaacaaataaaatattcatacatcaaatcatgtatcgtttaattgaaaaactgcgactggatcgttatatcagttcacggttgattcttgcattggacctgttggtttcggtcggggcctctatcatctcgctgttagttgcaagcattcttttgggtgccgaagcccttatctggaaaacaatcggctggtggctcggaggatccgttgtcttttcctggatcgcgttcgtgttgctccaaacccacaaatcaatcatccgtcacgccaccttgcggggtttgggccgtttgagtatcgccgttgttttcaagggaattgggatcgcagttatattggctttgggtgtcgctggcccgacatttccagcgatctggatcactctgttgtttgacatattgttgagcctttcaggactggtgattatgcgcgttgccatggttgtcgtctatgactggctcaaagacagccgtcaaaggcattgcaaatgccagcggattctgatctacggaaccggcgacaagggcgtttcgttggtgacccaactccaaaattctcaagagtatcaggtcgtcggtttcctgacctacggcaaaacactgaagaatcatatgctggccgatctcccggtctactacttcgagaccgaagagaatgtcaagtacctgcacaactgcaaggatattgacgccattctcttcgcccacgtccatgaggctcgcgaagagcaggagcgcctaatccattattgtacggactgcaacctcaaggtgctgatcgctccctcgatcgacgaggtggtcgacggcaaggtgcagcgtcaggcaatccgcgagatcaggatcgaggacctgctgggacgtgaagagatcaagatctcgatggacgagatcatcgccaacttccgtggcaagacgatcctggttacgggcgcggcggggtccatcggttcggagttgtgccgccagctggcgacgttcggagtcaaggaactcgtgctgttcgacaactccgagacgccgatgcacaacatccgcctcgagttggaggatcgctaccccaatctgaagttcattcccgtaatcggcgacgtacgcatgattccgcgtctggatttcgtcttccgcacctatcgtccgcaggtggtcttccacgcagcagcctacaaacacgtgccgctgatggaggagaattcctgcgaagccgttctggccaacgttgccggctcgcgcaacgtggcggacaagtgtatcgaatatgacgtcgagaagatggttatgatctcgacggacaaggccgtcaacccgaccaacatcatgggctgtacaaaacgtctggccgagatctacgtgcagtcgctcggtctggccatcgaggccggcaaggtgaagggcaagacgaagttcgtcactacgcgtttcggcaacgtgctgggttcgaacggctcggtgatcccgcgcttccgcgagcagatagccaagggcggtccggttacggttacgcaccccgacatcacgcgcttcttcatgacgattccggaggcctgtcgtctggtaatggaggctgccacgatgtctacgggcacccagatctttgtcttcgacatgggtaagtcggtgaagatcgcccacctggccaggcgcatgatcgaactggccggtctggaggtcgacaaggacatcaagatcgaatacacgggactgcgcccgggcgaaaaactctatgaggaggtgctgtcgaatacggagaacacgcttccgacgtcacacgaccgtatccgcatcgccaaggtccgcgagtacgactacgccgatgctctcaagggtgcgcaggagttggaggagctttgccgcgccgtcgtcattccggacatggttcgcctgatgaagaaaatcgtccccgagttcaagtccaagaactcccgattcgaagagttcgataaagaaacaaagtaaaatcaaccataatgaacacagatttgaacaaagacttaaagattgccgtagccggaaccggctatgttggtttgtcaatcgccacattattggctcagcatcatcaagtaacagcagttgatgttatttctgaaaaggtggagatgctgaatcggaaacagtctccgattcaagacgagtatattgaaaaatatttggccgagaaaccgttgaatcttacagcgacattggatggtgctgcggcctatcggaatgcagattttgtcgtgattgccgctccgacaaactacgaccctgtcaagaactattttgacacaagtcatgtcgaagaggtgatcgatctggtgcttgaggttaatcctcaagctgtcatggttatcaaatcgacgattcctgtaggttactgccggagtttgtatatcaaatacatgcagaagggggtaaaacggttcaatctacttttctctcctgaattcctgcgtgagagcaaagctctctacgacaacctctatccaagtcgcattattgtgggtattccccaaatcatcgacgatgagcggttcaaggaggagaatgatgccattcgtgcaatcgccgatattcaggcgcttaaaaagtcggcccatacgtttgccgctcttctgcaggaaggggccatcaaagagaatatcgacacactgtttatgggcctgaaagaagctgaggccgtgaagctctttgccaatacctatctggcccttcgagtcagctacttcaatgaactggatacttatgcagaggtaaaaggtctggattctcaagccattatcctcggagtaggtctggatccccgtattgggactcattacaacaatccatcgttcggttatggagggtattgcctgccgaaagacactaaacaaatgctggcaaattatgcggatgtccccgagaatctgatcgaggccatcgtcgaatcgaatcgcacccgcaaggatttcattgcggatcaggttctgaaaaaggctggatattatagctactcttcgacaaatgattacaataagaagcgggagaagccaatcgtgatcggtgtatatcgcctgaccatgaaatccaatagtgacaatttccgacagagttcgattcaaggcatcatgaagcgcatcaaggccaagggcgcaacggttatcatttacgagccgaccctcgaggatggatcgacatttttcggcagcaaggtcgtcaacgatctcgagaaattcaagcaaatgagtgctgctatcatagcaaatcgctatgacgcctgcctgggcgatgtcgagacaaaagtctatacccgagatattttcagaagagattaaacagcctattatatgttaccctacaatataatactgaacggcaaaacagttctggtaactggagttgccggctttatcggatcgaatcttgccaaacggcttttgacggactatgcagaactgcaagtcatcggtatagacagcattaccgactattacgatgtctccctgaaacatgatcgactgaaaggcctggaagaatttggagatcgatttgtgttcattcacgactcgatagcaaatcgggaaatcatcatccgcttgtttgacgaatataaacctgctatcgttgtaaacctggcagcacaggcaggcgtcagatacagcattaccaatcctgatgcctacgtcgaaagtaatctcatcggcttttataacattttggaagcctgtcgacacagttacgataatgggcagacaggagttgaacatctggtttacgcctcctcatccagcgtatacggctcgaataaaaaggtaccctattcgaccgatgataaagttgataatccggtatcgttatacgccgcaaccaaaaagtcgaatgaattgttggcgcacgcgtactccaaactatataacataccttcaaccggattacgattctttacggtatatggccccgcaggacgtcctgatatggcctacttcggatttacggacaagcttgtaaaaggagagaagatacgcatctttaattacggaaactgcaagcgggatttcacctatatcgacgatattgtcgagggagtcgttcgggttatgcaacatgcaccggagcgcataactggagaagacggactgccgttgccgccttacaaagtctacaacataggcaacagccagccagagaatctgttggattttgtcgatatcctgcaacaggaattagtacgagccggagtcctgcccgcaaattatgcttttgaagcacacaaagagctcgttccgatgcagccgggagatgttcctgtaacatacgccgatacaacacctcttgagcacgactttgggttcaagccatcgacattccttaggaacggattgagagtatttgcagaatggtatgcaaagtttcacagcgataaataatcactgcctcatatcaacgacatccattctgcatctgcgcgcaatacaaacactttcaaactaaaaaagcacaatacattattttaagcactatgagtattttcaaagacaaaatcctgctaatcacaggcggtaccggaagtttcggcaatgcagttctgcgtcgttttctcgactctgatatccgggaaattcgcatcttctcccgagacgagaagaaacaggatgacatgcggcacttccttcaggcaaatcgtccggacgtttcaaacaaagtcaaattctatatcggaaatgtacgtaaccgcgaggctgtagacttcgcgatgaacggagtagattatgttttctctgcggctgcgctgaagcaggtgccctcttgcgaattctatccgatggaggctgtacgcacgaatgtagaaggcaccaataatgtacttctctccgccatcgctcacggagttaaaaatgtcgtcgtcctctctacggacaaagcagcctacccgatcaatgccatgggtatctccaaagcgatgatggaaaaggtcgccattgctcaaggacgcgctttgggtccggatgcaaaaaccaccatttgctgcacccgttatggaaatgtaatggctagccgtggttccgttattcctctttgggtagagcagatgatggaaggtaagccgatcaccatcacggatcttaacatgacccggttcatgatgacacttgatgacgctgtcgatcttgtcatgtatgcctttgagcatggcaacaacggtgacctcttcgttcaaaaggcgccggccgcaactctcgacgtacttgcagaagccctcaagcaggtttatgccaaggtggatccccaatacggagagaccgaggtgaaaatcatcggtactcgccacggcgagaaactctatgaaacgcttgtcacgcgcgaagagatgcttcgctcggaagattgcggcaactatttccgcattccttgcgacgcccgcgacctcaactacgacaaattcttcacggaaggcgatgatgccatcaaccgcatggaggactatcacagccataacaccaagaggctggatgtcgaaggcatgaaggctcttctcctcaaactcaatttcatccgcgaagacctcggcctgcagcccaaagcaaagtcccgcgattatagaagtgaataacagatgaagattctggtaaccggagcaaagggtttcgtgggtcggaacctttgctcccaacttaataacatcaaaacaggtaaggccaagtgctatggagaccttcagattgatgaagtctttgagtatgacttgaacagcaccatggagcaactggacgcatggtgctccgaatgtgattttgtattcaacctcgctggcgtaaaccggcctcagaacccggaagagttcatggccggcaatttcggctttgcctcaacgcttcttgacacgctgaagaagcatgggaacaaagcccctgtcatgctctcgagttcggcacaggcatctctttccggccgtttcggcaacagcgaatatgggcgcagcaaaaaggcgggcgaagatctctttcttcggtatggagcggaaaacggcataaaggttcttgtttaccggttccccaatctctacggaaaatggtgtcgtcctaactacaacagcgccatcgccacgttctgcaacaacattgccaacgacctgcccatcacggtcaatgatccgaaagtggagctcgaggtcctttacatcgacgaccttgttgaagagatgatcgccgctctgaaaggccaggagcaccattgcgagttcgaagggctgaccgtattgccttctgcggaaggacgttactgctactgtcccgtcactcataaggctacgctgggtgaaatcgttggccttctgcaccagttccgcgacatgccgaagacgctgatgatccccgagatcccggccgacagctttgccaagaggctttacagcacctatttgagctatcttcccaaggataaggccatttttgacctgaagatgaactgcgatgaccgcggctccttcaccgagttggtccacacgctcaactgcggacaggtaagcatcaatatcagcaaaccgggtatcaccaaaggtcagcactggcaccacaccaaatgggagcaattcatcgttgtttccggccacggcctgattcagcagcggaaagagggtacggacgaggtcatcgagttcgaagtctcgggcgacaagattcagagcgtcatcatgctgcccggatatacgcacaacatcataaacctctccaagactcaggatcttgtaactgtcatgtactgcaacgaggttttcaacccggagcggccggacactttcttcgatcccgtagcaagcgaataaaagccgcaagatggctgaataatcaaaacgatctatggaaaccaaaactccgaaattcgattacagtgacattcactggcaaaataacggcaaaatcaaactctgcatcatcgtcggcacccgcccggagatcatccggcttgctgctgtcatctccaaatgccgcaaatatttcgatgtgattctggcccataccggacagaactacgactataacctcaacggcatcttcttccgcgacctgaaactcgccgaaccggaagtctacatggatgcagtcggagatgatctcggcgcgacctgcggcaacatcatcaactgcagctacaagcttttcgctgcaaccaaaccggatgccgtactcgttcttggcgacaccaacagctgtctgagtgtcatcggggcaaaacggctccacattccgatttttcacatggaggccggcaaccgctgcaaagacgagtgcctgccggaggagacgaaccgccgcatcgtggacatcatctcggacgtcaatctcgcctactccgagcatgcaagaagataccttgctgaatgcggacttccccgtgagcgtacatacgtcaccggttctcccatggccgaggtgctccataagaaccttgccgagatccaggcatccgatgtacacgagagactcggactcaagaaggggcactacatcctgttgagtgctcaccgcgaagagaacatcgacacggagaagaacttcctctgccttttcaatgcgataaacgcaatggccgagaagtatgacatgccgattctctacagttgccatccccggagccgtcaccgccttgaggctacaggtttcaaacttgatccgcgagtacaggtccagcagccactcgggtttcacgactacaattgccttcagatgaacgcattcgctgtcgtttccgattcgggcacccttcccgaggagagttctttcttcaccagcgtaggacatccttttccggca

SEQ ID NO: 269 - DNA, 21253 bp, unidentified
  source 1..21253: mol_type = unassigned DNA
  misc_difference 5480: note = a, c, g, or t
  misc_difference 5481: note = a, c, g, or t
  misc_difference 5482: note = a, c, g, or t
  misc_difference 5483: note = a, c, g, or t
  misc_difference 5484: note = a, c, g, or t
  misc_difference 5485: note = a, c, g, or t
  misc_difference 5486: note = a, c, g, or t
  misc_difference 5487: note = a, c, g, or t
  misc_difference 5488: note = a, c, g, or t
  misc_difference 5489: note = a, c, g, or t
  misc_difference 5490: note = a, c, g, or t
  misc_difference 5491: note = a, c, g, or t
  misc_difference 5492: note = a, c, g, or t
  misc_difference 5493: note = a, c, g, or t
  misc_difference 5494: note = a, c, g, or t
  misc_difference 5495: note = a, c, g, or t
  misc_difference 5496: note = a, c, g, or t
  misc_difference 5497: note = a, c, g, or t
  misc_difference 5498: note = a, c, g, or t
  misc_difference 5499: note = a, c, g, or t
  misc_difference 5500: note = a, c, g, or t
  misc_difference 5501: note = a, c, g, or t
  misc_difference 5502: note = a, c, g, or t
  misc_difference 5503: note = a, c, g, or t
  misc_difference 5504: note = a, c, g, or t
  misc_difference 5505: note = a, c, g, or t
  misc_difference 5506: note = a, c, g, or t
  misc_difference 5507: note = a, c, g, or t
  misc_difference 5508: note = a, c, g, or t
  misc_difference 5509: note = a, c, g, or t
  misc_difference 5510: note = a, c, g, or t
  misc_difference 5511: note = a, c, g, or t
  misc_difference 5512: note = a, c, g, or t
  misc_difference 5513: note = a, c, g, or t
  misc_difference 5514: note = a, c, g, or t
  misc_difference 5515: note = a, c, g, or t
  misc_difference 5516: note = a, c, g, or t
  misc_difference 5517: note = a, c, g, or t
  misc_difference 5518: note = a, c, g, or t
  misc_difference 5519: note = a, c, g, or t
  misc_difference 5520: note = a, c, g, or t
  misc_difference 5521: note = a, c, g, or t
  misc_difference 5522: note = a, c, g, or t
  misc_difference 5523: note = a, c, g, or t
  misc_difference 5524: note = a, c, g, or t
  misc_difference 5525: note = a, c, g, or t
  misc_difference 5526: note = a, c, g, or t
  misc_difference 5527: note = a, c, g, or t
  misc_difference 5528: note = a, c, g, or t
  misc_difference 5529: note = a, c, g, or t
  misc_difference 5530: note = a, c, g, or t
  misc_difference 5531: note = a, c, g, or t
  misc_difference 5532: note = a, c, g, or t
  misc_difference 5533: note = a, c, g, or t
  misc_difference 5534: note = a, c, g, or t
  misc_difference 5535: note = a, c, g, or t
  misc_difference 5536: note = a, c, g, or t
  misc_difference 5537: note = a, c, g, or t
  misc_difference 5538: note = a, c, g, or t
  misc_difference 5539: note = a, c, g, or t
  misc_difference 5540: note = a, c, g, or t
  misc_difference 5541: note = a, c, g, or t
  misc_difference 5542: note = a, c, g, or t
  misc_difference 5543: note = a, c, g, or t
  misc_difference 5544: note = a, c, g, or t
  misc_difference 5545: note = a, c, g, or t
  misc_difference 5546: note = a, c, g, or t
  misc_difference 5547: note = a, c, g, or t
  misc_difference 5548: note = a, c, g, or t
  misc_difference 5549: note = a, c, g, or t
  misc_difference 5550: note = a, c, g, or t
  misc_difference 5551: note = a, c, g, or t
  misc_difference 5552: note = a, c, g, or t
  misc_difference 5553: note = a, c, g, or t
  misc_difference 5554: note = a, c, g, or t
  misc_difference 5555: note = a, c, g, or t
  misc_difference 5556: note = a, c, g, or t
  misc_difference 5557: note = a, c, g, or t
  misc_difference 5558: note = a, c, g, or t
  misc_difference 5559: note = a, c, g, or t
  misc_difference 5560: note = a, c, g, or t
  misc_difference 5561: note = a, c, g, or t
  misc_difference 5562: note = a, c, g, or t
  misc_difference 5563: note = a, c, g, or t
  misc_difference 5564: note = a, c, g, or t
  misc_difference 5565: note = a, c, g, or t
  misc_difference 5566: note = a, c, g, or t
  misc_difference 5567: note = a, c, g, or t
  misc_difference 5568: note = a, c, g, or t
  misc_difference 5569: note = a, c, g, or t
  misc_difference 5570: note = a, c, g, or t
  misc_difference 5571: note = a, c, g, or t
  misc_difference 5572: note = a, c, g, or t
  misc_difference 5573: note = a, c, g, or t
  misc_difference 5574: note = a, c, g, or t
  misc_difference 5575: note = a, c, g, or t
  misc_difference 5576: note = a, c, g, or t
  misc_difference 5577: note = a, c, g, or t
  misc_difference 5578: note = a, c, g, or t
  misc_difference 5579: note = a, c, g, or t
  misc_difference 16992: note = a, c, g, or t
  misc_difference 16993: note = a, c, g, or t
  misc_difference 16994: note = a, c, g, or t
  misc_difference 16995: note = a, c, g, or t
  misc_difference 16996: note = a, c, g, or t
  misc_difference 16997: note = a, c, g, or t
  misc_difference 16998: note = a, c, g, or t
  misc_difference 16999: note = a, c, g, or t
  misc_difference 17000: note = a, c, g, or t
  misc_difference 17001: note = a, c, g, or t
  misc_difference 17002: note = a, c, g, or t
  misc_difference 17003: note = a, c, g, or t
  misc_difference 17004: note = a, c, g, or t
  misc_difference 17005: note = a, c, g, or t
  misc_difference 17006: note = a, c, g, or t
  misc_difference 17007: note = a, c, g, or t
  misc_difference 17008: note = a, c, g, or t
  misc_difference 17009: note = a, c, g, or t
  misc_difference 17010: note = a, c, g, or t
  misc_difference 17011: note = a, c, g, or t
  misc_difference 17012: note = a, c, g, or t
  misc_difference 17013: note = a, c, g, or t
  misc_difference 17014: note = a, c, g, or t
  misc_difference 17015: note = a, c, g, or t
  misc_difference 17016: note = a, c, g, or t
  misc_difference 17017: note = a, c, g, or t
  misc_difference 17018: note = a, c, g, or t
  misc_difference 17019: note = a, c, g, or t
  misc_difference 17020: note = a, c, g, or t
  misc_difference 17021: note = a, c, g, or t
  misc_difference 17022: note = a, c, g, or t
  misc_difference 17023: note = a, c, g, or t
  misc_difference 17024: note = a, c, g, or t
  misc_difference 17025: note = a, c, g, or t
  misc_difference 17026: note = a, c, g, or t
  misc_difference 17027: note = a, c, g, or t
  misc_difference 17028: note = a, c, g, or t
  misc_difference 17029: note = a, c, g, or t
  misc_difference 17030: note = a, c, g, or t
  misc_difference 17031: note = a, c, g, or t
  misc_difference 17032: note = a, c, g, or t
  misc_difference 17033: note = a, c, g, or t
  misc_difference 17034: note = a, c, g, or t
  misc_difference 17035: note = a, c, g, or t
  misc_difference 17036: note = a, c, g, or t
  misc_difference 17037: note = a, c, g, or t
  misc_difference 17038: note = a, c, g, or t
  misc_difference 17039: note = a, c, g, or t
  misc_difference 17040: note = a, c, g, or t
  misc_difference 17041: note = a, c, g, or t
  misc_difference 17042: note = a, c, g, or t
  misc_difference 17043: note = a, c, g, or t
  misc_difference 17044: note = a, c, g, or t
  misc_difference 17045: note = a, c, g, or t
  misc_difference 17046: note = a, c, g, or t
  misc_difference 17047: note = a, c, g, or t
  misc_difference 17048: note = a, c, g, or t
  misc_difference 17049: note = a, c, g, or t
  misc_difference 17050: note = a, c, g, or t
  misc_difference 17051: note = a, c, g, or t
  misc_difference 17052: note = a, c, g, or t
  misc_difference 17053: note = a, c, g, or t
  misc_difference 17054: note = a, c, g, or t
  misc_difference 17055: note = a, c, g, or t
  misc_difference 17056: note = a, c, g, or t
  misc_difference 17057: note = a, c, g, or t
  misc_difference 17058: note = a, c, g, or t
  misc_difference 17059: note = a, c, g, or t
  misc_difference 17060: note = a, c, g, or t
  misc_difference 17061: note = a, c, g, or t
  misc_difference 17062: note = a, c, g, or t
  misc_difference 17063: note = a, c, g, or t
  misc_difference 17064: note = a, c, g, or t
  misc_difference 17065: note = a, c, g, or t
  misc_difference 17066: note = a, c, g, or t
  misc_difference 17067: note = a, c, g, or t
  misc_difference 17068: note = a, c, g, or t
  misc_difference 17069: note = a, c, g, or t
  misc_difference 17070: note = a, c, g, or t
  misc_difference 17071: note = a, c, g, or t
  misc_difference 17072: note = a, c, g, or t
  misc_difference 17073: note = a, c, g, or t
  misc_difference 17074: note = a, c, g, or t
  misc_difference 17075: note = a, c, g, or t
  misc_difference 17076: note = a, c, g, or t
  misc_difference 17077: note = a, c, g, or t
  misc_difference 17078: note = a, c, g, or t
  misc_difference 17079: note = a, c, g, or t
  misc_difference 17080: note = a, c, g, or t
  misc_difference 17081: note = a, c, g, or t
  misc_difference 17082: note = a, c, g, or t
  misc_difference 17083: note = a, c, g, or t
  misc_difference 17084: note = a, c, g, or t
  misc_difference 17085: note = a, c, g, or t
  misc_difference 17086: note = a, c, g, or t
  misc_difference 17087: note = a, c, g, or t
  misc_difference 17088: note = a, c, g, or t
  misc_difference 17089: note = a, c, g, or t
  misc_difference 17090: note = a, c, g, or t
  misc_difference 17091: note = a, c, g, or t
agtcatgacacaagaaaagctccctcacaggaaggagctttgtctacagtctgagcctgaggcttctttagaagcactcaggctttatcattctgaaaactagatctggaactgatgcatcagctgtaacatagtatgtacctgcgcggactgttcttcgctgacagcggcggtctcctgagaagatgcggagttgttgtccacgattccggccacatgagcgatgttttcatcgatctgctggacgctggacacttcagcctgaagggcctgtgccatatcatccatacgcttggtagaagcctcggcttcttccattacctgatccatgctggcttcggtttcttctgcaatggcgattcccttgttgacagcatcgatggtgctctcgatcagctttgtggtctctccggcagcctcggtggactgttccgccagattcttgacctgctcggctacgacagcaaatccgcggcctgcttctccggcacgggcagcctcgatggaggcattcagtgacaggaggttggtctgggaagcgatatcctcaatgacctgaatgatagaacgaatctcctcggaacatttactgatctcaccgattgcgactttcagttcctgcatcttggcattgccatcagcaaccgtctgtgcggactgcttggagatatctgcggtctcctgtgcaactctggctttttcttcaatactctttgccatagcgtcgatcatctgggatgcttcggaaatcttggaggcctgtgcggtacagccttctgccagatcggtagctgcctgtgccagctgctcggaaccaccatcgatctcctgtgcgctgacctgaatggtggacagtgtcttcttcatatcggcaatgatcttcaccatggaatccttgatctgtacaaagtcaccgacatattcttccgtaggctctacacggtaattgccctgacccatctgacctaagatctcggaaatctcggtgatcatcttggtaaagttgtcgttcatgaaatgaacggcctgcaccatgatgccgacttcactgtcatcctccggcagatccagacggctgtcaaaatgtccctgcgcaagtactttcatctgctcggatacttttacaatgggaatcagcagttcctgttttgcaaaggtcagtgtggtgacaatcttgcgggcaatggtcaggaagcagagaatgaaaatcaccatggtagtgatcattatcagattcagagtattttgcttctgagccatacgtgcctggatatcattgatacaattatctgtggttgcagtgatctcctgtacggtagattcatattcctcaccaaatacataagaaatagctgcttgtgtatctccggaaccggccttatccatggcttcttcttccagaggaaccagaccgttggacatttcagcaatatggtttaacagtgcccattcattgtcggtcagaccgtctttctgaagaccttcccaggcaatgtcacgatttttgtcctcgtttaattccttcatataattgtcatagtaggtctggtctccggtgactgcgtaagactgtacggcagcggtcagcgtcttggaacccagacgatactggttcagatacatggtagcttccagctgctgggaattgatccggctcagatacatgttggatccgatgaacaggatcagcataacgatgctgatgatcagtatccgataggttgatcttgtgttttgctgcagcatggcagactgactggttactttgctttgctttttcatttgaaatataacctcttttctgtaatacatggtgaactgatgtgttacgaaaattttttcctacagtatactacaattatcggaattatacaaatcttgcgccttaaaaaatacagcaaaaacgcgtaaaattatttatacgaaccatcagtgacgacttacaccctatacaggaagatggtactataaaaagtaagaggcatgattcggaaaagagaagataacggtaaataaacagactgtagacaaagctccctcacaggaaggagctttgtctacagtctgaagaattgtgtcaccacaattcctcttcctcgcaacaaatattatacaacaaacgttcagcccgcgccattcgcaaagtcgcattatcacgctctccgtcgctttgtgtgcaagcacccaatcgccggttctgtcattctatggctgaactattattacaagcatttaataaaacggtcgaaagccttctgtccttcctcggttctcttgtagacaccggcatcttccaatacctgcatgaataccagaccgatctctttctcgacaataccgtcgatattctctgcagtgatagcatcgtatttcggtcggaattcatctacccagtctgcatgctttgccagttcttcatcggctcttaagtccttaccggcgaggattgcttccttcaggtgcgccatctcacccttcaggcgggcgggcagtacggccagacccataacctcgatcagaccgatgttctccttcttgatatgatgcagctttgcatgcggatgatatacacccagaggatgttcctcagtagtgatattgttacgcagcaccagatccagttcgaacttatctccgcgctttctggcaatgggagtgatggtgttatgaggctcgttatcggtgtaggcatagataaatgcctcttcatccgtatattctctccacttgttcaggatcacatctgccagtgcaatgatacggtcagtatccgtaccgctgagacggatcacggacataggccatgccacgataccggcatccacatcctcgaaaccggctacggagaacgttctctctaccggagctttcgccatggcaaactcgtaatggccaccctggaaatgatcgtggcttaagatggaaccgcctacgatgggcagatccgcattggaacctacaaaataatgagggaactgctttacgaaatcaaacagcttacagaaggtcgcatgctcaatcttcataggcacatgctgagagttaaatacgatgcagtgctcattgtaatatacatacggagaatactggaatccccactggctgccgttaatggtcaccggaatgatacggtggttctgacgggcaggatggttcacacggcctgcataaccttcattttcacggcacagcaggcatttcggataaccggcctgttttgccagcttcgctgcagcaatagccttgggatccttctcaggcttggacaggttgatggtaatgtccagatcgccgtatttggtgggtgctacccatttcatatccttgcagatacgataacggcggatatagtcggaatctctgcttaatttgtaataatagtcggtagctgcctcgggagatacctgctcgtacagttcgtggaaatgacggattacttcactgggtctgggcatcagcatgcccatgatcttcgtatcgaaaaggtcacgatacaccacactgttctccttgagaatgcctttttcgtaagcataatccagcatacccttcagaacctcttccagttcatcctcacgcatggtcacattgtcgcgctcttccagttcatccagttcaaacagctccaacagacggttggtcgtgtagatcacatcttcctccggaaccagtcctgtctgtactccgtaggataccaatttacgaattaatacctgaatatccattttttctccattctgcaataccggatttctccggcatcgcactctctattctcgtcggatcttaatttcttacagtgtctgggggccgtcaccgatctctactacatagaaatcagctgcataaccgatcttctccttatatgccttgcctacctgatcgataaaggtgtcaatagcctcatcctttacaatgcttacggtacatccgccaaagccggcaccggtcatacgggatccaatgacaccatctaccttccatgcttcctctaccagagtatccaactcaataccggttacttcataatcatcccgcagggatacgtgggatgcattcatcagctcaccaaacagcttcacatcattgttcttcagcgcttctaccgcacggatcgttctctgattctcatatactgcatgctttgcacgctttctgcggacatcactcttgataatagccttgaacttctcaaaggtctcctcatccaggtcacccagcgtcttgatcttcactacctgctgcagttctgccagtgcagtctcgcactcgctgcgacgctcattgtacttggaatctcccaggcctctctttttattactgcatgcgatcacgatcttcgcattctccagatggatcggtgcatactcatactccagtgtcgcagtatccagaaaaatagcgttgtcctttttacccatggcaatggcaaactgatccatgataccgcagtttaccttgttgtatttgttctcggagaactgtccgatcagcgccagatcctgattggtcacatcaaatccgaagaaatccctcaggatgtagccggtcagcacttctacagaagcggaagaagaaagtccagaaccgttggggatattaccgttcaacagcagatccataccggaagtcactttcatgcccttctcaccgaaagcccagatcactcccttgggataattggtccagcctgcttccttgctgggtaccagatcctccagagaagattcgatcactcccagatgtccgaaattcatggaatagaaacgcagcttattgtcgtttctctttcttgccacaccataggtaccgatggtcagtgcgcaggggaaaacgtgtccgccgttatagtcggtatgttcaccgatcagattcacacgtcccggtgcaaaataagccttggtgccctctgcatctccaaatacttctgcgaaagttttcagaatcgtctctttcatttccatttttctactcctgtctgcttacgatgtaagcctcttacatttatgttttctttcgttacgctccggcggaatgccagactgcgaattctcttgctctatgttttcatcataataaaaaaaaacggttttttctatttatttatgttttccaaacctgtcattatgttaaaagctacgagccatgcaaatccaaaaagaaaaacacgccctgggagcttgctcacgaggacgtgcttttctttttggatttatacggcgacagccgtacatgaagtagacgcagtacgtctacgaatgtgcatggcgcagttccacggcgtactttattccgcgctctgttttcgatactgtaccggagtcatgtcatatgcctttttgaataggcggttaaagtgctccacattctcgtaaccaacgttggctgcaatggtctccaccgtctgattggtctccttcaagagcattcttgccttcttcatgcgttcttcccttacaacctcctggaaggtcatgccnnnnnnnnnnnnnnnnnnnnnnnnnnnnnnnnnnnnnnnnnnnnnnnnnnnnnnnnnnnnnnnnnnnnnnnnnnnnnnnnnnnnnnnnnnnnnnnnnnnngcattcttgccttcttcatgcgttcttcccttacaacctcctggaaggtcatgcccgctttttccttaatgtatttggacaaatacggtttggagagatggaaggtatctaccagcatatccaatgttacatccacatagttcttctggatgaaactgatgatctccacgatccgctcctctctgccggaagtgatatgctgctctgctgccagcttgttcacagcggataccaatgctgcgatggaactcttgatgatatcctcatccacaccgacaccccagtagaacttaccgtcatggacgatgcctacataggtagctgccttagagttggaacctctggaaatcgcatgctcttcgtatacagacagctcataagtaatgccaaagtatgtcttgatcgcgttgctgactgcatccaggcgtccgttacccatagtggtaatacttctggaagctccgccctgatcgatagtcacctctgcctgaatgccgttctcctgtttgaagtggcactccggaatgttgaagatgctgcggggataaatataattttcctcgaagatcgcatagatctccttgggaagtaattcctgatgacgtctgtcggaaatacctttcacaaggtaaccaacctcttccttcatggctgcgggcagcgagaagccaaactgctgcttcaatacgaacgctacgccacctttaccggatacactgttgatacggataacatcggattcgtactctcttcccacatccgcaggatcgatgggcagataagggatatcccaacgcttgccggtcttgccttccttctgccatgccatacctttgctgatggcatcctgatgggaaccggaaaatgcggtaaataccagatctcctgcatagggcactctttcatgtaccttcatgccggtgaagttctcataagcttcgcggatctccataatatgggagaaatccagtccactgtccacgccgtggcacatcatgttcagtgcaacagttaccagatccacgttaccggtacgttcgccgttgccgaacaaagtaccttccacacggtctgctccggccagtacgccgaactccgcatcactgatgccacagcccctgtcattgtgaggatgtacgctgagtactacattgtcacgatatttcaaatgcttgtgcatatattctacctgacaggcaaatacatggggcattgccacctgtacggtggtgggcagattgatgatggccttgcggtcagcggtaggcttccatacatccagtactgcattgcagacttccagtgcataatccacctcagtctgagaaaagctctcagggctgtactcaaaggtgaagttgccttcggtctcgtctgccagattctttaacatctgggcgccgtctactgccagcttcttgatggcttctttatctttcttaaatacctgttctctctgctctacggaagtagagttgtatagatggatcactgcgtggggcgcaccttttaccgcttcaaaggtcttgcggatgatatgttctctcgcctgcgtcaacacctgaatggtcacatcattgggaatcatgtcacgttcgatcaaggcacggataaaattgtactcggtatcggaagaagcaggaaaaccaacctcgatctccttgaaaccgatctttaccaacagcttgaagaatttcagcttatcttccaggctcatgggatcgatcaaagcctggttaccatctctcaagtcaacgctgcaccagatggggggcttggtaatgctgtccttcttcacccagtcgtaggtcacctcggggggcataaaataagttttctgatattttgctgctatgtctgcgctgttcatggaaatcctcctgccatatgattactttttattttcaaaacctgttatttttactattttcacttatctgattgcactatcttaacactcataatttctgtaagcaagttatgttcttatcttgttaattgatgtattttaatgtgacatttttgtcatatacctataaattctggaaaaatgctattttattccgtatttctctcgttttataatttgattaaaagttttaattgcatatatcattttttgttatatttaaaaatatatttttaactttgtgttgttacgttattgattgattttattattatatatttgccagataccgatttctgtacaagcatctattaataaccgattcttgtatatacaaaaacagatgtccgtattgggcatctgtttcgcatttatacactattcatagtctaaacgatttctccgtactgcgtactctcgaaatcgtaacgcccattcgcattccggactatcgtcctacttgctcatgttcgtttacttcccgcataaaaagcccttcttgacagcaagctgtccgaaagggcttttcatgggtaagtttattctatcaaatgatttctactctctcaaaataccggatcagaatatccgcgcagttctcgattcccagcttggtggtatccaggatcatgtggtagttgttcacatcgccccacaccttaccggtattctcataataataggcggcgcgttctgcatcatttttctcaagcatttccttcgcctcatcgtgggaaagactttccttcttcatgatacgttcgatacgatcttccttatctgcgcacacatacacgttaaatacattcggctgatccttcaggatctcagatgcgcagcgtcccagaataatacagggatgttccgccaaccccttaataacctccgcttccgtagcataactgtcaccattcagctcatgctctatgtacgccttatcatacaccggcacccccagcttctcagacaactcctgtgcgatcagactggctcctgttccgaatcttcggctgatagtaattacaaggttcatcgtaagcacctcctttgtaaggtactctcattttatgataaaggcgcggactttgcaagagggatgtctacaaaagcttctgctcgatctgatacagtttctcacctgtcacccgcatgctgtgttcctccgccagtgccctgcctgcccggattctgcgtcttactttttccagcggttcttcatacaagatgtctcggactgcctgctcgtaggaatccagattgctggctttgcgcacctgctcgccgtcggtaagccacccttcatacaccggaatgtctctcacgatcacaggaatctcacaggataatgcctccaataccacgattccttccgtctcttcataactgaaaaaagcaaatgcatccgcaccacagtacgcatcccgcaggatcccggacggttggaaaccggcaaagatcacattttccggcttctctgccacagcccttttgatctctgccggaatcaatgcattgttcccgcccccaaaccatagaaaaataatgtctggcatcctttttgccatttccagaaaatcctcgattccttttctgtgaatcagatgcccggcggatatcacgacctttttatccacaggaagatgaaaaaatatccggaatcgtccacctgcctgctctgttttgtggaaaaattcagtgtccacaccattggtcagtgcgtaaatctcccgatgcagatcatatttcattaacaattcccgggagtattccgttggtgtgataaccacatctccctgtctataacaatggcggatccattttttgaataaaggagccgccagattggaaccgataaaagaattcttaaaatcttccatagtggaatgcccataatagacgacctttttcccctgccgtcttgcccgccgtgccaccagcggcgaatcaggcaatacggtattgatctgtacgatatccgcctctttccagacgtccgtcacggtcacttttgctgctcgcagcatcttctcctgatggcgtatggcgctgccaacgccgctttttgccaccagtgaaagtccgcctttatatatataaattttcataagtatactctcctataataggtggaaaatcacctggaacagtgtcgtcagtcccagactatacagcgcaatggagaaaggctttcccaaaaagatgactgtcacaaactgtttccatgtcatattcgtcgttccggcgagataacagagaaaatcatccggtgccaccggcagaaagattgccagtgtaaataatttcaaaaatctcccctttagctccgtccatgtcaggtatttttcaatcattttcccgggaaacatcttgtacagcaccgatcttcccagacttcttgctattccaaaagcaatacaggaacccacacagattcctatataattatagaaaaatcccggcaccgctccaaagagcagcactcctgccagacagctgatgccacccggtatgatgggaaacaccacctgaacgatctggatcagcacgaagatcagtgcaccgatcattccgaaacggttcacaaactgctgcatagtctccaccgattggaaaatgccgctctgatagctccagactgccagtattccacagaggatcagactaacccaggatgcaatattgacggctctttgccaagcgtttttctctttcgacctgtttttcttcgatctgtcgctggtatagttgttccatgcttcccgcaaatcttttttgggaaaatatttctgcggactgttttgcataactgcacattcctctgcgttcatcgtcttctttctccttccagttcttcaggtctttcaagaattcctcctcggtccggtactgccagccgtttttgtcctcttccacaaccgcccgcaggcattgatcccttctgcataataacggtaatcctgctgccagtgcttccgcataggtaagcccctgggtctcactggtggaagcgctgacgaacagatctcctgccggataataagatgctacttcagcgggtgataccattccggtaaaaataacgctttccgtcacacccagttctgctgcctttttccgtaaagtctccaaataaggaccgccgcctacaatcatcagtattgtgccgctctcctgaattttctgctggtactccagcaattcttccacattcttctcttttgccagacgacctacatataaaagcactgtggtcttccggtccattttatattttcttcggattctctcccgagaatccgtccgggtctgcgcgtcatatttactcagatcaatccccgatgggatcactgataccggacaatgaatgccatagccttttagtaatgtctctatttttgtgctgggagcgatcatactgtccaccttctcggagatctgtcgcgtcaggaactgtaccatatccctgccccatttcttgtaatgggaaaaatagtgggtataatcttcgtatacagtatggtaagtatgcaccagaggggtcttacattcctctgcgatcttttttgccatgaaaaaggtagaaaattcacactgggaatgtacaatatccggattccactctataatcccgcgatacagttcgcgtcccggggacacccgaagtcttgctcccggataaatatatccggcattcacggaacccatatagatcacaccctcttcttcgtaggaacgagctgtacgggacaaggtcaggatcttcacttcatgtcctctttgctgtaattcctcccgcagattgcataccgaagtaacaactccgttgatggccggcttgtaccagtctgttgtgatcaatactttcatcttttttctcccttccgtttattttctctgaattgatctcagcataacagacacaggtaaattccatccgaataaaatcaaaagttttcctaaagtttctgtgagttttttccaaaatgtgcactaaaaaacagcattctccggaaatttccggaaaacgccgtttttaatcgtctttctataaaattattatctttcttctctgaagtacgccagtcccagacttgcggggggctgattctctctcttgctccgcatactggtgatgaccagtaccagtaaggtcacgacataagggatcatcttatacagctcctgatactccatatgctcgataccggtgggcagatacagatacaggatatacagtccgccgaaaaggaaggatgcgaatacgctgatattcggtctccagatagtgaagatgaccagcgcaatggcaagccagcctctgtcaccgaacgcatcgttggaccagacgccgcaggcataatccattacatagtacagtccgcccagacctgcgatcatacatcccacgcaggtagcgatgtatttgtaccgggatacgttgataccggctgcatctgcggtattggggccctcaccgactgctcttaagtgcaggcctgttctggtatgactcaggacatacgatgccgcaaacgcaatgatcactgccagataagccaggaatccataggataaaaacagcttaccaaaccagccaagttttcccgcaaaaggaagggacttactgaaataactgctggtagcagacagtgcaatggaaggtacatcactgtttaccagcttgatcagggatccgccgaagaagttaccgaagccaacaccgaaggtggtcattgccagaccggtcacgttctggttcgcccgcagggtgacagtcaggaagcagtacagcaatcccatcaacagggatcctaacaggcagcagagcatcggaatcgcaatggcaagaaacccattcatgttcgccgcgtctcctgcggatctctcatagaagaaagatccgatgacaccacagatacctcccacatacatgacgccggggattcccagattcagattaccggacttctccgtgatgatctcaccggtactcccgtataacagaggaattccctgtacgattgctctcggaataaatgcaagtaaaaatgaccacatgattactgttcctccttttctgcttttttacggaactgcagtctgtaagtaatgaagaactcacagccgatgataaagaacaggataatacctgtcagaatatcggagtaagaatgattcagtccaaaattggtagagatctcactggctccgcgatccatgaatatgatcaggaagctggagaataccatggtcagaggattgaacttggacatccaggataccagtacagcggtaaatccctgtccacctgcaatcgtggtagtcacagtatgattgatgcctcctaccagaagcaggcctaccagtccgcacagtgcaccggatagaagcatggtacggataattaccttttccaccttaatacccacatattttgcagtattttcgctctcacccacaacagagatctcatatccctgcttactgtagttcaaatatacatacataaatatcgtgatcactactgccactacaatacttaacagatatttggagccgaagatctgcggtagccagcccacattggtgttctggttgatgataccgatcttaccggatcccttgggaacctcccatactatcgtataaaatgccaccaactgagtagctatgtagttcatcatcagcgtagacagcgtctcattggtattccatttcgccttgaaaaatgcgggaatgaagccccagatggctcctgctgccagacttgccacgatcatgcacaggatcacaactgcgttcggaagcttatctcccagacagatcatacaggctgctgctgccagcccgccgatcagcacctgtccctcaccgccgatattccagaatttcatcttaaatgccggagtcaatgccaatgcgatcaaaagcaggatcgctatattctgaaaagtgacccaggtcttgcgaacggatccgaaagcacccagaacgatggactgatatacctgtaaaggattgattcccgtggtgatcgtcgtaatgataccgcacaggatcagtgccagcaggattgccaaaaatcgaatacccagagatttataccagggaagcgcatctctttttacgatatgaaacaaaggctctttattcttttccttcatgttctttgcctcctactctggtcatcagcataccgacctcatttttgtctgtctttctcgcatccagaataccgctcacttctccgccgcacaataccatgatacggtcggacagctccatcagcacatccagatcctcacctacgaaaatcacggcaacgccctttttcttctgttcattgatcaggtcatatatagtatacgaagaattaatatccagtccacgtaccacataagccgtcaacagtacggtaggtgcagacgcaatctctcttccaacgagaaccttctgtacattaccaccggacaatctgcgtaccggagtggtgatacccggggttacaacctccagattttctaccacatcagttgcaagctgtttggaaggctttcggttcgtaaacggtgtatgtccctgtcggaaggaacgtaacatcatattatcggtcagatccatattgcctaccaggcccatgccaagacgatcctccggtacaaaagaaagcgatacacccatctctgcgatcttcaacggatccttgccgatcagcatttccttacttccatcatcttccacatagctgattgtgccggcttctgttacctgcagacctgcaatggcttccaaaagctccttctgtccacagccggagataccggcgattcccaggatctcaccactattggcggtaaaggagacgtccttcagcttaacgataccttcttcgttacgtacggtcagtccctgtacttcgatacggggcttcggattcacaggttccggtctgacaatattcaaagtaaccgcatgtcccaccatcatattggtcatttccgtaacggtggtatcctttgtcagcatgcttccaatatactgaccgttacgaagcacagccaccctgtcggacagagattccacttcatgcattttatgggtaataatgacaatagccttgccgtcatctctcattttccggagaacgttaaagagcttctctgtctcctgcggtgtcagtacagcggtaggctcatccaggatcaggatatccgcaccacgatacagcacctttacaatctccacggtctgcttctgggataccgtcatatcatagattttctgcttcggatctacttcaaaaccgtatttgtcacagatctcctctattttacgggatgcctccttgatattaagcctgccttccagacccaggatgatattctcggtagcggaaagtacatcgatcagcttaaaatgctgatgcaccataccgattcccagccgtaacgcatccttgggggatttgatgacctcttccttaccgttaataaagatctgtccctcatccggaaaataaataccggagagcatattcatcagtgtcgtcttaccgctgccgttttctccaagcagtgataagatctcacctttgtagatatccagattcaccttgtcattggcgatcacggatccaaaagtcttggtaatgtttttcattgaaaccgcagctacttttgtctctttttccatcctagtcacctttccaatttatccatgacctgtaaattttcagatcttttaatacctggcataagcacactggccgccccttttctacctcatccatccacaaaagcaaaagatccataaggtagaaaaagggcggcgcggcgataaacgctgcgccgtccgggctatttcaataagtcaattaatactgctcatccagcaggttgattccatcaattcttacattgaagtaaggagcggaacggaatgcaacatcggactcatggaagtatccgtcacttactacctcatgatcgggagtataatcaggatcggtatcgatatcagcctcatagctgtccagggtcttgccgtctacagtgaaggtagtgatatcatatacgtgagtcttgcctgcgatcagatcagcctttgcagcttctactgcttctgcagtaccctctgctacagcagtaccaaggtcactcagttctacagaaccggtctccagagtaccgcaccagtcggtatcaataggagttccgtctgctacacatttgatagcatactcgaagtaaggctcccagttaactctggaagataccaggaaagtattggggcaggctgcctcagtgcttccgttgtaagatacgttgggaacgcctgcggtctcacatgcggtaggagcacccatggagtctgcatgctggctgatcagtacgcatccgccctcgatcagcttgttagctgcttccttctcagcggtctcatcataccaggaaccggtaaaggttacatccatggtaacgctgggacatacggaacgagcgcccaggaagaaagaggtataaccggacataacttcagcataggtataagcacctacataacccatcttagcctgatcctcggtgatatcaccgttagcgatcatctcattcagcttcatacctgcaacgatacctgcaagataacggccatcatagatggaagcaaatgcattgtggaagttatcaaggccttctgtatgagccttggttccggttgcatggctgaactgaacatcgggatattccttagcggcctcgatgatgtagtcctcatgtccgaagctgtctgcgaaaatgaaattacaacctgcatcagcaagctcacaagctgcttcataagcttcctgtccttcaggaatgttggtcttggtcatgtactcaataccaagcttctcacaagctgcttttgctgcattcaggaagttcagatcataagtagagttctcatcatgcaggaaaatgaaacctgcctttacaccggtaacagcttcactgttggttgctgcttcggtagtacctgctgcctcggtggtagctgcaacggttgctgcatctgtgccggtggtagctgcatcattggatccgcatcctgccagagcagtaactgcgagagccatagctgcgagtaaacttacgactttctttttcataattctcctctttctgcgctgctgcttcgttacagatccatgtagcagcgcaggcacagatctgcagataaaccggtgagtcaacgtaaaaagggcgtatgacaccttcatacaacccctttattgtactctctcaacattagtcagtataagcatttgtctgactttttgtcaagagaagtattaaattattattaactcgtttgcgaatgtggttctgaatagttatctaacgtatctaactcttaagatcggaatgtgatctctccggtcttgtcatccatgctttccacgatcgcgagcgactctacacggatacccttggaacggatcaggtcgccgcccttctggannnnnnnnnnnnnnnnnnnnnnnnnnnnnnnnnnnnnnnnnnnnnnnnnnnnnnnnnnnnnnnnnnnnnnnnnnnnnnnnnnnnnnnnnnnnnnnnnnnngcgagcgactctacacggatacccttggaacggatcaggtcgccgcccttctggaatcccttctcaacggcaatgccgacaccctctacagaagctcccgctttattgacaatgtcgatcagaccctccagtgcgcatccgttggccagaaaatcatcaatgatcagaatatgatcttccggatgcaggaattttttggaaacgatcacgtcatatactctcttgtgcgtaaaggattcgatcttggtggaatatacttcaccgtcaatatttacggactgggacttttttgcaaataccacaggcacatgaaaatgctgggctgccacacaggcgataccgataccggaagcctccacagtcagaatcttcgtaatcttacggtctgcaaacagatgcgcccactcttttcccatttcattgaacagatcaatgtccatctgatgattcagaaaagaatctacttttaatacattccctgcttttaccgtaccgtctttgcgaatgcgctcttcgagtaatttcattgtatgtctcctcttttgtttcttcttaatatattttaatgatgtcggagtcaaaagcccccgactttgatacctacgaattgcttcgtgctacgcactaccacaattctacccaatattcgcatatcgtggaattatcatcccacttttatgctcttatgtctcttattatacgcaggatattagtcctttttcaatagaagaactatatttcttgctattttgacaacattttgctatgttaaccatgagaatactgaaatcacgaggtgccttatgcctatcagaggatatatcatagaaaaatataatactatgactaacgcttatacctgcaaccgtctggtacaggaagcttctgccctggatatggatctgcagattgtagggatccatgatactgtggtctctccgcatggtgttataaatcatggtaaaatactggaacccgtggattttgtcatcaaccgctataaatggggacgggaaaaggatgctataaatgcacttgccacccgaagctataatccattaactgcttataatatctatattaataaatttgaacaggtacgaaggcttcattccaaagcctttttgatcccgaaatatcttctgggaacttcacggttgcctttttcttctattgtagaacaactgggccttccctttgtcggtaaaggactggaaagctccatgggagaagaaatcgtctgcatccgggataaagcttcttatgaggaactctctcttaactacccttcctccaaggaatggctcttcgaagaatttatctcagaaagctacggcagagatctgcgcttttacagcatccgcggagaagccgttgcctgtatgcagcgcacatcccagggggatttccgtgcaaatgtagctctgggcgcttcggtagagccttaccctgtcacttccggcatccgtaccatagccgcagatatttacgagcagaccggactggattttctgggaattgatctgctttttggcagagaaaaaccttatttttgcgaaatcaatgtcatgccgggactggaaggtattgaaaaggcttccggcataaatgttgcgggaaaaattattgagacgatacaatctgactttacatcaaagacttagtgtaaaaaatagttttttcatgcgcaaatatgtgcctgcacagtgtacgaaaatacatgatactaaagtatctggaaaattgtaggctacaaaaaggtatttatatgaataacacttccgaaacatcactgcaatttcataaaatcactacacgtaaggaggcggaagacttcgtctatgcttcctatctgcgagcttccacacatcaggactatgccgcaaaggatgccggaaaaagacatcctgagctgacgagatctctgctttggcaaaaatccgttactccctgcatcgttgtcaccggaagcaagggaaaaggctccgtttccaacatgatctcccgaatcctgcagacaagattctctgtgggactgatgaccagccctcatatcacggactttcgcgaacgcttccgtgtcaatgatacgatgatcagtgaatctgacttctgccgtctgatgacagagatccagccggagattctggacattgcctccgatctgccggagtcggtatgtatcagccccatgggcattcaggcggacctggcactgacttatttttcggaaaagcatacggatttcaatgtatttgaatgcggaaagggtgcaaaatatgatgatgtaaacaacattcgtcacgattatgccgtgatgaaccggattttcttagagcatacaagagagctgggagatacgttagctgccattgcggaagataaatcccacgttatcaccggagagcagaagtgtgtctattttgcggagcaggaaccggaagttctggaagttctgcagcgccgtgccgaaactctgcatattccctataagatctacggtcgggattttcatgcagaaaacatccgttatacctgcttcggaatgcagtttgatgttgaaatcggagacaacatttatgcggatttacaaattccgttgctgggagaacatcaggcgaaaaactgtgctctggcacttgctgtgtgtgtggatgtgctgtctgatctgcgcagggaatccgcagttttttctttgccagacatccggaaaaatctgtctctgctgcactggccgggacgcatggaagtcctgcgttccaagccgtttgtcctgctggatgcctgcatccattccaccagctgtgagaatgtaaaggaagtcctgcgacatctgggggtttggaattgcactgttattgtgggaattccggaggataaggattatgccggggtggttcggtccatggaagaaacggcaagccggatccttctcaccagatccggaaatccgcactatcatttttccaaaaaacagcaagagacattagcgggagcgggcattggtgcagaatggacagactcggtggaacaggcacttactctggcggattctttttcggatcccattgtaatattaggtacgacctccgtgatttcagaagttgagcagatttttcagcaatcttaacttgccctcaccggatacaggtgctacaatgagggcaaatagaagagtagcaaaacattacgcagaaaggagaagtcccatgacaggtatttacggaatcaattattctaataattatagtctgaccggcaattacggatacggttattctaccggtgcggtatcttccgcacagcccgaagagaagggtatggtggtaaattccggaaaatccgatgtagaaaagcccggcagaaagtcttctcccgcagaatgcgaaacctgcaagaaccggaaatatcaggatggttccaacgaaatggtctccttcaaatctgcatctcatatttcaccacaggcttcctcctccagagttcgtgcccacgaacaggagcatgtaacgaacgcttacaacaaggccgcacagaacaacggcaaggttctctccgccacagtgtccctgcggaccgcggtatgtcccgaatgcggcaccgtctacaccgccggcggcaccaccacgaccaagatcagttaccgtgacgagagcaatccttaccagcaaaataagaaatctgccgatgctgccatgctgattggacggaatctggatctgagtgcgtaaatgaaacataatttttgacacgcgaaagcccccaccttttatgatatgtgagggcttttttattttcattttaatacgccacataccagtcccggcagggcaggagagtgaatccatcgaatttttccgcatctgtatagtaaatgatatatatcttatttctgtcaatatgctcccagtcgattcccatagtgaagcggattcccttgcctaggaaagactccggcttgggaggtgcatcgcttaagttcctgttggcaaggtattctgcagcatcaatctcgccgtagagcaaaacactgggatatttgatggcatcttcgatctcgatctcacgaccgctttccgctgcaatctccatggctttctgtacggcttcctcgctgccttcctgaaaataggcactgactagctctttataagaagtaaaa

SEQ ID NO: 270 - DNA, 17811 bp, unidentified
  source 1..17811: mol_type = unassigned DNA
gtaatatgtaatgaactaggtcttaacgaagaggagaaatagataacttccatttgaggaggtgaacactttggatattgagaaaaccaaatcatattacaatcaaataagaagtgaagatttatgtgattgtgattattgtagaaacaatattcatgaagtcaaagcagcttatcatacctcttttatagacactccataaccgtgagttccataacgtaaattgcagattctgtggtgcaattcacagtgtaaattgggcaaatataagcgtcctctcacaagtcatccataacgtgaatgaaagcaaaacggtataaacaaatattattttctttgtgagctatggagataagactcttcagaggcttatcggaatgcccagcgaacagaaacataatatttcgtttataccgtttttcttttcataaacctataaaaccacgacttgcgagaggacgcttatatctgccattcaagccctaagaaagcaccgcagaatctgcaacactacgcaaattaaactccggttatgcagacagcgcgtttttcttgacctgagccaaagcctttgcaacaggtggcagactgatcacgatcaaagtagcgatcgcttccggcacgatataagttgcattgtaagttaaagagtacacaatggcaggtgttccttccggggcatatgcaccgaagaatacgacaccggagatcactgcaaatacataacgtccaaacacggcaacgatataaccaatctgaagtccgtgttttttgtttgcaaaaaatccggcgagccctaaagcaccaaatgccagagggtagtctaaaatcatctgtggaacggtatagaaaattggctccataacaaactgaacaagaccgtaggcaacggcagtcataagaccaacataaggaccgtaccagtaaccaatcagtgcgataaacaacatgctgaataaagtaacggaaccgcccattggcagattcgcaaacttaatcatggagcatactactgcaagcgcaatcgcaacggcagagtagacaagctgttttgtggtgagaattgtttttttctctgcatttctgtggcggatcactgctgcgacaacaacgagaagtgcgataatgactactacaactgcgattccaggtgcagtaagacgtacagagccatcatcccaggctccgatcgtggtagtaaaaaattctttcataaaataaaatcctccttgcgtttcagatcttttgcgccaggaggaaaaaactctatattctatcgtctgatgagaaatatcataaaagcttccttacgccggtattatccggttcaagtaataagggttgatgaaaaatcatctctcagcgttggaatgtctggcaaatgcagcattttttgcgcccctagcgtttttgattctgttataaatactgttaaggtctatgatgccttaacgagtatcaatatagcaagatgcagcgggaaagtcaacctgaaattttcataaaagctcttgaaatcacaaagattccaacaatttgtgggcaaagcaaaagccgcagaacaaaatctgcgactttcttttcagatataaagatcgatattacttccaagatatggtgtgacggaattctccatcatctgaaccatgccggcacctaatgtctgtgtcatatctaaagattttccgagcattgcaactccgatatcttcctgtaatgtaacagggcttgtggaagaaccgatgtcatatgcagaaaccgtacttaatgctgcgtctaaacctgtaatatccataaatcctacctcactttcatttccaatttttgcatataaaatgcaatcattcatgactcattgaagcacttttaatatagcacagatcggtcgttctgtatatagaaaagaaaaatgttactgttcacgcagcagtaaaacacttgctgttttgctgcgtaagaaagtgattcagaaaaatcctcttgacaaataaaacagaaacgcatatactttgcctatcaaatagtttgacaatcaaataattagaaagtcaaacaaaacaatatgaaaaacaacaggcgagagccgggaaagaatgaggaaaagcaaaatgttagaaaagatgaaaccgattattgctgaacagttaaatgtaaatgaggcagagattaagccggaaacaaaattcaaagacgatctgggcgcagattccttagatttatttgaaatggtgatggctctggaagaagagttcggaattgagatcccatcagaggatcttgagaatattgtaacagtcaacgatattatgggttatctcaaagaaaaaggtgtggaagcttaagaccatttacaaatattcaaagagaggcaggaaacaatgaaaacgagaattacggatttgcttggctgtcagtatcctgtgatccagggcggaatggcatgggttgcagagtatcatcttgcagcggcagtttcagaggcaggaggaatcggactgatcggtgcagccagtgctccgccggaagtagtcagagaacagatcagaaaaacaaaagaattgacggataaaccatttggagtcaatgtgatgcttttgaatccaaatgctccggaagtcgcaaaagtggtcgtggaagagggcgtaaaaattgtgacgacaggagccggaaatccgggaaaattcatggagatgtggaaacaggcaggcgtcaccgtaattccggttgtagcaagtgttgcgatggcaaaaatgatggaacgcgcaggggcagatgccgtggtcgcagaggggatggagtccggcggacacattggttcacagaccacgatgacgctggtaccgcaggttgtggatgcagtgaccatcccggtcattgccgccggaggcattgcggacggcagaggaatggcggcagccatgatgctgggagcggaaggtgtgcagatgggaacaaggtttgtggtcgcaaaagaatcgatcgtacaccagaattataaggaacgcattatcaaagcaaaagacatcgattctgaagtgacaggtatgagtaccgggcatccgatccgggtactgcgaaatcagatgacaagagattatctgaaattagaaaaggaaggtgcctcttttgaggagttagagcagttgacactcggctctctgcgcaaagcggtgatcgaaggggatgcagttcatggaagtctgatggcaggacagagcgccgggcttgtgaaaaaagagcagacctgtcaggagatcatagaggaagttgtcacagatgccagagcgctgcttgcaggaagaaaatgacctgacatgcgcagatttgaagatttgagaaaggtgtggttatcaggatgggaaagacagtatttatgtttccgggacagggatcccaatatattggcatgggaaaagaattttacgaacagatccctatttgtaaagaagtgtacgatcttgcttcagaggtgactggattggatatcccggcactgtgttttgaggagaacgaaaaaataaatatcacagagtacacgcagatctgtatgctggctacggaagctgcaatttatatggcattggaacagaacggttatcagccggatgtcacagccggattgagtcttggtgagtatggtgcgttgatcgcatccggagtcatgactgctgaggaagcatttgaactggtgcggaaaagaggcatttttatgcaggaagctgtcccggccggtggagcaatggcagcagtgctaggactggatgcagcggcaattgagcagatctgcagagatacagcagagcagacggggagcgaggtttccatagccaattacaactgccctggacagatcgttatttccggtcaggaggaagcagtgcatctggcaggagaaacatgtaaggcgtctggggcaaaacgcgttgttccattgaaagtcagcggcccgtttcattcgaaaatgctgcagggtgcaggagaaaagttaaaagaagaattaaaaaaagtagagatcagtgattcatttgttccttatattgcaaatgtaacggcagactatgtcacgaaaaaagaggaagtgaaaccattgcttgccagtcaggtatcttcttctgtgcgctggcagcagaccatagaacggctgcttgcagatggtgcggatgaatttgtagagatcggaccgggaagaacattgagtggatttgtgaaaaaagtgaaccgggatgtaaaagtgagcagtattgataaaatggaagattttattcagtttatcggaagtcatgtggaggcgggagcatgttaacagattctttgaaaaataaagtggcacttgtcacgggagccggccgcggaatcggaaaagagattgcaaagacactggcatcatgtggagcgtttgttattgtcaattataacagttcgccggacgcagcagaacagactgtaaaagaaatcataaaacagggtggaatggcagcgcctgtacaatgtgatgtttctgattttgatgcctgcggaaaaatgatggaaatgatcataaacaactatggacacctcgatattctggtcaataatgcaggggtcacaagagatggactgatcatgaaaatgagtgagaaagattttgacagggtacttgatacgaatctgaaaggtgcattccatacgatccgccatgcttctcgttatttcctgaaacagaaatccggtaagatcattaatatttcttctgtttccggcgtcatggggaatgcaggacaggcaaattacagtgcaagcaaagccggagtgatcggtcttaccaaaagtgtggcaagggagcttgcgtcgagagggatcacatgcaatgcagttgcacccggatttatcgaaacagagatgacagaagctatgccggaggctgccagggaagcggtaaaaaaacagattccgcttcagcggacagggcaggtgtcagatgtggccggtgtggctgcatttttagcatcggatctggcagattatatcaccggacaggtgatctccgtggacggcggcatgcacatgtaaagaatatatatcatgaggagaacaatatggcaaaaagacgcgtagtggtaacgggaatgggagcagtcacaccgatcggactgagtgtggatgaattctggcagaatgtaaaagcacagaaaaccgggttttctgaaattacaaaattcgacaccactaattataaatgtaagcttgcagcagaagtaaaagagtttgatgtaaaaaattatatggatgcaaaagaagcaaggcgcatggaactattcagccagtatgccgtggcggcagcgaaggaggcaattgaggatgccgggcttgaaatggatcaggaagatccgtatatggcaggctgtgccattggaagcggcgtgggaagccttcaggcgatcgagcgcgaatatacaaggctgacagaaaaaggaccggggagagtgggacctttattcgttcccatgatgatctccaatatggcagcaggaaatgtttccattcattttggattaaaaggaaaaagtatcaatgttgtgaccgcctgtgccacaggaacgaatacgattggtgaggcattccgtgccattcagtatggtgaggcagacattatggtttccgggggaaccgagggaagtatctgtccgaccgcaatcgctggttttacgtcactcaccgcactcacagcagaaactgatccggagagatgttccattccgtttgataaagaacgcagcggctttgtcatgggagagggcgcagcggtggtcgtgttagaggaattagagcatgcaaaacgccgtggcgcaaagatatatgcagaggttgtcggttatggctgttcttcggatgcgtatcatatcacatctccggcagaagatggcagcggcgcagcaagagctatgttaaatgccgttcaggatgcagggatcacagtggatgaggtcaattacatcaatgcacatggaacatccacacaccataacgatctctttgagacgcgtgcaatcaaacttgcatttggggcgcatgccggtgaaatgaaggtcaattccacaaaatccatggtcggacatatgctgggagctgccggagcgatcgagtttatcacttgtgtgaaagagattgaggaagactatattcatgccacagttggctataaagtgccggatgaggaactggatctcgattattgcaaagaaccggtttcgatggaggtacagtatgcactgagcaattcccttggatttggcggtcataatgcaagtattctattaaaaaaatataccattgtatctgacaaagatatcaatggctgcagataaggaggcagcgatgtcagtattaaacatcagtcagatcatggaaatcctgccacacagacagccaatgctgctcattgattcggtagaagaaattgagtatggtgtccgtgcagtggcgaagaaatgcgtaagtttcaatgaacctttttttgcaggacattttccggaagaaccggtgatgccgggggtgctgatcgtggaggcactggcgcagaccggtgcggtcgcaattcttggaaaagatgaaaaccgtggaaaaacagcttattttgcgtccatcaattctgcaaaatttaaaagaaaagtagttcctggagatattctcacgctggagacggaaattataaaagtgaaaggaccgatcggggtgggaaaagcgacggcaaaagtcggagatgaaattgcatgcattgcagaactcacctttgcagttgagtaacagaatagaaaggcattacatagaagctgtaacagaaaggaaatattatgccagcaattttgagaagaagaaagctgatatccataaaacctgaacgaaaaaatgcagtaacttaccgcaaagaggaagtgcaggcggaagttatgacaccaccacctgcagcggatcagcagaaaataccgggaagtacagtggtctgccccgcatgtaagagagaagtgaacaaggcggaagtggaaaagaataagtatgtctgctatgagtgcggaagctatttccgcgtgcggactaaaaacaggatccgaatggtggcagatgcaggaacctttgaaccatggtttgaatatctggaatcagaaaatccactggattttccggaatatacccagaaggtggaggcagccagggaaaagaccggactgcatgaggcagtgaccatcggacgatgcaaaatatatggggaagagacggttcttggaatctgtgatgccagattcctgatgagcagcatgggacatgtggtcggagaaaaaattgcgctcggtgtggaacgggcgacagatttaaagcttccggttattttgttctgctgctccggtggggcgagaatgcaggaaggtattatttccctgatgcagatggcaaagacgtccgcagctttaaaaaggcattctgatgcagggcttttgtatgtgccggtattgacagatccgacgacaggaggtgtgaccgcaagttttgcaatgcttggagatattatcctggcagagccgagcgcattgatcggttttgcaggcccccgcgtgatcgagcagaccatcggacaaaaacttccggagggatttcaacgtgcggaatttcagttagagcatggatttgtggatgccattgttgagcggaaaaatctgaaaataaccttaaaccgtattttaaaaatgcatcacatcagggaaggttttgctgattttgatccattgcgcatggatgataactacgagccgacagagttaatgcgggagcgcgcggcaagggcaaaaggactgacgccgtgggaaaaggtaaaagccgcaaggaaagtagacagaccttctgccactgattatatggaaaatatttttgatgaatttatggagttccatggggacagatactttcgggatgatccggcaatcgtaggtggagtcgcatatctcgacggtcagcctgtgaccgtgatcggaatccagaaaggaaaagattttaaggactgcatgaaacacaattatggaatgccatcgccggaaggataccggaaagcgatacgtctgatgaaacaggcagaaaaattcggacgcccggtgatcacatttgtaaacacagcgggagcatactgcggaatggaggcagaggagcgtgggcagggggaagcgatcgcccggaatctctatgagatgtcagcattaaaagtaccggttctctgcatcatgatcggggaaggcggaagcggcggagcgcttgccttagcagtcggaaatgaagtatggatgatggaaaatgcaacctattgtgtgctttcgccggaaggatttgcatccattttgtggaaagacggaaaacgtgcaaaagaggcaagtgagattatgaaaatcacggcattggatttaaaatcgctgggtgtcattgaacagatcatcccggaatatggtgtggcagacgcaaaagcctgtgaatcaatctcgcgctatctgaaaggaaatataaaaaagtttcttgaaaaacaaaatggcaggacaggagaacagtttgcgtccgagcgctatgcgagattccggaaattttagcaaaatcacagcggctatgtgcacagagagtacgaatcgttttgtgaccggacagagaagagaggaatattatgaaggtaaaaataacaggaacgggaagctgccttccgaagcttcgcgtgacaaatgatgatcttggtcagatcatggaaacatcggacgaatggatccggtcgagaaccgggattattgccagacatattgcggtagaggagacaaccaccggtatgtccacagaggcagccggcaaggcattgaaaaatgcagatatttcagcggaagatgtggatatcatcattgcggcaactgtttctgcagataaacatcttccgggacttgcctgtgaggtgcagaaaaatatcggtgcagaaaatgcagttgcgttcgacatcaatgcagcgtgttccggttttctttttgcactggatactgcggcgctgtatttagaacatggcggatatcagcatgcgcttgtgattggagcggaaacgctgtcaaaaatgatggactggacggaccggagcacctgcgtgctttttggggacggcgcaggggcagcagttctttcagcaagtaaagaagatggcattttatccatggtgcagggctcggatgggttcaggggcgatgtcttaaactgcatggcgagaaaagtgaacaacccttataaaaaaagtgacacggcactttcctatgtttccatgaatgggcaggaggtgtacaggtttgcagtgaagactgtgccaaaggcggtcacagacgcagtggaacaggcaggcttacatctggaagagattgatttattcctgctgcatcaggcaaattacaggatcattgaagcagtttcgaaaagacttggtcagcctatggaaaaatttccgaccaatctggaggaatgcgggaatatttctgcggcaagtgtgccgattttgcttgataatgtcaataatcatggtatgatgaggaaaggaatgaaaatcgtgttggcaggatttggagcaggcctcacctggggagcaacggtgataaactggtaaaatcaggcgctgaccgcagaaataggagtagatcggatgacaacagatgaaacattaaacgaattattggtcagattgtttaaagacatcatggagattgagggaaaatgtcttgtgacagaagaattcaaagatctcagttacaatgatttccacgtgatcgaggcaatcggagtcaatgaaccaaaaacgatgacaacggtggcaaaactgatgggtgtcacaaccggaacgttgacaaaggcaatggatggactgaccagaaaagggtatgttatccgtgagcgcagtacgcaggataaacgtgtggtatgggtttatctgacagacaccgggaaagctgcttacaaacatcatgaagagtttcatcacgagatgatcgctcagatcaaaagccagcttaccgagcaggagacgccgatactgatttatgcgctggcgaaacttgccgattattttcaccttgtatacaagggtgagaaagaataaagaacagaggtcattgcatcgaaaaactatttttttatgcgatgacctgttttattataagttgaaatgataataattataacctgaaaatataaaaagtaaaatttattgattttttttatgcaaaatgaataatttgaagtcgaatcctgcaaaaaaatagactaatcattagaaaacttcactaaattaaaggaataaagaaaaaaatattgcgtccgccgtcattttataataaaatgtacgtgttgatgagaaatctgcagccggaatcaatgccggagcatttaaaaaatgccggatatctgatttcacatggttgtaaatatatttttaaaggagaaaaaaaatgggatacgttgatgaagtactcgcaaaagtaaaagaaaaaaatgcttcagaacctgaatttttacaggctgttgaagaggtattagagtctttaagacctgttattgatgcaaatgaggaattgtacagaaaaaatgcaattcttgagagaatcacagaaccagaccgtcagattatgttccgtgtaccttgggtagacgataacggacaggttcaggtaaacagaggttatcgtgtacagttcaacaatgccattggaccatacaagggaggattaagacttcatccttctgtaaaccttggaattatcaaattcttaggttttgaacagattttcaagaattcccttacaacacttccaatcggtggtggtaaaggtggttctgactttgatccaaagggtaaatctgacagagagatcatggcattctgccagagctttatgacagaactttctaaatacatcggagcagatgtggacgtaccagcaggtgatatcggaactggtgcaagagagatcggatttatgtttggccagttcaagagaatccgtggttctttcgaaggtgttcttaccggtaaaggacttacatacggtggatctcttgcccgtacacaggctacaggatatggtttattatacctgacaaatgcattgtggaaagatcacggcatgagccttgaaggcaagactgctgcagtttccggttccggtaacgttgcgatctacgcaattgagaaagcacagcagttaggtgtaaaagttgtaacatgttctgattctacaggatggatttatgatccggaaggaatcgatgttgcattattaaaagaagtaaaagaagtaaaacgtgcacgtttaacagagtacgctgctgcaaaaccatctgcagaatatcatgcaaaacagaatggtgagcacggtgtatggcagtacaaagtagatttagcccttccatgtgcaactcagaatgagttagacattgaggatgctaagatgttagttgcaaatggtgttacatctgtaacagagggcgctaacatgcctactacattagaggcaacaaaatacttacaggagaacggcgtattattcgtaggtggtaaagctgccaatgccggtggtgttgctacatctgcattagagatgagccagaactctgagagacttcactggacattcgaagaagttgatggaaaactcaaaggaatcatggagacaatctacgctaacatttctgatgccgctaagagatacaatgcaacagtcggcggacagacagattatgttgccggtgcaaatattgcaggctttgagaaggtcgtggaagcgatgattgcccagggcgtgtgctaataaattagcaacaaataaataattattcaaaaattgagaaccctacacattgcaggaaaacgcaaaagtgtagggtttttgtgttttgccagatgcatgaaaatgcagtaaagtaagcggtttatacatgagagaaggagataagttacaagtaatatacatataatatacgcgtagtatacaaacggttttgcataatatacaaggatgattcgactaaaatgtatttttataaaatagggaaaaaacatagcacagggtaatcaatgaaattacgatttattttgaacaagaattttgaaatggagattgtcggtttatgtaaattgtgatacactaccggcatgagaagtaatcgtgtacagagtggtagcctcccagactagagatcgaggggaggtggtgctgatggatatgtatgaagttttaagcctgttatttttaggcggttcatttctaatcgcactgcttgcctacatagataggaacaacaagcgaaaataaataagccactcctgtcttggcggacgagtggcttattaaataaccatttacgaggctaaccactttgtgggcggttgcttctctttatgtttattatagtatgaggtgggtaaattttcaagacataaatttgtggaagttggatttagtttatttcagagtgagatagtagtatacgcgtaatatacaaaaatgtttgaaatccccatgaatactgaatacctgtgctgaggctatgcttgcacagggtgtttgctaatcgtgaatttctaagataaagattatattgagaagtcctggaaatattgaatttccggggcttttctttatgtattgaaatgacaaaagaattgtcagaatattcataaatagaagataatttacgttattttgaggtcgttatatacacgtggtacacaagtgatatacaggtggtatacactcgtttttactgattttggatgattttttgaagcatttcatccggtgtttttcaagatgattcaagctgaatatgagtgtaatgttaataataagaaacatcataagtgtatccagcaatcagtctcgatttattgttttatatcttgttcacttctgcaagaagttcttctaaagtcttatgggtgtaagttcccttagtggtgtcgttcttcatactgtgtcccataatcaatttgatacatacgtcatttgctccggcgctgtccatgagtgaagcaaaggtgtgtctgccatcgtggggcaggtgtttcattttgagttttcccatgcatgtattaaaattgccgttcatgtaggttccgtaggtgtaatgatttcttcatcggaatacctatcatgtatctgctccatagagtttgtccattcataaaccagaccttctgttaaatccttgcgtattttaaaagaattgaaatagtcatcgatgattgcattcacaaaatcattggtgcatttgcaatattgcattaaatctccattttcattaggaataaacgcttctatggaggacgcagaaggcgatgctgaagaagcaaccgttgatacataatgggtaaacagagttgccagtgcaggattgtgtgggaagtattactctaagcggaggaaaaggtagtgtttgatttatttgatatttttgaaaggagttgagataaaatattggtttaatagtttcattcgttttaagaaaaaatgaggaatcttttaatcattttaagtgcataacccgttattatatatagatagatattcaatggaaaggagtctgatgcgtgttgagtgatgacgaattagtggaacagattctacttggaaatgaaaatgcagcagaagaattgataaaacgctattatacatctattttacgttactgtaggtggcattgctctaatctggaaaaagcagaagacctgactcaggaaacatttttgaagttgtttaagaatttatccggatataaagggaaaaagaaatttaaggcttatctatacacgattgcaaatcatttatgtattgatgaaagtaggaaggttgagttttatccattagaagatgaagaaaatatagtgcatgagtataacgacatagttcggctagaggatatggcagagataagctattttttgaattttttatcatcagaacaaagggaagcagtcattctacgctttggagaacaacttagttttggagagattgcaaaagtgatgggatgcaatatgcgaacagcacaaagcagggttcgtaatgctttaaaaattatgagaaaggagcaggaaaatgaaagataaaaagttgaagggatatttacagcaatctttaggagaggaagtacagcctaaaagattagaggaaacgattaagctttgcactgaaattgtacgagaacaggaagtgactagggcagaaccgaggacaggtttctttcactatctttcagatgtatttcgctttgaaggtattccaatatttggtttgcaggcagtaacgttatttatagtttgtttaacaattgccagcattgcagacgtgccaaagaatataccaatttttatgccgctgtttgtattggctgtcatgccagcaatttttaaaagccagtattatggaatgagcgagattgaagcggtaacaagagcttctggtgcccaaatcacgttagcaaagctggttttggctggggctgctaatttggtgtgtataacaattcttttgtgtatggaagtttatttgcaaaattcttataaagagattggacagatggttctatactgcctggttccgtacttagtgtgtatggttgcgttgctgcgtttgatccgtttgcaaaagaaacagagtttacagatatgtgcgattgtaatgctgggttcctgcatttgttggggtatgtcagcaagaatattgccatggttatatgaaacatcagcagtgggggtgtggattgttacatttttgatttttgctatgttctttataaatgaaatccattatattgcagagatgagaaaggaaggaaaaatgtatggaattgtcgcttgatcgtttaacaaaacagtatggcaggaaaatagcggtagattgtgttagtgcaaccttaaagccgggagtatatggtcttttgggggctaacggtgcaggtaaaacaacattgatgcgtatgctatgtgctgttttggagtcaacctcaggggaggtattgctggatggaaaagaaataacttcgatgggggcagattaccggaatgtgttgggttatttaccacaggattttggatattatccaaattatactgcggtggagttcttaatgtatattgcagcactgaaaggaataccgaagaatgttgcaaaaaaacgtgtgactgaattgttggaagtggttgatttaagccatgtggcaaacaaaaaagtaaaaactttttctggtggtatgaaacaaagagtaggaattgcacaggcgttacttaataatccgaaaattttgattttggatgagccgactgcaggacttgatccgaaagagcgtgtccgttttcgtaatctgctctcagagtatgcaggcgataaaattgtaattctttccacacatattgtatcggatatagaagcaatagcagatgaagtgctattgatgaaaaaaggaaaatttgtattgcagggtacggttcctgagttgattcacaaggcaaatggtaaggtttgggagctttctgcttctccacaagaagctagacaatggcagacaaaaacaacggttgctaatttacggcacgaaggaaaagaaattatattgcgtattatttcagacaatatgcctagtgagcgagcggttccttgtgaagctacattggaagatctttatttattttattttcccacagaggaaggagtgaaatagaatggaactattttggttagagcataaaaagttatggcgaaagaaaattgttaaaatatgtgtgttgttgtgttttgtttattgtgtaatttttggaagcatactttcgtttcaatggttcggttttggcagttcagatgactatacaagtgcttttggcaataattttgatggatatacagtaataaaggatagtcaggaatatgcactttcatttggtggagaattgacggatgaaaccttgcagaaaatagtaagtgattatcagcaaatggaagctgacggtgtggaggaagaacgggaaaagacagactggcagatagttaatagttggctcggaacattgtatccggagcttcgagataccagtaattataaaacgatgataagctatgttgatccggataagttaacaggcttctatgaaagaagacagcaggtgcttgatgagtttttggaggtcagtggtcaggtaggggctgaaaaagagtttttacatcagatagagagaaaggtagaaaaaccatttcgttatgagtgggtagaaggctggtcaacgcttcttggtagtatggttgcggatctgggagttgtgatggctttgtttctcggtattgttttatcctctttatttgcgggcgaatggcatgataatacaagcacactagtattgacgactcgaaatggttgggggaaaatagctcttgccaaaattcttactggtttagcgtttacagtggagttatttgcattacttgctgtttcaagcgttatatcacagttgttttttatgggaactgccggatggaatatgccgattcagaatatcaagctgattgctgttgcacctatgaatatgctgcaggcagaaatttatgaatatgcttttgtactgcttggagcaataggttttgccggaattgttatgtttatatcagcggctgtaaaaaataatgtacttaccttactgcttagtctggctgttgtatatggaccaatgatgattgcagaatatcttccttatgaaatgcaaaaagcattggatttaataccattggtaggaagttcaacagatattttcagaactaatacttttcgtattttagggaagcttatctggtcaccatatctacttattactattcctgtcttgattggtattctatgtatgccattcgctataaagagctggtcaagaaggatgaaggcataaataacaatatggcaaagaaaagagataaaaaaaataagttgcgagggaaatggttgagaggaattatcgaatggtcaaaaggtggatagcaggatatatccgtatttacaagaaatgtttgatgcagcaaggaaagatggaatatatccggttgtttgggaaggttatcgaacttatgaagaacagcagaaaatattagatgataagataaaggcttatataaatgaaggatattcacagtcaagagcagaaagaactgctaaggaatgggtagctttgcccggaacaagtgaacaccaattaggcattgcagttgacattaatgctgataaatcaaagagctcaaatgatgaggcatatacgtggcttgccgcaaatgcacataattatggtttttgcattgacaaggaaggagtaacagaagaatggctcaactcgaaggcaaagagcgccagaatgtatggaaaactctgtaaattcggtgatgaagaaaaggcaattcagatagcacagcagaagttggagcgatgtaaacgagaaggtaaaacaaagccattttgtgtacaacatttttaaatgaaatctaaaatgaatctggtagaaaactataaatctgtcggattgtgattttgaaatctatcggattaaaaaataaaaatttgttggattagatttgtaaaatcagtcggattggaataaaataaatcatgaatatatgggaattaatagttccggaaacatgttttcattatgtagtgccaattacggcattgaaaaattaattgttatggaaaaggatagtgtcaaatgacctatgaaaaaactgagcaaaagaaaaaggctcagatgaa

SEQ ID NO: 271 - DNA, 8429 bp, unidentified
  source 1..8429: mol_type = unassigned DNA
  misc_difference 7185: note = a, c, g, or t
  misc_difference 7186: note = a, c, g, or t
  misc_difference 7187: note = a, c, g, or t
  misc_difference 7188: note = a, c, g, or t
  misc_difference 7189: note = a, c, g, or t
  misc_difference 7190: note = a, c, g, or t
  misc_difference 7191: note = a, c, g, or t
  misc_difference 7192: note = a, c, g, or t
  misc_difference 7193: note = a, c, g, or t
  misc_difference 7194: note = a, c, g, or t
  misc_difference 7195: note = a, c, g, or t
  misc_difference 7196: note = a, c, g, or t
  misc_difference 7197: note = a, c, g, or t
  misc_difference 7198: note = a, c, g, or t
  misc_difference 7199: note = a, c, g, or t
  misc_difference 7200: note = a, c, g, or t
  misc_difference 7201: note = a, c, g, or t
  misc_difference 7202: note = a, c, g, or t
  misc_difference 7203: note = a, c, g, or t
  misc_difference 7204: note = a, c, g, or t
  misc_difference 7205: note = a, c, g, or t
  misc_difference 7206: note = a, c, g, or t
  misc_difference 7207: note = a, c, g, or t
  misc_difference 7208: note = a, c, g, or t
  misc_difference 7209: note = a, c, g, or t
  misc_difference 7210: note = a, c, g, or t
  misc_difference 7211: note = a, c, g, or t
  misc_difference 7212: note = a, c, g, or t
  misc_difference 7213: note = a, c, g, or t
  misc_difference 7214: note = a, c, g, or t
  misc_difference 7215: note = a, c, g, or t
  misc_difference 7216: note = a, c, g, or t
  misc_difference 7217: note = a, c, g, or t
  misc_difference 7218: note = a, c, g, or t
  misc_difference 7219: note = a, c, g, or t
  misc_difference 7220: note = a, c, g, or t
  misc_difference 7221: note = a, c, g, or t
  misc_difference 7222: note = a, c, g, or t
  misc_difference 7223: note = a, c, g, or t
  misc_difference 7224: note = a, c, g, or t
  misc_difference 7225: note = a, c, g, or t
  misc_difference 7226: note = a, c, g, or t
  misc_difference 7227: note = a, c, g, or t
  misc_difference 7228: note = a, c, g, or t
  misc_difference 7229: note = a, c, g, or t
  misc_difference 7230: note = a, c, g, or t
  misc_difference 7231: note = a, c, g, or t
  misc_difference 7232: note = a, c, g, or t
  misc_difference 7233: note = a, c, g, or t
  misc_difference 7234: note = a, c, g, or t
  misc_difference 7235: note = a, c, g, or t
  misc_difference 7236: note = a, c, g, or t
  misc_difference 7237: note = a, c, g, or t
  misc_difference 7238: note = a, c, g, or t
  misc_difference 7239: note = a, c, g, or t
  misc_difference 7240: note = a, c, g, or t
  misc_difference 7241: note = a, c, g, or t
  misc_difference 7242: note = a, c, g, or t
  misc_difference 7243: note = a, c, g, or t
  misc_difference 7244: note = a, c, g, or t
  misc_difference 7245: note = a, c, g, or t
  misc_difference 7246: note = a, c, g, or t
  misc_difference 7247: note = a, c, g, or t
  misc_difference 7248: note = a, c, g, or t
  misc_difference 7249: note = a, c, g, or t
  misc_difference 7250: note = a, c, g, or t
  misc_difference 7251: note = a, c, g, or t
  misc_difference 7252: note = a, c, g, or t
  misc_difference 7253: note = a, c, g, or t
  misc_difference 7254: note = a, c, g, or t
  misc_difference 7255: note = a, c, g, or t
  misc_difference 7256: note = a, c, g, or t
  misc_difference 7257: note = a, c, g, or t
  misc_difference 7258: note = a, c, g, or t
  misc_difference 7259: note = a, c, g, or t
  misc_difference 7260: note = a, c, g, or t
  misc_difference 7261: note = a, c, g, or t
  misc_difference 7262: note = a, c, g, or t
  misc_difference 7263: note = a, c, g, or t
  misc_difference 7264: note = a, c, g, or t
  misc_difference 7265: note = a, c, g, or t
  misc_difference 7266: note = a, c, g, or t
  misc_difference 7267: note = a, c, g, or t
  misc_difference 7268: note = a, c, g, or t
  misc_difference 7269: note = a, c, g, or t
  misc_difference 7270: note = a, c, g, or t
  misc_difference 7271: note = a, c, g, or t
  misc_difference 7272: note = a, c, g, or t
  misc_difference 7273: note = a, c, g, or t
  misc_difference 7274: note = a, c, g, or t
  misc_difference 7275: note = a, c, g, or t
  misc_difference 7276: note = a, c, g, or t
  misc_difference 7277: note = a, c, g, or t
  misc_difference 7278: note = a, c, g, or t
  misc_difference 7279: note = a, c, g, or t
  misc_difference 7280: note = a, c, g, or t
  misc_difference 7281: note = a, c, g, or t
  misc_difference 7282: note = a, c, g, or t
  misc_difference 7283: note = a, c, g, or t
  misc_difference 7284: note = a, c, g, or t
tcatttccacttgaaaatcacaatacccacaatcgccacggccatgccgatggctttccgccactcccagggctgcttctccacaccgaaccatccgaacagttcgataatatatgctacagcaagctgagcgaccacaataagcattaccgctttggccggtcccagggcatccatactgcggatcacagtgtaggtgataaaggctccgatggcccctcccaaaagcatatatctgggctccacctgcgctatcttcaagaatgaagtccgctccgtacacagccatgcccccagacataccagcaatgctgtaaactgcacaaatgcactggcggtccagatgccggtggatttcgtcacctgggtgttgaacactccctggatgctcatcagcgcaccggaaactaaagcaatcaaaaaaccgatcataggattctaccaccttttctttttagtagtagtctatcctgtgaccggttcgttcattcatattttattgtaacggttttatttctctgtaccacctacctgtccggctatggtctcgtccagctgctgtaccagagtagtcacgtcgtcaccgttccataccttggaaaacagtacttccagctgcatccagaaatttcccgtctctagcatcttcggcaatgacacactgtccgcatattcatcggcaaagatcataagcgcaccgttgtctgcattctctgccgcctgaagacttgccggcattttgccggagcgttcatacaggccgtccgcatatccttctgccagatacgctgcgaagcagtccgccagttccttgtgttccgaatagccgttgatgactgccgctcccgtaacagacaaagatctgctctgcagttcggcgctgacatccggcatacgggcaattccgtaattaaatgcaaggctgccgtccgcttttgcctcttccagccgtttgaccacatccgtggttccgatggtgaacatggtcttgccatcgataaagtcctggatcacagaatcataagtcaccgtatcggattcaataaagaagaactggttcagtgccttgtacacttccagacactgaatggtctccggattattgatatcaatatcatttctgtcatccccgggatcaccgcctacgatcatgtagttgcctacgatccagtagttgtagaaaatattgttcacgtcccatttcatgacaccttccacaccttccggtgcatcaaaggtatctgcaatattcagcagatcatccactgtggagggaagtgcttccgcgaaatactgctctgccagcgcatttaccgctgcctcatccgctgtcacctgttccgtggtctggtcttccggaagagaatcttcctcgatgatctcttctccttcccctatgggttcatcattctcactgcttcccgccagttccttctccgcctgctgggttgcccaggttcgaagataatcttcattatataccaacgcactggtatcaaaataaaccgggtaaccgatcagcttctgatcataggttaccgcagacagagccgcctgggaaaaatggtctgtattgcagattcccacagtgtcaggcactttcgatgccagtcctgccagataagccttttccagagagtcactgctcaacaggtagatatccggtatctgatcggaatgcagggtctcctgattgatagcttccagatattcactgtcagaagtaagtacgggaatcacacggactccattgttctgttctccgaaggatactgctgccgcattgatataaccggacaatgcctcatcggaataccagcaatagattgtctcctttcctcgaaacagctgcagtccgcttccgctctcctgtgtctgactcatctcctgcgtacttccgtaaacagctgcagcagccatggctatcacagctgctgtagcgataattctttttttcaaaaacataaattcacctaaacctcttattcgatacaggtgtccaaaatagcaatcatttcgtccacattttcccgggtaatcacgagaggcggtacgaagcggataatgtccgcaccggcattgatcagaattaatcccttctccaatgctctgttaataatgtctcctaccggatggtcaaataccagtccctgcatcagtcccacaccacggcgttctttgatacagtcatacttgtctgccagttcgttcagacgctgttccagatagggagccacctctctcacatgttctattatatggtcctcttcgaataaatcaagcactttttccactgctgcgcaggctaaggggttaccgccgtaggtggttccgtgatctcccgctgtcagagaatgctgtgctactttctccgtcatcataaatgcacctaccggtacaccgcagcccagtgccttggcagaagtcatgatgtccggcttcacgccgaaacgctgccatgcatacatgtaaccggtacgtcccatgccgcactggatctcatccagaatcagcaggatatcccgctcatcgcacagatcacgaacctgttttaagaattcttcattagcgggacgcagtccgccctcgccctgtacagtctccataatgatggcacaggtcttgtctgtcacctgatccagcacactctggaaatcattcagttctgcaaatttgatatgtccgatcatgggctggaacgcctcacgatacttggggttgcccgttactgacaaagctcccatggttctgccgtggaaggagtgattcatggcaatgatctcatggtcggtacagccatccttcagatacgcatattttctggcagccttaatggcaccttccactgcttccgcaccggaattggtgaaaaagacacgatccatgccggatacttttttgatcttacgagccgcctcgatggcaggcacgttgtaataataattggaggtgtggatcaccttgtcgatctgtgctttcagcgcatcgttgtatgccttgttctgatagcccagggcaaatacagcgattcccgctacgaaatccagatattttttcccatcggtgtcatacagatgtacgccttcgcccttatccagaacgatctgataccggttataggtatgcagcaggtctttttccgcctctgcaatatattctttcatagtgtcgctcattttatttttcctcctcatcggatacgatcgcagttccgataccctgattggtgaagatctccaacaacaggcagtgtgccagacgtccatccagaatatgcacacggtttacaccgttgcggatcgcagaagtacagttgttcagcttcggcagcataccaccgccgatgtaaccgtcgtggatcagtccctctgcctcggaagctgtcaatctggaaataaatgtggacttgtcattgatgtccttgtacaatccctcgatatccgtcagaaatgccagtttctccgcatgtactgcttttgcgatagcgcaggccgcatcatccgcattgatattgtaggtgtgataatccttgtccagtccaatgggagcgatgatgggcaggtaatccttctccagcatgtcaaagagaatatccggattcacgccggtgatctcacccacatacccgatgtcctgaccgtcggaatattttttctctacctgaagcaggccgccgtctttaccgctgacacctactgctttcacgcccagctcttccaccatggtcacaaggctcttatttaccttgttcagtaccatttccgcgatctccatggtctcctcatcggtgacacgcagaccgttgacgaactttgcctcttttccgaccttgccgacccagcggctgatctccttaccgccgccgtgaacgatgatgggcttgaaacctaccagtttcaacagcgttacgtccttgatgacgtttttctgcagttcctcattgctcatggcgctgccgccgtattttaccacgatgatcttacggttgaatttctgtatgtaaggaagcgcctcgatcagcacctctgcttttttcattacctgttccatatctttttccatttttatcctcatttccgcagataccgtgatccgcctgtcatttatctttccggtcgttcttttttaggaacgatagtccgcattgatcttcacataatcatagcttaaatcacagccccatgcggtagcttctgcctcacccatatgcatatccaccagtgcggtgacttccggatcggagaggatcttcgtggcctcttcctcgctgtaatcacatgccacaccattaccgaagatatgaatcttgccgctcttgctctcaaaatacagatccacattttccgggtcgaatttggctccggaataacccagtgcacagaggatacgtccccagttggcatcatgtccgaagatagctgccttggtcagagaagaacagatcacggattttgccagagttctggcatcttccttgctgactgcgtttattactttggtctcgaacagtgctgtggcgccttcgccatctcctgccattttctttgccaggaatgtggtgatctcatgcagtgccttgcagaagttgtcgtaatcctcgccctctgcggtaatctcctcgttgccagccatgccgttggccagcaccagcagtgtatcattggtggaagtatctccatccacggagatcatgttgaaggaatccactacgtctgcgctgacgcacttctgcagcatctccttggaaattttcacatctgtggttacaaaacctaacatcgtacacatattcggatggatcataccggaacccttgcacataccgcccagagtcacagtcttgccaccgatctgtgtctcgatggcgatctctttggaaatggtatcggtggtcataatggcatgggctgcatcggagccagcctccagagtatctgccttggctgccaccagtttctcgatgccagcggtgatcttgtctacgggaatctgcataccgatgacaccggtggatgcaaccagtacggcatcggtgggcacgcccaacagttctccggcacattttgcttctgcttcacagcagtccagtccctgtttgccggtgcaggcattggcgattcccgaattgactaccactgcctgtgcaaatgcagaatgttccacgatctgcttatcccacagtacaggagccgcctttaccacattggaggtaaaagtaccagctacggtacaaggtgccttacttacgatcagtgccatatccttacgattctgatatttaatggcagcctccacacctgctgcctcaaagccttttgctgcggtcacaccgccctggatctgtttcatgttggaataatctcctttcgcttccgttttatttatgatgtcggggtcaaaagcccccgactttgatgcctacggattgcttcgtgctacgcgcttccacaatcctggcatctatttattaaacgccgtaatgttctcttcattcaaagtaaagtcgtagtagttcaagtcttcccgctttgtccatccaatgcatttccagaaagcgtttccgatgtcattctgggtaaaagcgatcaggctgaccttgttgatatgttccgctttcagagcattcatgcagtggacgaccatggctttgccaatgccaagtcttcggtaatcttctctgacacatacatggtacagacagcctcgtcgtccgtcatggccgcagaggatgccacccactacggctccatcctccccgatggctaccacactggtgccgggattccggttgataaaacgttccacaccttctctggaatcatcgatgctccggataccgaaaccgtgaatggtcatccagagggcatgcagaccgtcataatcttctatggtcatgggtttgatcgtaaactgtttgttcatgtatgtattttatcctttctaatcctttccgtatctgctttaagggaagcatggaaccagctccaggccttcgctctcaggaagcccgaacagcaggttcatgttctgtaccgcctgtcctgcggcaccctttacgaggttatccagtgcacccatcataatgatacggccggtacgctcatcaatgacaaaattgatgtccacgtagttgctgccttccacccacttggtctcggggcagctgcccttatccaacacacggacgaatttctcgtttgcataatatttatcatagacagcttttacttcctcataggtaggaagtgtaccgtccggttttctcttcagtgttgcatactcggttgccagaattcctctgttcatgggtacgaggtgcggggtaaaattaatggtcacctggcagttgcccgcatagcctaactgctcctcgatctcgggggtatgtctgtggcttgccacgccgtaggctttcatgttctcgttcacttcgcagaacaggttgggcaccttggcgcctcttcctgcaccggaggtaccggacttggcatccacgatcagggtgttcacatcaatcatgccttccttgaccatgggataggccgtcaggatcgaacaggtggtgtagcagccggggttggctaccaatctggtcttctccgtgatcttgtcacgattgatctcgcagagtccgtatactgcttcctcaatgaactgaggagatttgtgctcgatgccgtaccatttttcataggtggccacatccttgatccggtaatcagcagacagatccacgatcttcacctgagagagaatctcctctgtcaaaaggcccgccagaaatccctgaggggttgcggtaaagatcacatctacctgcttcgccagttcttccagattgtcatccttgcagatatcctccaccagctggaacatgttctggtatacctgataatacttcttatctatatagcttcgggaaccgtaccatacgattttggcatccttgtggtttaacaggatccttaccagttctcctccggcataaccggttgctccgatgattcctactctgatcatttttctacctctcttgtttatgtcatcgttttttatttctgtcgccgccatacttgtgtcaacgaattgcttctgtcgccgccatacttgtgtcaacgattgcttctgtcgccgccatacttgtgtcaacgaattgcttcgcagcaagctgctcacgcaattctnnnnnnnnnnnnnnnnnnnnnnnnnnnnnnnnnnnnnnnnnnnnnnnnnnnnnnnnnnnnnnnnnnnnnnnnnnnnnnnnnnnnnnnnnnnnnnnnnnnncgccgccatacttgtgtcaacgaattgcttcgcagcaagctgctcacgcaattctatttttgaactattcagaaccccattcgcaaaatcgctgctacgcagctggatttttgctcatgtggttacttcgtcatataaatatcatcacatattcttacgaatgcaagcattcgacgaatatgtaccgatatttatctgactctgaatagttccatgataccactttttgtctaaatgtctactacttttttcatttttatgcacgtttctcggattgttgtgtatatttatgcatatattcatactatttttatggttttatgcattatggtggaataatattcattctgttttccgcgtacttttctttcctataaaaatctgttacaataactatgctgtgctttcgtttgcagcatatctattttgtggctctttatggtctgtttttcccggatccaaagagcagaaatgaggaaattatggcttttgacggcgttaccattgcctgtgtaatatcagaattaaaaaaagaactcatcggcggccgattatataaaatcgcccagccggaaaatgacgaactgctgttgaccatcaagcagcccacagggcagaaacgattgcttctgtccgccagcgcttccctgcccctgatctatctgacggagagcaacaaacccagtcccatgacggcccccaacttctgtatgctgctgcgcaagcacttacagaacggccgtatcgtgaacatttcccagccggggctggagcgtatcgtgcatatcgatattgagcatctggatgaaatgggggatctgcgccacaagacgctggtcatggagctgatgggcaaacacagtaacctgatcttctgtaacgatgacaataccatcatcgacagtatcaagcgggtatctgccgcagtcagcagtgtccgggaagttctgcccggcaagccctatttcattgcccatacccaggataaactggatgccctgacctgcgacgagactactttccgggagacccttgacgccaagcctcagccggtcttcaaggcaatctacggaagcttcaccggtatctctccggtactggcacaggaactgtgtcacgaggcaggcatcgacggggaacgccct

SEQ ID NO: 272 - DNA, 6678 bp, unidentified
  source 1..6678: mol_type = unassigned DNA
caaaggtcaaaagcagggaatagtccactgcccgtaaggtgtgcgggtctgcaaagagaacgcagacgagtacagcggcaaaggcaatgccatagggcagtacccggatcacggacagcaggcagacggcaaacagaaccagatacagcaggatgatcttctgatctccctgagatgcagaagaagaaacaagctcgtccacggagagggcatcagaggctttccggcagaccagcgctgcccaagccagcagcaggagcagagagaccagggtgtagggcagcataagaagaacaaatcccccgatgctcatgccgctttttccgtaaagatagaggttctgcgggttgccgatgggggtcagcatactgccaaggtttgccgcaatggtctgcatacagaccaccgggatcagaagagcgcggcggacatccgctcccagacggctcaggaccacgaacgtaaagggaacgaaggtcagcagggaaacatcgttggtgatgaacatgcttccgaaaaagcacagcccgaccagtaccagcgtcagctgaaaggtgctgtgggtacgggacagcaatgcccggcccagtccatcaaaaaagccctgccgccgcagcccggccatgaccgtcatcagggaaaacaaaatcgccagcgtgcgcaggtcgatgtagccgagatactgcgcatccggcagaacaaagaaggcggagacaacggccagcacagcggctgcggtgaggaccgtttcctgctgaatgaattgtttgagtttcatagagacacatccttgtaattgtaaaggctgccctgctgcgatgccgggcggcctttcttcgtatttcagagcagcagctcaaacgacccgatcatcagcggcattcttcaatgtggaagatcgctactttcccgaagaacggattgcaagtgcgtgcagcttccggctcaaatcggccagacaccatgcgattgccataccgccggcaattccaagagcggccagaaaggtctgctctccgaaatgctctgcagcagacaaatcattggagacgactgcgttcatgcagtagtagagggtgcttccgggaatgaggggaatggcagcagtgatgaagaaaggcgtagagggtgcattgcagcatcgggcaagaatttcggcatacagagcggcacagaaaccggccaacagattggcaagaaagacgctgtgcagggtgttggcggcaagaagataagccagccatgccagaagtccgcctacaccggcggcgggtaagtagcgccggctcagattgaagatcagtccgaaaccgaccgaaccaagggcagcactgagcaactgcgaaaaaacctgtatcatgcggaaattcctcccatcaaccagatggcggccatcatgccgagtgcaagggtggcggccatcagaatggcttccaccagtcgaagagagccggaaataatgtccccaagtaagatgtcccggatggaatttgtcagcatgatgccgggaatcagcagcatgatgataccaatcagaactttatcggcatgaaactgcatcccaaagcggcagagcagcagagtggagacaccgctgagaaatgatgctataaactgaaattctacgccattcatacaaaaaggcgagagatagcgctccatccagcaaatcagaacggcaatgccgccggccagcaggccgtcccagagatttccaccaaagaagatggcaaaactggaagcagccaacacactgccggcaagatgcagtcttgggtccggatgctgtgccagaatggcattcagctggcgctgaaactcttctatggaaggaggcgctgtgcagatacggcggctgagcgcattgagcttttccaatgtcagcaggtcattgctggcagcgtgacgcaggcggcgggtctcggtctgcggcggcagcgagggcatggtaagcgtgaccacgatgctggatgtgatcacgaatacattcacatcttctgccccataggcgattgcgatccggttcaaagtgtcctcaacgcggaatacttctgcgccgctgttttgtaaagcttcgcccattcggaccagaatgtggagaaaatgactgatctcggtctcttccacaatatcacgctcttttcatctcggtttccacattattatagcgggtggaccggcagaacgcaagacgctgcaaggacagagaggctttttgataactgcattgtttacgcgggcaatggatcgcctggttctgaagaaacggtttgcatccgttctgtcacagcgaaagactacgatcagagaagaaaaaattgaatccagtgcaaacgattttgccgagaattgcatgaaatattataaaagtattattcttttatgaattttagcactctcctcttgacactgctaataaacggtgctataacagtggcgtgctcaggagaaaggggcatgagggaaccgcaaggctcccgggaagactccgctcctgatgcacgatcttgattttatgcccgacccgaacgccgggattggagggttgttttatgtttatgcctgctgttttccatgaaaatctgttcgatgatttctttgatccgttctggaacgacggtgcactggagcgtgcaatgaatcgtgaagagcgtgaaaccttcggcaagcgcggcgcaaacatgatgaaaaccgatgtgaagcagaccgccgatggcaactatgatgtggctgttgacctgcccggctgcaagaaggaagacgttcagatggagctgagcgacggctacctgaccattcaggccgtccgcaaccactccaatgacgagaaggacaacaatggccgttatctgcgccgtgagaccttctccggtacctgtgcccgcagcttctatgtgggtgatgccgtgaagaaggaggacatccacgcaaagttcgaagatggcatcctgcacatcgtgctgcccgcaccgcagcagcagaaggctctgcctgcgaatcccaatctcattgaaatcgagtaacgtttgtgcatcggtgtgaggaacaccggcgcatagaaccaacccccggagaaccgtaaaaagctcttcgggggtttttatattctgacatcttttcggaagtgaaaaagcgtggtacccacaacaccgacacgcaagaggacgcagcagtcaatctttttgaaaccgccgtcaaacacgcataaaagcgaaaagaacccgctttcaacatcaaattgaagtgaaagcgggttctttattgaagtgacaccaaattgtcacaaaatcacagttttagaaggcctgtgcagcatgtttatagcgatatttcgccgtaaattcgcttctacttgatgggatgaattatttccgacttgtcagccggttgagcagcatcacagccaggacaatgacaccaatgacgagaagaatgccgaccatgccgatgagcatcatgggcagggtggtcatccacgaagaaagatgaagcataagtgtacctccgttaagccatcagggtcagaatcaggccgcctgcaatgacggatgcgatctgccccgaaacgttgacgctgatggagtacatcagcaggaaattctggttatcttcttccaatcccatcttgttgaccacacggccgctcatggggaaggcggagatgccggctgcaccgatcatcgggttcagttttttgccttcgggcaggaacaggttcagcagctttgcaaacagcacgccgcctgcggtatcaaaaacgaaggctaccagacccagtgcaaggatgagcagggtatcgggccggacaaacttgtcagcggtcatctgtccggccacggtcaggcccagcacgatggtgatgaggtttgccagcacattctgcgcggtttcgctgagggcgttcagtacgccgcactcccgcagcaggttgccgaacatcagaaaaccaactagagctacgctggcaggagctaccataccggcaatgatggttaccacaatggggaacagaatcttcgtcagctggctgacattgcccttttcatagggcattcggatgcggcggtccttctgggtggtcagcagtttaatgaccggcggctgcacgatgggcaccagagccatgtaactgtacgctgccaccatgatggcaccaaggtactgggagttgagggtgttagctacaaaaatggcggtgggaccgtccgctgcaccaatgacagcgatggaagcagcatccttcaaatcaaagaagaagcctgccagaaacagggtgaagaaaataccaaactgcgctgcggcaccaaagagcatgagccacggtttttccagcagggggccaaagtcgatcatagcaccaatgccgatgaaaagcagcaggggaaacagctcgttggacatgcctgcttcaaacagggcagaaatggggcctacggtatcgccctgcgtgatggcaccggacagcggcagattgaccagaatggcaccaaagcccatgggtaaaagcaggctcggctccatttttttggcgatggcaaggtagatgagcaatgcaccaatgccccacatcaccaccatctgccaagtcaggtttccaaaattggaaaacagacttgcgaatgtgttcagaaagttcatagttttcttgcctcctattgtgctccggtacggtgacaagaaaaagagactcctgccacagcaccttgtctgtgacaaaagtctcaagcgaacacatgacatcgggcatttctgccgtgatgacgctgccatgcagcagtctcccgaagaataagccggaacactgccctttactcccttttatcagatgtattaaaacagaatatgggaaaactgtcaagaaaaatacagaaatcttttctgtatcttatgagggttcttccgctgtggttcacgcaagctgattacagcaaagcatttctggaagcccatcgagagaaaatcactctgcacaaggcggccccggagagctgcgataagccctccggggccatttttgttttccgacatctttccgacagtgggaaagcgtggtagaataggagcaaaactgatataggatcaacaggagggagaaaatcaagatggaaacggtctatatcgcaggcggatgcctttggggcgtacagcatttttttgacacagtgcctggtgtacagatgactgaagccggcagagccaacggaacaacgagttctctggatggcccatacgatggatatgcagaatgcgtaaaagtggtctatgatgagaaaaacacaagcatttcagaactgatggcacacctgtttgagatcatcgacccctacagcctgaacaaacagggcgtggacgttggaaaaaagtaccggacagggctgtacagtacagatcccagacatctggaagaagcaagagcttttataaacggccgggaggaccgggacaagatcatgctggaagtgctgccgctgacaaattatgtccggagcgctgaggagcatcagcaccatctggaacggcaccctgaagactgcagttactgccatatcccggatgctgtcctgaacagatacagaaatcagtaaatatgcgatcctaccattgcagtaacaccaatggaaagtatcaggagcaggagagtgccccgctggtgcgggaatttctggcggataccggcatgacggcggcgcagatcgaacgggtggcctatctggtggggcaccactgatggttctggatgtggcgcttggctgagagagcgaagcagcttctcaatggtaaaataacggaaaacacccctgtgagtttttttaaactcacaggggtgtttttaggcgttggggtcggtcagcacaaaggtcagctcggcggtggcggcgcacttgccgtccacccacgccgaggctttgcccacgcccaccgggccgtgctgctctaccagttcacagtgcagggtgagcacatcgccgggggtgacctgcttgcggaagcgggcattcttgatgccgccgaagagggccagtttgcccttgttctccggcaggctgagcgctgccaccgcgccggtctgggccagtgcttccagaatgagcactcccggcatcaccggctggccgggaaaatgtccgcagaaaaattcctcattgcggctcacgcacttgcggccgatggcccactggcccggctcatagtccagaatgcggtccacaagggcaaagggatagcggtgcggcagaagcgccgcgatctcctcgctgttcagggcgtttgcgtctgcacgcacggtgcggggttctgccatgggtcagccctcccatctgcgcagggcgatgcaggcgttgtgcccgccaaagcccagactgttgctcagtgcgtaggtcatggcctgcgcacggccagtgttcggcacatagtccagatcacattcgggatcgggctgctcatagtggatggtgggcggcgcaaactggtcatgcagggccagcgctgtaaatacggcttcaatgccgcccgcaccgcccagcagatggccggtcatgctcttggtgctcaccacagtcagctgctttgcatgttcgccgaacaccgcatggatggcggcggtctcgcaggcatcgttcatgtgggtgccggtgccgtgggcgttgatgtggtccacctgctccggtgcgaggcctg

SEQ ID NO: 273 - DNA, 6108 bp, unidentified
  source 1..6108: mol_type = unassigned DNA
caggtcatcctgaaccagctgtaccagtacacccagctgcaggataccgtgggcgtcatcatgctggccatcgaccacaaggtgcccaaggtgctcaccctgaagcagatgctgcagaaatacgtggaatttcaggacgaagtggtgcgccgccgcacccagtacgacctgaaaaaggccaaggagcgcgcccacattctggaaggtctgaagaaggctaccgacatcgtggacgagctgatcgccaccatccgcgcctgcaagggcggcatggcagaggccaaggctgccatcatggagcagttcggctttgacgacccgcaggcagatgccatcgtcaagctgcagctgggccgtctggcaggccttgagatcctgaagatcgaggaagagcttgccagcctgcaggccaagatcgagaactgggaagccattctggccgacgatgcccgggtgcttgccatcgtcaaggaagagctgctggaaatgaaaaagcgcttcggcgacgagcgccgcaccgagatccagtccgtgaccggtgaggtggatatcgaggatctgatcgccgaggagcagtgtgtctacaccctgaccgaggccggctatatcaagcgccagctcaaggccacctatcaggcacagcgccgcggcggacgcggcatctccggcatgacccgcaaggaagaggacatcgtgcaggagatgttcgtaggctccacccacgactatgtgctctttgttaccgaccggggccgtctgttccgcatcaagggctacaccattgcagagggcagccgcaccagcaagggcagcaacatcgtcaacctgctgcagctggccgagggcgaaaaggtcaccaacatgatctgccagtcgaaggaagccgacaccgagggcggctttgtgaccatggtcacgaagcagggcctcatcaagcgcaccccgctggaacagtatgctaacatccgtaagtccggcctgatcggcattgccctgaacgagggcgacgctctggcatggacccgcctgacctccggccacgatatgctcatcgttgccacccgcaacggtcaggccatccgcttcaacgaagccgatgcacgtcccatgggccgcagcggccacggcgtgcgcgccatccgtctggccgaaggcgatgaagttgtgggtgtgtgcatctgccgcgagggcggcacggtgctcaccgtcaccgagaacggcaagggccgccggtcggacatcgacacctaccgcattaccgcacgcggcggcaagggcatccgcaactacgatgccgccaaggataaggtggctgcggtcaagatcgtggacgacgtggatgatgtgctgctgagcagtcaggagggcatcatcatccgtctgcacgccaacgagatcccgctgcagagccgctacggctccggcgtgcgggtgatgcgcttgggtgagaacgataaggtgatggtacttgcccgcaccgaccacgacgacgaggcccagaccgagcagatcgacacctccgatgctgatgcagagccgactgccgagcagcttgccgccatggaagccgcggatgctgccgccgctgcagaagccccggaagcagacgataagggcgaagagtaaaccttgaaaacacaataagatttgaaagaagccgccgcgcagagatttctgcacggcggcttcttttcaaatccatccaaaccatgtataatagaaatagcgtgtgaggaataaaaataaacacagaaagtggtttaaggaacatgacagagcaaaaaaaatccccggagatcagcatcatcgtgccggtgtataaggtggaaaaatacctgaacgaatgcattgattccattctggcacagacctttacggattttgagctgatcctggtggacgatggctccccggataactgccctgccctgtgcgatgctgcggcagaaaaagacagccgcgtgcgggtgatccataaaatcaacggaggtgtaagcacagctcgcaatacgggtttggcagctgcacagggaaattggatcggctttgtggacccggatgactttgtagacaagacttactacgaaaaaatgctgcgggcagcaaagcaggcaggtgctgaacttgcagtctgcaacgaagtttttatggaagaggatggaagtctttgtgattatcaggaacagcctttacgtacagaagtgctttcccgtgaggaagcaatacaccgcatccgccttacgccgttgattcaggcagcaacaagactgcatcggagagatgtgctggaaggaatcgtttttcctgtgggcaaaaactatgaagatgcatttaccacaccggaaatcattgaacatgcaacagctgtggcttgtataaaggaaaaactgtaccattaccggctacatccggcaagcatcatgcatggaaaggtcaccttgaaaaatctggatgagatcgatgcaaactacggccttcttgcttgtgcactcaagtatggaaaaaaagacacagcattcctgcagtatgtactgatgaaacgcatgctccgaaacacaaaaaaaaatctgccacccaaacagagaaacagtgaacgggttcagcaggcggaagcgtgcttgaaaaaagcaggcagagaggttcgtcaacagggggcctgtaccctgcgcaacgcagcagaaaccgcactctgcattgcaaacccgcagttctacttcaacttcaagtaccggaaataaaattgaattccgaatgggagaaatactgtgagtgaaagaacagaaagtggaaaaccggagatcagcatcatcgtgccagtgtatcaggtggaaaaatatctgaatgagtgcattgattccatcctcgctcagacctttacggattttgaactgatccttgtggacgatggctccccggacaactgccctgctctgtgcgatgcagcagcaaaaagggacagccgcgtgcgagtgatccataagcaaaacggcggtgtaagcacagcccgcaatgcgggtctggatgcagcacagggaaattggatcgcatttgtggattcggatgatacagcagcaccagaatatctggaaaaaatgcataaggcagtgttggaaacgggtgcagattttgcaatctgcagcagtcagtgcattgatgaaacgggcaaaacacttgcaggcggagaacatcgccttttgaacgagtttttgccgcaggaggaagttctgcgccggatggtggtgtcggattttcaggttccgtggaataagctttatcgccgaaaactgctggaaaatctgcgctatccagaaaacaaggcgtttgaagatacctgtctcatgccggtcatttacgcaagagcggcttctgcctgcggtgtatgggattttttatacaattaccgcatcgttaccggcagtgccatgcaccgcaagactaccttgaaaacactggactgggtggaagcatggtaccgcctgtttgatgtactgtaccaaaacggcatccgggatgctttgtgtgcagcctatcgcccgattttgactgccgtgtgggacatctggctgcacctgacaccggaagagcgcaaaagcccccggatgaaggaagcctttgcgtatgagcgtacagcccgccatcggctgatgcaagcccgcggcgtaacactaaaaaatttgtgggcggcagtggtctgcgctgcatcggcctgcagttatctgaatctatgccgcaaaagggcggaaagacggcagaaaacgacctgaagcaatgaggagtttattgtgcaggaacaacataaaaaacagccggagatcagcatcatcgtgccggtatataagacagagcgttttctgagcgcctgcatctcttccatccttgcccagaccttcacggattttgagctgatcctggtggacgatggctctccggacagctgccctgctttgtgtgatgccgcagcggcaaaggacagccgcatccgggtcatccaccagaagaatcgtggcctgagcgtggcacgcaatgccgggctggacgcggcagagggcgaatggatcgcctttgtggattcagacgacaccatcatgccggacttctgcgcaaagctttaccatgcggcgcaggaggccggtgcacagatggccgtgtgcaattaccggcaggtggacgaagccctgacccccatccgggagcagtatttgcatgtgcggcgggaggtgctgaccccggagcaggcgttggagcacagcacccttctgccctacatggtggtgtggaacaagctgtaccaccgcagcatttttgcgcagctgcgctttgcagagggcaagctgaacgaggacaccctgctgatcgcctacgcctacgaaaaagcggacagaatcgcgaatatcccggatgcgctgtacctttaccgcaaggtggcgggcagcatcgtcaacagcaaagtcaccctgcgcaatctcgatcgtgtggaagcaaactataccgtgtttgagtgcgtacgccgccatggcatcacgggctcgctgtgtgagctgtactgggcactgctgcactccctgatcgatgtgggaatgcacctgaccgccgaagagcgccggagtgcccggatgcagcaggcgcgggagtacgagcgctgcgcccgccgggccttgcgtcaggaacatgctgttaccctgagagcactgggcaacaccctgtgttttattatttcacaggactggtattttgcccgccgatggaaaaataccgtgtaaccgcgcaggtttgtctggacttccctgcaaagatatgctacaatggcaaaacaatcacaaatacccgtgggggagtagcaggcgcttttgcagagcgcagcaagtcaacatgatgaccgttggttccggtctggcttgctttcatttgcgagactcatgtgtttttggcgcatagaacagcgcccgtgcacatggagttggtttcaaaaaatcacccggtcccggacgtacatgtgcgcccgagaccgggttttgtattgcccgatattctggtcagattcaggaggcagacaatatggaatggagctttgtatttttcctcaacagtgccctgctgggcgtgggccttgcaatggatgcgttctcggtgtccatggcaaacggcctgcacgacccccgcatgagcaggaaaaccatgtgcaggatcgcgggcacctttgccctttttcaggccgtgatgcccatgacaggctgggtgtgcgtgcacaccattgtggagctgttctcttcgtttgaaaagttcatcccgtggattgcgctggctctgctgggctatattggcggcaaaatgctggtggatggcatcaagggcgaagaggccgaagaagcagcagagctgagtgcgggtgcactgctcatgcagggcatcgccaccagcattgatgcgctttcggtgggcttcaccatttcggaatacggctggctgatggcacttgcggcatcgctcatcattgcggtggtcaccttctttatctgcatggcgggcctgcgcatcggcaaaaagtttggcaccaagctctccggcaaggcatccattctgggcggcatcatcctcattggcattggtctggaaatttttatttccggggtgttctgaaattcagacagcataaaacaaaagggcacggcgctgcaatgcgctgtgccctttcgttttataaaatgttccacatagaacaattacttttctggctcaaaataatcggcatattcttcggtcagcttggagccaagccgccggatgccgccgtacaggtgccgttccaccaacggctcaaaggcggcaagatcgcaccgctcgatggcgttcatcaggttgcggtggtctgcgatcacctcggcaagaccgccggtggtcatggtgtccagcatccggaagcggctgtagtcggcgtgggcgttctgcagggtgctccacaggtacattttatccatggcggcaaaccatgtcccgtgcagggcacggtcggcttcgtacagcttgttgtaatccgggctctccatggccgcaagggcctcataggcttccacccgcctgcggatcaacgcccgctgctccggggtgcac

SEQ ID NO: 274 - DNA, 9823 bp, unidentified
  source 1..9823: mol_type = unassigned DNA
atgggattttttaattcgttattcaacgctctttttgccccaccatcctcttcttccatccgagatgttccatcaccaattcatacgtattcttcctcttttgaagataaagatggttactataacgaatatccacaattattttcctctgcaacagacaataatctcaactatactgattatactttttccggaaaattcactaaaaccggaaaaatgcgcaccaaacgacatatccaaattttcaaaaatgaagatgttctttcatctattcaggcccttggatacgaagaccctattcagtatactcgagaaactcctccaccccctagttcagctcaaatggattatcttcgagatcttgcagcagaacatggtgagagtgttcctgctaaactatccgcctcagatgcttcagctttaatttccagatatgtagaccatgaccgcattcctaatccagagctcttcgagtatgcagatgaaatgcatattggcgtatcttactattgtggaaaacgaatgttatacgatattattttttcgcatctgaacaagcttgaccgttccgccttttttattttctgcgtgtaccgggatatcgagcattcaatctcaggaaatctaaaccaagtttcttgtaagaattttttctatacttttgccgaatctgtagaaaatgatgcaaaattccaaaagtcgttagatgacaactattatggttccgatttgcgcttttttggttctaaatattccaaggcccttggttactccctctctggaggaagcaaacgaacatccgcctataaatccgccaaagcatttttaatttctcatggtcttatttatccatcttaatgttttatttatctatcacaacaaaagcggcgcccagctctggttttccagaatgggacgccgcttttgttgtgctttacttttgttctttttcctgctcttcgcgcagcttcttgatccgctttttctcgctttccacgcggggccagggccaggagaagccctcgttggccttacaccagcgggtaagcggatagaacgcaaacgccagcccaaaaacgtacagcagcaggtacagcagtgcgctcagggtgaacagtgcgtccagcgccccgatcagggccatgaggaagcccgccttgaggaaaaacagaccgttctggcgacagtattccgggaagttttcggccttgacggcctgacggccctggtcgccccagacacggggatttttcatgaccgagtagccgtaaaagaccagcatcaggccgcaggtgagctgaaaaccaaagaacatgttgtacctcgctgttttgtgtgattttagtcctcaaacagagacttcatggcgggcaggaaatccagcgttgcaaagtagtcacgcggggtctcggcgcggcggatgaggcggtgagaaccgtcctcgcagagcaggacctcggcactgcgcagcttgccgttgtaattatagcccatggcagagccgtgtgcgccggtatcgtggatgtagatgatatctccgatgtcgatcttgggcagcatccggtcaatagcgaatttatcgttgttctcgcacaggccgcccaccacatcgtacttgtggtcgcagggagcgtcttccttgcccagcacggtgatgtgatggtatgcgccatacatggcgggacgcatcagattggccgcgcaggcgtccagaccgatgtattccttatagatgtgcttctcgtggatggccgttgccaccagggcaccgtaggggccggtggtaaagcggcccatctcggtaaagatggccacatcgcccatacctgcggggacgaggatctcttcaaacttcttccggacgccctcgccgatggccatgatgtcattctcggtctggtcggggcggtacgggatgcccacgccgccggacaggttgatataggcaatgtgcacgccggtggctttctgcacccggaccgccagctggaacaggatggcggccagctcaggatagtattcatccgaaatggtgttggaggcgaggaatgcatggatgccgaagttcttggcacccttggcggccagcttcttatagctgtcgatcatctgctcctcggtcatgccatacttggcgtcgccgggcttgtccatgacctggaagccctcttcgctctcgcccagactgaaagttccgcccgggttgtagcggcagaagatgttctcgggcacacctgccacccgctccaggaactccaccatggtggcgtcgtccaggttgatgtaggcacccagctcgtaggccttcttcatatcctccacgggagtctggttggaggagaacatgatgtcgctgccggtaaaaccgcaagcttcgctgagcatcagctcggtcagggaggagcagtccacaccgcagccctcttcctttaaaatctgcagaatgaccgggttgggcagagccttgacggcgaaatactcccggaaacccttgttccagctgaacgccttgttgatgcggcgggcattctcacggatgcctttttcatcgtagacatggaacggcgtgggcacgtcctggatgatctcctgggccatggcctcggtcagaaacggtctcttttccataatatacatccctctcattttatgggtaacagcgggcccagtgcccgtgtttcagcatttttacagcttgaggttttcccgcgtcggggtaaaggtggggatcatcttggccagctgtttcaccacgccctcgtcgttgtgctcggccgcggcttccagctcctgcagctggccgtagaactgggccaggtcgatgctgcggggcgaggccacaaaaattttgttgtgctgggtgcgacgcattttgtcctgctcctcatccatcatcagctcttcgtagagcttttcgcccgggcggaggccaacgatcttgatgtccatgttcacgcccggttcatagccatagaaccggatcagctgcttggcaaggtccatgatcttgacgggttcgcccatgtccagcacatagatgctgccgctctcggccagtgcccccgcctgcagcaccagctgggctgcctcggggatggtcataaagtagcgctcgatgttggggtctgtcagggtgacggggccgccctttttgatctgtgcctcaaacagcgggatgacgctgccatggctgcccagcacattgccaaagcggacggccacacacttcatgtcggtgttgcccgcaaaggtctggatgagcatttcgcagatgcgcttggtgcagcccatgacgctggtggggttgaccgctttgtcggtggagagctgcaccaagcgctccacgccgtgctcgctggcactcaccagcaggttcttggtgcccagcacgttgttcttgacggcttccgccgggctgacctccatcagcggcacatgcttgtgggctgccgcgtggaagaccaccgtagggtggtaggtctcaaacacctcgtccagccgctttttgtcccggatggagcccaccagcacggtcacgggaatgtcccggccatacttctgctggagctccatctggagctcgtaggcgcagttctcatagatatcaaagatgagcagcttgcccgggtggaatttcatcacctggcggcagagctcactgccgatggacccgccgccgcccgtgaccagcacggtcttgcccgtgaggtagccggaaattttggcggtgtccagcgtgacctcctcgcgggagaggaagtccgccgtgttcagctcacggaatgccccctgccccggcgcgttggctcccaccagctgcgggtcgctcaggatctgcacggcgcagtgggtggaaacgcagaggtcgatgacatggttcaggcggctgcctttcagggtggggatggcaatgatgatgccctggatgttgtacttctcgcacagggcggggatctcttccagcgtgcccttgaccggcacgccgtggatggtctggttgagcttggcagggtcatcgtccaccgccaccaccgggtgaccgtagaggtcgttggtcttgcagacgttgatggcccagttgccggcctcgcccgcgcccacgatcatcaccgggcggttggggtccttgttggtgttgccccgcagccgctcccccagcgggtggttcaggaagagccgccatgccaggcggctgccgcccaccagcaaaaagatgaagacggcggccataacattggccgaattgaagagcacgccatggatgagggtgcggttgaccagatagacgatgacggtgggcacgccgatcatcccggccagccggatgagatcgcgctcccctgcatacttccacaggatggagtagagcccccctgccaagaaacagacgaggtacacggccacgatccagggcaggttgtggtagagcaaggctcggttatggggccaccaggtggcttccacggcaccatccgcccgcaggagcagggcaaagtaaaagctgaacgtcacgatgacagcatccactaagaacaggaacgcgcgccgggcaaacactttcggcggctgtttttttctttctttcacagataaatcctcttttgcatcagtgcagagcctgtccgcaccgtttttcttccgggaacttccacaaaaggcactgggcctccatggtatccattgtattatactcgtttcccgccccggtgtccagaaaatttccatttccgctctgtttttccggcactcagtgcttttttgccagcgcggcccgcacctcttctcccaggcccagcggccaggctgccacgagatagacggcactcatcccgcctgcacagagagccagcgctcccagccgcggcaaaagcgctccggcaaaccacccggccagcccctgccgcagggccacacccacggctgcagcccctgcagaagccagcatcggggcccccagccagcgccagagccggagctttgtctcactgctggcaagcagccgcccggtgttggcaaggcaggtgtagcagctggacaccagaatcacaaacaggaaacccggcatcccataccggggcagcagaagcaccacgcccacgatccgcaagatcgagtcccacacgctgtagcggaacgccgctttctgctcccccatccctttcatggcaccgtctaccatgctctcaaaatagagcagcggcatggccgggccaagtacctccaaatagaagcccgcctccgggctgtggtagagcgtccgggccagcggacagcccagcacccagaacaccgccccggccagggcggagaaatacccggtcagccgcagcatccggtcaatgagggcctgcaggcgggccgtctcgccccggatgtgggcctgcgtgatctccggcatcagcaggacggagaggctgcccagcaggccaaacggaaacgtcagcaggggcagcgccatccctttcaggctgccatactgggccacggcggcgtcgcgtccgccctcagcccccagtgcaagggcaaggcaggcgggcaccagcatgttctccgccgtgtgcagggcgctggcaaggcaccgccctccctccaccggccacaggatgtcccagagccgtcgggccgggtcacgggggcgccgggccttttccccggcaaagcagcgccgggcctcccggtggtagaacaggagcatcatacaggccgagactgcctcgctcagggccgtggccgccagcaccgcggtgcactttcggccgtgatcccagccccgtaagatcccctgctccaacaccacatagacgaccccgatgcggacggtctgttccgccagctggctgagcacgttgggctccacccgccgccgggcgatgaagaacccccgcagcaccgccgagacggccatccagggcatcccgaatgctgccgcccgcagagcgcccgcggcccgggcatctcccagccaccaggcagccgccaatcctgccagcccgaactgcgccaccatggcaaaggcccccagcccaaggcccgctgccagcagccgcaccagcattccccgagcttcggccctgccgtggctcaactcctcggccatgaggcgggtagccgccaccgagacgcccgccgtggccagcgtaacgaacagggcgtacaccgccagcaccagctggtacaggcccattccctcaccgcccagggcattggccagataaatgcgcagccccatgcctgccagccggagcaggacatccgccccggtcatcagggccgcattcttcaggtagctctgccgcatggcgcgcctcctttccccgccaatgcacaaacggggaggttttgtttactgtatgcggcaaaacagcccgtttatgcgctttgcaaaagatgagcggcgtcgtgggttgtttctctcccacttttatggtatgatatgtgttggtcacacaagggcggtttgcgccctttgatacaaaatgcaaggaggaagcgcattcccctacggcaacgccgccggagtgcgcaacgagagaatgagcgaagaatgcacccatgactgctccagctgcggagcagcatgttcttcccgcaatgccgcgcctcagcacgacgcacccaaccccaacagcagcgtcaaaaaggtcatcggcgttgtatccggcaagggcggcgttggcaagagcatgaccagtgccctgctggcctgcgccatggcccgccgcggctaccactgcggcgttctggacgccgacatcaccggcccgtccatccccaagctgttcggcatccatggccgtgccatggccgacgcgcagggctgctggcccatccagagccggatgggcattgacgtcatgagcatcaacctgctggtggagaacgaggaagaccccgtggtctggcgcggccccgtcattgcaggcgcggtgaagcagttctggaccgatgtggtctggaaagacgtcgatttcctgtttgtggacatgcctccgggaaccggcgacgtgcccctgacggtcttccagagcctgcccgtggatggcatcgtggtggtggcaagcccgcaggagctggtgagcatgatcgttgccaaggccgtgaacatggccgagatgatgaaagtgcccatgctgggcctggtggaaaacatgagctacgttgtctgcccggactgcggcaagcacatcaatgtgtttggcgacagccatgtggacgaggtggccgccaagcacggcctgcccgtgctggccaagtgccccatcgaccccgagctggcgcgcctctctgacgccggcctcattgagacctacggcggccagtacctggagggtgccgcggacgcctgcgagaagctgctcaagaagtaaaatttcatattcccgctgttctgccccgtgcaggatggcgggattttgttatttttcggacggatttgtcctatcgcgtcccgggggattctggtatactggttttatcacgatacgctttgatgaaaggatgtgcgctgcccgtgctggattccattatttttgacatggatggtctgctgatcgacaccgagatcatctcctaccagttgtattctgctcttttggctccttatggctttaccgtgagcctgcacgattacgccgagacttacagcggcaagaccgaggagaaaaacgtgaccacccttttggagcattaccccctgcccctgagccgggaggagtgttttgcccgcatttcggccatggaaaaagagtttctggccaagggtgttgctctcaagcccggcgcaaaagagctgctcacctatttaaaagagcatggctataaaattgcactggcctcttccagcatcgcagaccgggcctacggcatcctggaccagcacggcatccgcggttgttttgactcctttgtgttcggcccggacctgcccaagggccgcggcaagcccgcgccggatatcttcctcattgcctgccagaagctgggcaccaccccggcgcgggcactggtgctggaagacagtgaggcaggcatccaggccgctcactccgcccacatcccggtcctctgcgtgcccgacctgcaccacccggccccggcttacgagtccatgaccgctgccatcctctcctccctgcacgaggtgccgggctggctggaagcccagaacgcgcaataaaagccgcacaaaagtctttcttttgcagcctccgctaactttagaaaagaagattttttgcctgtttccgcacagtttccattttttgtgaagcgtgttcatcttttatcctgtttttttgaaagattttcgcaaaatattcgcacagcttctattgtaaattgccccgcaaagctttataataacaaagtgctctgcggcagatgtgtgccgcagaggggaaaaagcctgcacagggcgaatgtgcgtttggccctgtactgttgcaatatagaggaaaaggagtattctgttatgttgacgaatgaatacctgaagcgcgtttacgatggccttgcacagcgcaatgccaatgagcctgagtttctgcaggcagtccgcgaggttctggagagcatccagcccgtggtggagaagcaccccgagtacgagaaagccggcctgatcgagcgtctggtcgagcccgagcgcgtcatcagcttccgtgtgccctgggtcgatgatcagggcaaggtgcaggtcaaccgcggctaccgcatccagttcaacagcgccatcggcccttacaagggcggtctgcgcttccatccctctgtcaaccagggcatcctgaagttcctgggctttgagcagactttcaagaacagcctgaccaccctgcccatgggcggcggcaagggcggctctgactttgacccccacggcaagagcgacatggaagtgatgcgcttctgccagagctttatgaccgagctgtaccgccacatcggccagttcgtggactgccccgccggtgatatcggtgtcggcggccgcgaggtcggctacatgtttggccagtacaagcgcctgaccaacagcttccagggcggtatgctcaccggcaagggcctgacctttggtggttctctggcccgcaccgaggctaccggctacggcctgtgctacttcaccgctgaggcgctgaagtgcatgcgcaacgacagcttcaagggtaagaccgtggtcatctccggttccggcaacgttgccatctacgcctgcgagaaggctaccgagctgggcggcaaggtcgtgaccatgtccgactccaacggctatgtctatgaccccaacggcattgatctggcttacgtcaaggacctgaaagaagtccgccgcggccgcatcaaggagtatgccgagacccacaaagacgcaacttacgttgcagactgcaccaaggtctggactgtcccctgcgacatcgccctgccctgcgcaacccagaacgagatcaacaaggagtccgctgaggctctggtcaagaacggctgcaccgtggtctgcgagggcgcaaacatgcccagcactccggacgccatcgaggtctatctggcaaacggtgtcctgtacggacccgcaaaggctgccaacgccggcggcgtggctacctccggcctggagatgagccagaactccgagcgcctgagctggacctttgaagaagtcgatgcaaagctcaagggcattatggagggtatcttccatgccagctatgacgcttctgttgccgctggttccgagggcaacctgatggtgggcgcaaactgcgctggcttcctgaaagttgctaccgccatgatggctcagggcatcacctactaa

SEQ ID NO: 275 - DNA, 25896 bp, unidentified
  source 1..25896: mol_type = unassigned DNA
  misc_difference 11419: note = a, c, g, or t
  misc_difference 11420: note = a, c, g, or t
  misc_difference 11421: note = a, c, g, or t
  misc_difference 11422: note = a, c, g, or t
  misc_difference 11423: note = a, c, g, or t
  misc_difference 11424: note = a, c, g, or t
  misc_difference 11425: note = a, c, g, or t
  misc_difference 11426: note = a, c, g, or t
  misc_difference 11427: note = a, c, g, or t
  misc_difference 11428: note = a, c, g, or t
gccgggcagggaagaccaccctcctcattgcccaccgcatttccacggtggaggggctggacaagatcatcttccttgaggatggccgggtggaggccgtgggcccccacgacagcctgtatgcttcctgccccgagtatcgccggatggtggacctccagcggctggaagatgaggtaggaggtgacagcaatggctaatgtgaatccgcttctgctggtgggagccgttattggtgtggtcacggccctgctggtgtttgcttacgcctccgtcaaggacaagaaaggatccatgggctttgaacggaatatggccgatggcgagatcgtgcgccgtctggtccagtacgccaggccctatggcggaaaattcatcattgtgggctttctggtcctcttctccatcagttacgatattgcgtctcctctcatcgtgggctatattgaagagctggtggtaggggactttaccctcgaccatctgtttgcctcggtggcggtctatgcgggcgtgctcgtcttctcgatgctgagcacctatttccaggccgtcatcctccagaaagtggggcagcgcatcatttccgacctgcgcgaagacctgtttacccacatcgagtcactggctcacgaacagctcaatgagatcccggtgggcaagctggtcacccgtgtgaccaacgacaccaacgccatctcgatgatgtttacaaacttgctggtcaacctgaccaagaacgcgttcgtcattctgggcattctggtggcgatgctctgcctcaactatgagctgaccctgatggtgctctgctttgtgccgttcatcgtcatcttcacggtcatcttccgcaagttctcccgccgggcttaccgcaaggtgaaagatgccacgaccgacatcaatacctatctttccgagaacctctctggcatcaaagtgacccagatctttggccgggaagacgagaagatgaccgagttccgccagaagagccagactctggcccgggcgaaccaggagcagatcttcgtttttggcgtgttccgcccgctggtgtatatgctttatatcagttccattctctgcctgttctatctgggcggcatgggccacctgacgggggccacgttcctggggcagagcatttcgtccggcaccatcgtcacgttctacatgtacatctccaagttctttacgccgatccagaacctggcggagcaattcaactggctgcagtcggcctttgcgtcgtcggagaaagttttctccatcatggacattgagcccaagatgcaggatgccccggacgccatcgagctggaggacatcaagggcgagatcgaattcaaggatgtctggttcagctatatccccggcgagtgggtgctgcagggcgtctcgttccatgtgaacccccgccagaccgtggcattcgtgggctccacgggctccggcaagagcacgatcttgtccctcatctgccgcaactatgagttccagaaaggcgcgattttgattgacggcatcgacatccgcaagatcaaaatttcctgcctgcggaagcactttggccagatgctgcaggatgttttcctcttctcgggcaccatccgctccaacatcgtcctgcgggaggagaacatcccggatgaggagatcatggaggtctgccgctatgtcaatgcggaccacttcatcaacaagctggaccacggcctggacgaggaagtccgggagcggggcaacaacttctcggcaggccagcgccagctgctcagctttgcccgcaccatcctgcacaagcccagcgtgatgatcctggacgaggccaccgccaacatcgacaccgagaccgagctgctgatccaggattcgctggaaaagatgcgctcggtgggcaccatgctcattgtggctcaccgcctgtccaccattcagcacgcggacaacatcattgtgctctcgcacggcaaaattctggagcagggcactcaccagcagctactggcccggcacgggcggtattaccagctctacacgctgcaataccacaaagagcagttgaattcgcaataaaggaaatcaaaagacaaaacgctcccgcattgggccaagaccctttgcaggagcgttttttgagaacagtttcgttttacgccatcgtgagcaccagcgcgcacagcggcagggtgaggatgctgagcagggtggtgagcacaacgcacccggcggcaaactgctcatcgtggccgaactgcaccgcaaacaccgaggtgatggcagcagcggggcagcactcgagcagcagcacgacctgtgcggccatcccgaagcggaacagccccagcagagcaaaggccccaaggcagagggccgggatgaccagcatccgcacggcggccagtttccagatggggcggctgcagacgatgctctttaaatcgcccgccgcgatcagcattccggtgatgagcatggaaagaggggtgttcatggcacccagcagggagatgggctgggccagcagagcagggatggggatttgcaggaggtaaatggccaggccgaccaggacagcgtaaatggccggggtgtgggccaggctcttcaccacggctttggggtcagagctgccgctgaccatgctgtagcccagcgtccagagcaggacgttgaacaccgtgacataggcgctggcgtaaagcagtccctccgagccgaacagggccgagatgagcgggaagcccatgtaagctgcattggaaaagatgctggcgaagcggaagatcgcggtccggctgttcttgcggcgggcggtgagggccagcgtgagcacggtgcccagtgcaacggtgaggatgctcaggccgaacgccgccagcaggttgcgcagaatttcaaggctgaactccatctgataggagtttacgatcatggccgggaccacgatgttgaccagcagattggacagcggctgtttgtgctccagcttcaggacacccgttttgacagccaacgtgcccaccccaatgagcagaaacagcacaatgacctgttgggcgcagataagtgccaactccataaagaatcctccttgcgatccagacaatcaaaaacattacgaagaatacaacacgggtataccatagaaagactgaaattgcaagagggagcgcggtaaaattacaaaatcacatttttaatcaggagggagacactgccgtccgcatcgtggaggaactccacggccgaatcctcggaaagcatctcggtagggatcttgacctcaatgccgttggcagtgtggatgctgcggctctccatccggcggatgcgggcaggcgtcaccgtcacgggctggtcgtgcatggcgggttccagcacgtcgcttttctccacatagtcatcaaaggggacggcggccagcgggtagtcctcggccagctgtctgcgcacctgctccacagtgacttgattgtcgttgtcggaggcctgattggcgatgagcatggctacctgtgcctcggcgtggggctcgtcggcatagctgtctttcacagcctgggcagcggcttcctggatggcctgcagctttttcttttcgggctcggcctgggtgtactggaacaccactgtggagaggtaaaactctttgtggccgtcgatgtcgtatttcttttccagcaggcgcatggagtaatcggtcaggtccacaagggcaccctcctccaccttgccgctctgggtgggcaggcaggcccgctgctggatgatggagttgacgggggctccgcccacctcctcggtgtaatgggtgtagccgtttttgtagttcagtttcaggatccccagccagggctcgccatcccgggtgaaatccaccacagccaggtctgcccctgggatggtggtgtgggcgtgcatgtaatcaaacaggacacccgcgatccggcaggagaggtccacgaaatccttgttctgttccagctcgttccgaaacgcggagtcgggcaggggacggcactggcggatgtcatcgctggccagcagtttttcaatgtggtattgcaggtacgccattttctcggcggtaggctccatgcagctgccgctgagcaccggggcgtccagtgtggtgtccagcacatgcagaatggcctgatgaatgatgatctccataatatccctcacggttctcgtttattttgggccccgggagcggggcagaagttctcgaagtgaattataacatatcccgcgcccaaaagcgagagccggacatcttgcaacaccacgctacagatgctatactgaacacagaatgaactgcgctgcagcgctgaaaggggaagacagaatggaatttcgggataaaccgatgcagaacctcatccgcgtcaaagaaaaagagatctgcaaaaatgtgcaggagctgctgctggacggcgagcagatcgtgggagcctacaagacggtgcgtgaccaggccgtgtttacctcccaccgtatttttattgtagatatgcagggcgtcacgggcacccggcaggagatctttgtgctgccctaccggaagatcgtccatttcggcatccagacggccggctttggcgacccgctgcagacctcacagctgacggtctgctatgcagatgagcacgagatgaagtttggctttatcgggcaggaggaactgctggcggtggcaaaggctatcagccgctgcatcctgtaaaacagcaaagcaaacgaaaggcccgctccggggcattgtacgccggggcgggtctctcgttttgctgtaatatgtgaatgagaggatggcaatttagcaggcgcggtccttgcggccggcctccagcatatagtgcaggaagcccgtcacgtcagcagggtcggccacgctgatggaaaagcccttggcgggggcattcatcatctggaacagctcggtggtggcagaatccttcttcaggtcgcaggtctcgccattgtccagatgcaggtaaacactgcccttgctggcagcaacctggcgcataaaacggtctttatcaagatattgaatccgaagcataaaaatacctcctagaaaacagattttgagacatcgggtgcgggcagttgttttccgtccgtcgcggtgttatactgagcttgcagctctgatgaaataataccacaaaacaggtggatgtagtagaataaaagcacccgatttatacaacaaaatcggcttggataaaaaactaacattcatgtggggaaaggaattggcaaatatggcggtacaggtctgcaacattgttgtggcaagctcggagggccgggagctggcacaacacggaagcccgatgttccccatcgcgtgctatgcggaggacatgacggcagattccgtggcatggcactggcacgaggaatttgagtatatcctatcggaaaaaggcattttgtgtgtggatgtgaacaagacccgcgtccgcctaaatcagggagagggtatttttgtgaactccggggcgcttcatgcggtggagcagagccccgccctgctccactcctgcgtgttccacccgcggctggtgggcggtatggataccatcttctggcagaagctcatcaagcccatgacccagccgggagctccggcgttcttcctcctcaatgaggcggtgccctggcagaaagaggtgctggcctgcctgcgggatgcctggcgggaggtggccgatgagccctttgattatgagaaccgggcgcggtatcatctctcggcggcgctgcggatcctcagcacccagtgcgtgggcggcaagaccaaagtctcccagcaggagcagatcgcggccgagcggatgaagcagatgctccgctttgtggaggagcactatgcggaggagctgaccgtggaaaagatcgccgcctgtgtggctctgagcgagagtgcttgcctgcgctcgttccggcagctgctgggaaccacccccatccagtatgtcaagcagtaccgggtggaaaaggccgccgaactcctccgttccacccgcctcaagaccggggagatcggggccgagtgcggttttgcggatggcagctactttattaaaacattccgcgaggtgaaacgctgtactccactggaataccggcagcgcttcggcctggaagcataaaacaggagttgggaaaaatcggaaaaggagaatcggtttatcatgcagcgcagtcttacccaagggcccattacccgcaatatgctgctgtttgccctgccgctgatgtgcggcaacctcttgcagcagatgtataacattgccgatacctgggtggtgggccgcttcctcggagcggacgctctggccgccgtgggctcgtcttacaccctgatgacattccttacctccattgtgctgggcctgtgtatgggcagcggcgcggccatctccatgcagtatggcggtggggaagaggcccggatgcggcagagcgtgttccagtcctttgccctcattgcgggcatctcgctggcagtcaacctgttggtttatctgggcctcaacggcattttgtgggtgctgcgggtcccggtggagatccgcccgctgatgaagcagtacctcgttatgatcttcggcggcatttttgccacttttttgtataactactttgcaaatctgctccgggctatcgggaactcgatggtgccgctggtctttctggcagtgtcgtcgatcctgaacgtggtgctggacctggtctgtgtgctggtactccactggggcgtccagggcgcggccatcgccaccgtgttttcccagtttgtgtccggcgtgggcatcgggctttataccttaaagcagttcccggagctctgcccccggcgggaagactgcaagtgggacaagcacaatctgggaaccatcctgaatctgtccgttatgaccagcgtccagcagtccatcatgaactttggcatcctgatggtgcagggccttgtcaacagttttggcacggtcatcatggcggcctttgcagcggcggtcaaaattgattcctttgcctatatgccggtgcaggatttcggcaacgcgttctccacctatgtggcccagaactacggggccaaccagccggagcgcatccgtaagggcatccggagcgcggcggccacttctgctgtgttctgcatctgcatcagcgtgctggtctgcctgtttgcagctccgctcatacagatctttatggatccgtcccagacggggatcgtcgcggcgggggtgcactacctccacattgagggggcctgttatcttggcatcggcatgctgttcctgctgtacggctactaccgcgctgtcaaccagccgggaatgtcggtcatcctgaccattgcttcgctgggcacccgtgtggcgctggcctacctgctctcggccactccactgggcgtgacgggcatctggctcagtgtgcccattggctgggcactggcggacgccattggcattggctattatttcaaaaataagaaaacgaaggcagcagcatgaaaaccatctgccttatgtgccatggcgagacgcttttcaaggggatggatctggacgctttggcgccggggtggtggatttaatagaagatgcttgcagtaaattaagaatcggcgaagccctctcaccagttgcgtgagagggcctttttgcgcccaaaacagggatttacacaacgaaaacttttgtttggtttgataaatacttgtgaaagaactgtaaaagctaaatctttttagataaaactcttgacatctgaccggaattcgatataatggccttgttcgacaactcaaaaactttaggtaaacaatttgaaacacacaagataaaccatttgataaaaggagaccattactatgactttcgatgagatgaagaagatcgttgttgacaccctgaactgcgaggaagacaaggtgaccatggaggccagcctgaccgaggacctggaggccgacagcctggatgctgtggaactgaacatggctctggaagatgcattcggcgtctccatctccgatgaggagctggccaacatgaagaccgtgggcgatatctttaactacctgacggcccacgcggaataaggtaccgaggcaagcgagatgaacgatatcagagacctgctccccggcggcaagatgcgggaacgcacgttccagctcaaggcccggcgtgacgtcggcgtggcctggacagaaccccagtttgtggagtgtaagcagtgcggccgccgcactacccggcaaatctgggccaaaagctttttcgtctgccccaactgcggcttccacctgcccatcggcggctactatcggctcagccttgtgctggaccatggcagtttccgggagctggatgagtcgctgcctccgcaggatgtcctccatttcccgggctatccggaaaagctggcaggggcaacggcgaagacaggcctgagcgaagctgccgtcacggccgtgggtcggatcggcggcgtggcctgcgtggccgcggtgctggacagccgcttctttatgggcagcatgagcacggctgtgggcgataagatcacccgcgccattgagtatgctaccagcaagcacctgcctctggtcatcttctcggccagcggcggcgcccggatgcaggagggcattttcagcctgatgcagatggccaagaccagcgccgccattgagcgcttttccagcaagggcgggctgtacatcagtgtgctgacccaccccaccacgggcggtgtcaccgccagctttgccagcctgggcgatatcatgctggccgagcccggggcactcatcggctttgccggcccccgcgtcatcgagcagaccatcggcgagacactgccggcgggtttccagcgcagtgaattccagctggagcacggctttgtggataaggtggtgccccgcagtgagctgcgcgctacgctgatccaactgctgcagctccacgcagagggaggaagacggaatgattaaagaccttttggagcagcttgctccgttggatgcccagatcgcagccctgcgcggcaatgcagccgacgaagagagcgatatgagcgccatcacggcccatgcctctgagctggcggagctggctgtggaggaggatgagatcctccgcagctgtggcccgctgaccgccgaggaccgggtctttctggcccggcatccggcccgcccccacatcgacgagaccgtcaacgctctgtttaccgatttctttgagcagtgcggtgaccgccagtgccgggaagaccgggccattctgggcggcatcgccaaattccacgggatgcccgtgaccgtcatcggtcaccgcaagggtgccacactggaagaaaacatggcctgcaattttggaatgccgggccccgaggggtaccgcaaggccctgcgcctgatgaaacaggccgaaaaatttggccgccccatcattacctttattgacacgccgggcgcttaccccggcaaggaagccgaggaacggggtcagggcgaggccatcgcccgcaacctgatggagatgagcggcctgacggtgcccatcatcgccgtcgttacgggcgagggctccagcggcggtgcactggcattgggcgtggcaaaccacatcctcatgctggaaaacgccgtttactcggtgctcagtccggagggctttgccagcatcctgtggaaagattcttcccgcagcggcgaggcctgtgagctgatgaagctgacggcccaggacctctatcgggatgggattgtggaagagatcatcccggagccggtgggcggcgcgcagcgcagccacgcggctctgtacgcggcgctggacacggccctgaaaaaccatctgcgcactctctgcaagatgggcggcaaggccctggccgagcagcgctataaaaaataccgccagatcggggaaacgaggaaagcatgaacgggttacagctgatcgcaaccggcggggcactgcccggccgcacggtcaccaacgaagatctgagccgcgtcgtggacaccagcgacgagtggatcaccactcgcacgggcatccgcacccggcactggtgcacggagggggagagcgcggccaccctggcgatcgcagccgcccggcaggcgctggaacgcagcggcctggccccggagcagatcgcctgttgtgtctgtgctaccctctcggccccggacgcgaccccgagcgtggcctgtcaggtacagcgtgcgctgggcctgcccgaagaccgcccggcactggacgtcaacgcggcctgctccggttttgtctacggcaccgccgtggcccgcggcctgctcaccacactgggcggacagtatgcgctggtggtagggtgcgaggccctttcccgtctgatggacccaaccgaccgctctacctgtgtcctctttggagatggcgcgggcgcggccgtttacgcgctggccgatactcccttcgccattacgctgggagcccggggcaatgatgccatccacgcaggcgggcctgatcggactggttctgcgcccatcaccatggacggcaaggctgttttccgctttgcggtggatgccctgcccaagagcttgaacaaggttttggctgagacaggactgacgctggacgatctggactgggtggtctgccatcaggccaacagccggatcatcgaccactgcatcaaacacctgaatgccgacccggccaagttctacaagaacatggaccgccacggcaacaccagtgctgccagcattccggtggccctcaatgagctggccgaagcagggaagctgactcccggccagcgggtggcctgcattggctttggcggcggcctcacctggggcggcatgattctgacatacaaaggttgaaaaaatgaaacttctaaatgagattctggggacgaagtaccccatcattcagggcggcatggccaacatcgccaccggcgagtttgcggccgcctgctccaatgcgggggccctgggcctcatcggcgcgggcggaatgcgggatgcggataccctgcgggagaacatccgccgctgcaaggcattgaccgaccagccctttggcgtcaacatcatgctgatgcaccctcttgcagatgagtttgcaaagatcgtggtggaagagggcgtgcaggtggtcaccaccggcgcgggcaatccgggcaagtatatccagatgtggaaagaagccggcatcaaggtcatccccgtggtggctgctgccgtgctggcaaagcatctggagccgctgggcgtggatgccatcatcgccgaaggcaccgagagcggcggccatgtgggcgagatgaccaccatggccctggtcccccaggnnnnnnnnnngtagtggatgccgtcaatgtcccggtcagcgcggcgggcggcattgccgatggccgccagctggcagcagcttttgcgctgggggcctgcggtgctcaggtgggcacctgcctgctggtgagcgaggagtgccccatccacgaaaactacaaagcggccctcctccgggccaaggacagtgacaccatcgtgaccggccgcatcggcggcacccccgtccgtgttttgaaaaaccggatgagccgggaatatgtccggcaggaaaaggccggtgccgataagatggagctggaaaaatacacgctgggcagcctgcgccgtgccgtctttgagggcgacactgccacgggcagcctgatggccggtcaggtggccggaatgctccatgaggtgcgcccggtggctgccattctggatgagctgtgggagagtgggaggcagcgcatggccgcgctgagtgagctatgctgaccctcgcgggcaaaccccttgcagtccccattttacagggcggcatgggcgtgggcgtttccctgggcgggctggccggagccgtggcggcctgcggcggtatggggtgcatctccaccgctgacaccggctaccgggaaccggattttgccaaagacccggccggcgccaaccgccgcgccctggcggcggagatcaaaaaagcaaaagagattgccaatggtgcgggccttgtggccatcaacgccatggttgccacccagaactatgccgacgccgtgaaaacagcggtggaggcgggagtggacgccattgtctcgggggccgggctcccgctggagctgcccggtctggtggaaaaagccgatgtggcgctggcacccatcgtatccagcggccgagcggccaggctgatcttgcgccgctgggccaaatcctttggccgtaccgctgattttgtggtcattgagggctgcaaggcgggcggacaccttggcttttccgaggaagagctgctggcaggcaaatgccagaccttagatgaaattctgccggaagtccttgcggaggtaaaaccctacgaggagcagttcggccacgccatccccgtgtttgtggcgggcggcgtttacacgggcgaggacatcgcccactatgcccggctgggagccgccggtgcccagctggccacacgattcatcccgacctatgagtgcgacgccagccagacctataaagatgtcctgctggcggcacagccggaggatgtccgtatcatccacagcccggtgggaatgcccggccgggcgctgaacaccccgctggtgcagaagctggccgagggcctgcgcttccccccgaaacggtgcgcccgctgcctgaaagcctgcgaccctgcaaaagtaccctactgcattacccacgcgctgattgaagcggtcaagggcaatgtggaagagggcctgttcttctgcggggccaacgtggggcagctggaccggatgcgcagcgtccgggagctgatggatgaactgatggacgattggaggaaacaccaatgaaacttgccattctttacgccggacagggcagtcagcaccccggcatgggcaaagacctttacgaagcatatcccgctttccgggccgcttttgatgccgccgcgctggattttgacctgcacagcgtctgctttgaagacccggacggcgttttgaatcagaccgaatacacccagccctgcatggtggcctttgcggccggcgtgactgctgttttgcaggaaaacggcgtcaaggcggatgatctggccggcctctcgctgggggagtattccgccctgcaggccgccggtgtctttacggccaagcaggcggtggaactggcggcttaccgcggcaaggcgatggccgatgccgccaaaggcatcgactgcggcatgaccgctgtgatgaacctggaccgggacgctctcgcaaaatgctgcgaagaggcctccgcactgggtgttgttcaaatctgcaattacaactgcccgggccagctggtcatcggcggcgagaaagccgctgtggaaaaggctgccgagctggcaaaagccgccggtgcccgccgctgcatccccctcaaggtcagcggcccgttccacacccggctgatggctccggcaggggatgcactggccaagcgctttgccactgagaacttcggagagatgaaaactcccgttctcttcaactgcttaggccatgaaaagagcgcggagaattccatcccggcgctgctggaaaagcaggtgcagagcagtgtttacatggaggataccctccgccgcctgggtgagctgggcgtcaccgagatcctggaagttggcccgggcaaggcactgagcggctttgtcaaaaagacgctgggcccggacgtgccctgcactgccgtggaaacggcggaggagctggccgcgttcctgaccaagtggaaggaggcccacgcatgagcgaagctgtggtgaagcgtgctgccgttgtcaccggcggcagccggggcattggccgtgccatctgcgtggctctggccaaacagggctgcaatgtggtggtcaactactgccacggtgtggatgctgctgctgagacggtggcccagtgcaccactctgggcgtgcaggctgtggccgtacaggccgatgtctccaccgccgagggctgtaaaaaactgtttgaagaggcggtcaacgcctttggccgggtggatatcctcgtgaacaacgccggtgtcacccgggataatttgatcctgcggctgagcgaggaggattttgacaaagtcctcaacgccaacctcaagggagcgttcctctgctgcaaggaggctgcccgccggatggtccgtcagcgctctggccggatcatcaacctcagcagcgtggtggccctgcggggcaatgcgggccagaccaactacgccgccagcaaggcaggcctcatcggtctgaccaagagcctggcccgggagctggccagccgcggcgttacggtcaatgcggtagcccccggctttattgcaacggatatgacggctgtcctgcccgaagcggttcaggcggaaatgacaaagggcatcccgctgggccgtgtgggccagccggatgatgtggcaaacgcggtggcgttcctcgctgccgaacaaagcggctatctcaccgggcaggtgctctgtgtagacggcggcatggcaatgtaaaaggagaaattctcttatggaaaaacgcagagtcgtgattacgggccttggcaccgtgaacccgctgggcaacaccaccgccgagagctgggccgctgccaaagcaggcaagtgcggcattgggcccatcacccagtttgacgccagcgaattcaagtgcaagctggccgctgaggtcaaaaactttgaccccgagacggttgtggataaaaaagaggcccgcaagatggcccggttcaccctgctggcgctgggcgctgccgcggaggcactgaccgacagcggcctggatctggccgcagagggcgaacacatcggtgtcagcgtgtccagcggcatcggcggcctgcccaccatcgaggagcagcacagccgtggtctggaaaagggaatggaaaaggtcagcccttattttgtcccgatggccattgccaacatggcagcggcccagatcgccattcgctttggcctcaagggaatgtgcacctgcccggtcacggcctgcgcgggcggcaccaacgccgtgggcgatgccttccatcgcatccgggatggctatgagcccatcatggtctgcggcggtgccgagagctgcatcagcccgctgggcatcggcggttttaccagcatgaaagccctctccacggcccaggacccggaggcagccagcctgccctttgacgcccgccgcggcggcttcgtcatgggcgagggcagcggcatcctcgtgctggaaagccttgaacacgcccaggcgcgcggtgccaaaatttacgcggaagtagtgggttacggtgccaactgtgacgcctaccactttaccgccccggctcccggcggcgtgggggccatcggctgcatgaagcaggcgctggccgacgccggcgttgccccggagcaggtggaccacatcaacgcccacggcacgggcacccacatgaacgacagctgtgagacggctgccatccatgcggtgttcggcgagcatgccaaggagctggcggttgtctctaccaagagcatgacgggccacctgctgggcggtgccggcggtgtggaagcggtgttcacggcgctggccctgcgggaccagttcgccccgcccaccatccactatgagcagccggacccggagtgtgacctggactatgtgcccaatgtgggccgggaaatgtccatgacctacgcgttgagcaacagcctgggctttggcggccacaacgcctgcctgctgctgcgcaagtgggagggctgaaccatggcggaacctcgcaccgcgcgtgaaaacgcaaacagcctcacctcggagcagatcgcggccatcctgccgcaccgctacccgtttgcactggtggaccgcatcctggactatgaaccgggccagtgggccatcggccgcaagtgtgtttcccgcaatgaggaatttttctgcggccacttcccaggccagcctgtcatgccgggcgtcctcatcctggaagcgctggctcagaccggggccgtcgcggctctcagcctgccggaaaacgcgggcaaactggccctctttggcggcatcaagaatgcacgcttccgcaaacaggtcacgccgggggatgtgctcaccctccactgtgagctggtggaacagcggggcccggtgggcatcggcaagacgtccgcctatgtggacggcaaatgtgccgccactgccgagctgacctttgtactgaccgaccgcaccgaataacaaaaacgagaaaagcactccggagctgcagagatgctgcggctctggggtgctttttgccaaaaacaggcggcagcggatagcgctcccacaaggtgtttgaaatggtgcataaaatgtacaaaaatgtaaggatatgcagtaccatttcttgaacggggttgcgccgaaaagcgtttcgtgttatgattgttcaaagaaagaaacagacaccatcagacgttgaccggaaggaagcaaacgaactatggcaaagctggaaacgtgcggagaaaagggcttggcacagcagggatcaaaagacgcgcttttagaggaactggaagattttttgcgggaaaacgcggaacggcgcttgtgtatggcggccgtggatgtggagcatttcaagctggatgaggcgggctgcaactgggagcagtacagtccctccatgcgggaaaagctcaagcagcgccagcagttgctcattgagatcgagcgggcgctgcagaacaaggaattctgcttttacttacagcccaagtgcaacagcatgacccacgccattgtggggatggaagcgctggtgcgctggaaccaccccacccggggcatcgtgtcgcccggggagtttgtgcccctgatggaagagacgggcctcatcacccggttggacctctacctgtgggaagaggtctgccagatgctccacggctggaaagcccggaacgagaacatggtgcccatctcggtcaatgtctccatttcggatatcgcggcgctggatgtggcgcaggtgctctgggagttggtgcagaaatatcagctggagcccaaactgctgctggtggagatcaccgagagtatgctggcccaaaacctgaaaatggtggaaaacaccatcgcggccctccaccgcaagggttttgccgtgctgatggatgattttggcagcggctattcctccctgaatatgctccgcaataccagcgtggatgccatcaagctggatatgcagttcatcgtgcgggacagtgaaagcagcaagggcaagcagatcgtggaatcggtcatcgagatggccaggcggctgaacctgcccatcatcgccgagggcgtggagacgcaggagcaggtgttcatgctccagtccatggactgcctttacacccaggggtactatttttataagcccatggccgtgaaacaggccgaggagctgcttgcgcagcctgccatggaaaattactgggacctgcgccgggacatgacccgccggaattacaaggcctttacgggcggtcttgtgagcgaaaagagtgccattaccctgcaggcgtttcagatcctggccgataacgccctggtgctggcccgcctggatctggttacaggggaataccgcatcgtcaagcgggacgaacggctgatgggtgtttccgaagaggaaacgcttcagttggaaagctactgcgagcagctggtggccgaaaaagccatccacccggaggacgcagcgcagttccgcgcgcaggcgaagctggagctgcttcaggcggcattgttccgggagcggcgctcggtgatccgccgcttccgccaaatggtggcgggggagtatgtctgggtacgcatcgaggtgctgccctgcaaagactgcagcccggaagacccctgggctgtggtggtcgcgcgggaagaatttcccgaggaataacggttttatcaaggccctctgccgtggtgcagggggccttttgtgctgtctgacggcaaaatctaaagcaaagattaagatttcctaagaaaaatccaatggaaaagccgggccgttgctgatatactgagaacggtaaactctggaaacgtgaaaaatgggaggaaacaagatcatggcggcacagacgatactcattgcggaagatgatccggacatccgggacggtgtgcgcattttgctggccggggagggctaccatatcctggaggcggaaaacggaacccgggcgctggagatcttcaacccggaagtagacctggtcatcctggacatcatgatgcccggcatgagcgggctgcgagtctgcgaggagctgcgcaaggtgtccacggtgcccatcctgttcctgacggcaaaatcgcaggaatcggataagctgctgggcctgacggcgggcggcgatgattacctgccaaagccgttctcctttgcggagctcagtgcccgggtcagggctctgctgcggcggtactgcgtctatcagggcaaagggcaggtggctgtccagcccgaaaacctgaagctcatttccaatggcgttcagctggcgctggactgcaaccgggtctgggtagaagagcgggaagtggacctgaccgagacggagtataaaattctgcggatgctgatgcagaacccggagcgcatcttctccgtggagatgatctatgagaccgtgtggggtgagccttactactatacttccaacggcacggtcatggtccacatccgcaacctgcggacaaaaattgaagccgaccctcagaaccccaagcgggtgtgtaccgtgtggggcaaggggtaccggtttgtgagtgaggaacaggtatgaacagacagagcctcgttgcaaaaatgctccacctgcaggtggcgtcggcgctggtgtgcattctgctgtattttgcgctcctgtttgccacgcgagcggggctgagttactacaataatcactccgatattcagcagcgctccattgcccggcaggtggaacgatttcagaaatacgttacagcacaggagatctccgcaaaagacacccgggcgattgatgagtgggtggggcagcagagctttttgctgatgaacatttaccgcgggcatcggatgctctactcaaacttttcgttcagttttggagatgacccggatgaggaacgggaacccggttcaaacttttcgttcagttttggagatggctcggaggaggaacgggaatccggtaagagcgggcaggtgttttatcttgtccaattctcggatggcccggcccaggtacagctgttctgcaatgtggtgctcaactggtgggtcctgctcagtaaattgctgatcgttttctgcgtgggtgtgtttctggtggtgttctggtttgcctgccgccgcattgtgaaatatatcatccagctcagtgaggagatccaggccatggagggcggcgacctcgaccaccccattaccatccggggagaggatgagctgacgacgctggcccgctgcctggactccatgcgggtcaccctgcgccagcagcaggaggaggaagcaaaggcctccgccaaggtgaagaacctcatcaccgagatgtcccacgacctgcgcactccgctgaccacgctgctgctgtataccgagatcgtccggagccgcaaatatgagaacgacgcccagaaagatgactacctgaacaagatcgacaccaaggcccggcagctcaaacagctgtccgataacctgtttgagtatgcccttgtcacccgggacaccgtcgttacattggacccgccagcttacttctcccgcattttcgaggaaccgctggctgagatggtggatacattgcagcagcgtggctttgcctgtgcgctggaccttggcagtgaggacctgatgctgacggtcaagatgcagtatatccgccgcgtttttgataacatcacgtccaatgccatcaagtatgccgaccccggccgggagatctccgttacctttttaaaggaagaaaagtgggtgggcctgcgttttgcaaaccatgtgctgcccggccagcaccgggaggaaagcacccaggtgggcttgaccagcattgagaccatgatggaaaagatgaacgcggtctgccgggtggagcaggggacagagcagtttgcgatcacgctgctgtttcccatcacctgagagcgccggaaacgggtgtcagcgcgctttcataaattgttcacgattcttaagccaaatttaagaaaatcctcgggaatttctgaagaaaagtctgctataattccgttgtatcatatagaggggcattttggaagccccatccccccgaaaaaaacccaggaggccaatgtttatgctatttagaaaaaagccagcggaggaacgctccccgcaagaactggaaatcgcgctacaggaagcggaaatgccgcaaaagggcctgaagcccttcctgcacaaaaatgggaagaagctggtggccgttctggtcatcgcggccatcctcgttgtgctgctggtgcccaagggccagaagaaagcggtcaacgcggagaccgcgtatacccaggtgacgcccgagaaccgggacatcaccaatgtgtacagcgaatcaggcgtgctgagcgccgccaacagctacaccgtcaaggcgacggtcaagggcgatgtcctgaccgcggattttgaggtgggcgatgtggtggaaaagggcgcggtcctttacaccatcgacagctccgatgtcgtcagcggtgtggaaaaggcagagctgaacctcggccaggcccagcgcagctacgatgacgctgtggacgcccagtacatccgcaccgacattgccggcaccgtcgcttcctttaaagtgcgggtaggcgatgtggtcaacgcggggcaggaagtcgccactatccgggacgacaccaccctgctgctggagctggagttcccggcggcggacgccgccaactttgccgtgggccagagtgcggaggtgctgctggacagcacctttgaggccatcaccggcagcgtgcagtccgtctccggtgcggataccctcagcagcggcaacctgctggtccgcaccgtgaccatcgcggtccgcaacaccggcaacctgactgcttcccaggcggccactgccaccatcaacggcgtcagcgccctgtcttccgcccggttcagctaccagcgtgagcagagcgttaccgcccagaacagcggcaccgtctccgctctctgcgtcaaggagggagctcaggtcagcgccgacacggccctgatccagctctctggcgataaactgaccaagcaggtgctcaacgcctccgacaacctgcgcagcgccgagctctctgtggaagacacccagaagcaggtggacgattacaccatcaccgctcccatcagcggcacgatcatttccaaggatgtcaaggtgggcgataccgtgggcaccagcacggcaacggccgataccatgtgcgtcatctacgatatgagctacctggaaatgaccttgaacgtggacgagctggacatcctcaacatcaaggagggccagaaagccaccattaccgccgatgccgtttccggccagacctttgagggcgtggttaccagcatctccaaggcaggcaccaccaccggcggtaccaccacgtaccccgttaccatccgcatcgacgagatgggcgacctgctgcccggcatgaacgccacggcagagatcgtgaccgagagcgccgacaatgttctctcggtgcccaatgcggccatcgcccgcggcaattacgtccttgtaaccaaggattcgcccagcgccgccaacgcggatgacagcatgaccgctccggacggctacgtttacgtcaaggtggagaccggtgtcagcgatgatgactacattgccatcaccagcggcctgaccgcggaagacaccgtggcctatgattccagctacagcaccaccaccctcgccgggaatgtacaactggtgatggacggcggtgatatgggcggcggccccggcggtgctcctggcggtggcggcccgggaggtggccagtaatgagtgcactcattgagtttgacaacgtgtgcaagtattaccagatgggtgacacgacggtcaaggctgccgaccatatctccatgaagatcaacaaaggcgagttcgtggccatcgtcggccagtccggctcgggcaaatccacctgcatgaacatcatcggctgcctggacgtgcccacggcgggcacctatcggctcaatggccgggatgtgggcaagatgaacaaggacgagctggccgagatccgcaacgagatgctgggcttcatcttccagcagtataacctgctgcccaagctcagcctgctggaaaacgtggaagtgccgctggtgtacgcgggcatccccctggctgagcgcaagcgccgcgcgaccgcctctcttgagcgggtagggctgggcgataagctcaagaacaagcccaaccagctttccggcggccagcagcagcgtgtctccattgcacgggctctggcgggtaacccggcggtcattctggccgacgagcccaccggcgcgctggacagccacaccggccgcgaggtgctggggatgctgcaggagctgcaccggcaggggaacaccgtggtgctcatcacccacgacaactccattgcggtgcaggcccagcggatcatccggctggaggatgggcgtgtcgtctacgacggcgacgcccacgccccggaggcggtggtccagcccaacctggtcatcccggacccggtaaaaccacagaatgaaaccaaacaggagggcagcgtatgatctacgaaaccttccgtgaagccatccagaacatctggagcaataaattccgtacactccttaccatgctgggcatcatcattggcgtgatggctgttatggtcattgtgggtctgggcaacggtatgaccaccagcatccagaacgagtttgccgatatgggcaccaacctcctgaccgtgcagatcatgggctacggctcccgttctgtcaaagtcaaggacttctatgaactggtggaaaaaaactcggatgtcctcggggctgtttcgccctccatcagtatgagcggaacggtgaaagtcggtacggacgatgacagttacagcagcacctccgtcaaaggcgtcagcgaagtgtatctgaacatgggaggctacaccattgcgcagggccgtcccctgaactacgtggacatggacgccaacaaaaaggtctgcattgtaggcgattacatcagccgggtgggctatggcggcagcgccattggccagagcatcaagatcggcagagagtggtacaccattgtgggcgtgctggaagccaagatcgacgacccctccgatcaggagggcagcagcgacgactgcatttttgtgccctacaccacagccatgcgtgtctctggcatcagcacggccagttcttacgcggtccttgtgtccgatgaggagaatatctccaagggcaaggccatcattgagaatggcctgcaggagctgcttcactcggacagcggctatatggtcatcagcctgagcgagatgctggatatgatgacgagcatggtcaacatggtggtcacggtcctgacggccattgcggccatctcgctgctggtcggcggcatcggcatcatgaacatcatgatggtctctgttaccgagcgcacccgtgagatcggcatccgcaaggcactgggtgccaaggaaagaacgatcctgagcctgtttgtggtggaggcgggcacaacgtctgctctgggcggtatcattggcattggcctggggtacaccgtctcagcccttgccaccaaggtcctggccgtcatcatgaccgatatgcccattacggtcacccccaccgccggctccattgccgtggcctttggcatctcggtgggcattggcgtgctgtttggctacctgcctgcaaaacgtgccgcaagcctcaaccccattgaagctctgagatatgattaacgcgccctctcaggcgctcacgcgccagttttccccttgggagaaccaagcatactgattaaggagtgaaactatgaagaaacgcattcttgcgctgctgttggcggtctgcgtggcctgctccatgctcatcctgcccgcctcggccagcggctccaacacggcagtccagacagccgttacgctgggcggcctgacctccgaccagacggcaaacctggccgcaccgcttacccgtggcgcgctgaccaaactgatggtggcgttctccgcctaccgggaaagcgccaagacccagggctccacgggtaccctcttttcggatgtgagcagcggctccgcctatgcgccctacgtccgcattgcggtccagcagggctggatcagcggctatacggacggcagcttccgcccggacaatgctgtcacgctggaagaagcctgcaccgcggtcctcaagctgctgggctatgacgtgaccaccctcagcggtacgttcccggccgcacagctcaacaaggcaaacgagctgggtctgcgggacaacctgaccaagacccagggcgaggggatgacgctggaagacggcgctgtcctgctctacaatgccctgacggccaccaccgcggagggcaaggtctatgcctcttcgctgggctttaccgtgaataacggcgtggtggatgtctcttccatcctgctcagcaatgtcaagggcccctttgtggcgggcctgggcactcagctgccctttgcacccacggcggtctaccgcaatgataccgtgaccacggacgccaccctcaacgcctatgacgtttactactacaacgagacggcccagacggtatggatctacacccgcaaggccgcaggccgcatcacggccgtggctccctcggccaatgcccccacttctgttaccgtggcaggcaccgagtacaccatcgcttcctcctctgtggcggcacagctctccgctctgaacggcggtggcgtgggccaggtggtcaccctgctgctgggcatgaacgatgaagcggtttccgtcctgacgggcgacgccgccaacgaggtgttctacggcgtggtccagaccaccagccgcagcctggtggaaaacagcggcccggatgtgcagcagaccgtggccgttgcctgcaccgatggcgtgacccgcagcgtgaacgtggacaaacagttcaactatccggcaggcaagctggtggccatcaccgtggatgaaaacggtgagagcatccagagccttgagaccaaatccaccagcggcaccgtcaacgccgagggcaccgccctggacaatacggccctggccagtaacgtggaaattctggacacgacttcggagggtttggctggggcagttcgccccagccgcctatcgggggtcactctgagcggcacggacgtcaaatattataccaccaatgaaaaaggcgagatcgaccgcctcatcctcagcgacgtgacgggcgatctgtgggagtacgcggcactggatggcatccaggcagccaccgattatgcgggcagcaagatcgacgagaaaatcaacgagaaagtttcctcttcctcttcgacaagctcgtctctggcaggcatgaccacgaccaccgaggatgacgaccagaaagccaagcagaccgctctggatgtgcgcaacatcctgctgcccagcaccagcgatgtgctgtatggt

SEQ ID NO: 276 - DNA, 18374 bp, unidentified
  source 1..18374: mol_type = unassigned DNA
acatttttgccaacatggccatgggccggctgtggggcagcctgttcttcctgttcatggcgtttgccgctctctccacggtgctggccgtgtttgagaacatcatctgctgcgatatggagctgatgcactgggaccgcaaaaagtccagctgggtcaacctgttcctcatcattgccctctcattgccctgcgtgctgggctacaacctctgggcctgggatggctttgccatcttcggcggcgccgtgctggatctggaggatttcctcgtcagcaacctgttcctgccgctgggttcgctggtctacctgctgttctgtacctcccgctatggctggggctgggagaactacaaaaaagaggtcaacaccggcgatggcctcaaagtgcacgactggatgcgcggctacctgacctacggtttgccggtcattgtgctgttcatctttgcatttggcctgtacgataaattcctggcgtaacccggcagccggggccgctgtaaatgaccactgacccctaagaggcggccctccttcccggaggactgcctctttttgcttccacaggaggaaaatgaccatgtatattctgatctgtgatgacgagcccgcggtggctcggcaagtggaacaacttgcccggcagcacctggaacagcggggcatcccggtgcagtgcgccgtctgcacccggggcgaggaggtgctggctcggtcagacctggcccagtaccagctggccctgctggacgtggacctggagactatgaccggcattgcactggggcggcggctcaagcagcagaacccggagctggtgctggtgtacatttcagcctatctggagtttgctcctgagggctacacggtccgtgcgttccggtatctcctcaagcgggatatggagcgaatgctgcccagctgcctggacgccgtgcttgccgagcacagccgggagtgccggacgctgcccatccggcaggggcggcgcgagacagaggtaccgctggatcagatctattatctggagagcgacctgcgcaagatcaatgtctatggtgagacgctccataagccgctctgctcctactacggcaaactgacggacctgcctgcctccctgcaggaagacggttttttgcgggtcgggcgcagctttgtggtcaacatgcggtatatccggcagatcagcaattataaagtgatgctccagaacggcgtggaactgggcgtcagccggaacggctatgcagccatccggggcgcttatctggagtggaaagggcagtttggcgatgagctatgagttgaagatgaagctgctgatgcacctggtctgcatcgcgcagtggggcgtgtttgccctcatccactgggagatgctgggcaaaggcaagtggaaacatccctttgcctgtacggcgctggcaatgtgcgggatgctggtaatttcgctctggatcgatttcggctttttcaatgccgcttccattgcgttcaacgtgctgtacctgctggtgacatcggcgttttttggcgggaccatccgccagaagctgatgtcctgcatggccaacggcgtggtctgcctgctgacggaaaatacagtcatatatctctatacctatctagaagcggttccgcctgcgcaggtgatccggcagccgctgggcgttctgctcatggcagcggcgatgctcatcgtgggtggcatcacggctcagatggcaaagcactggggccagaagcaggcgctggaaccgctgcagctggtggttgccatgttcttcccgggggtggtcgtggtgctcaacatgctgctgatggtctcgggcggccggttcgatgccacccagttcagcgtgctgtttacggtggggctcacggtggcggtgttggtgcacctgctctttgtccagatgctcaacgagcaggtggtgcagaaaaaggattctcagtaccgtgccacattggagcaggagcgggcggaagccctgatggaatcctacaccacccagcgccgcctgacccatgagtttgccaaccatctcgaagcactgagcctgatgctccagcagaacgacgtggccggagcccgcggctacctgacctccatcagcaagaccatccagatgaacagtgccatcctcaatacccacaaccccctgctggacgctctgctcagcaaaaagtacgaggaagcagcccggaaaggggtcatgatgtactttgacctctcagacctgaaagatatcccgctggatcggacgcatctggtcatcgtggtgtccaacctgctcaacaatgccattgaggcggcggcacaggcggccccgcccgaggtgcatgtccggatgaaaaagacggagggagagctggtgatctcggtgcgcaaccgggtcagacagaatgtggagatcccggaggggcagctgccccgttccaccaagcgtgaacccggccacggtatggggctggccaatgtctgcgcggtgctggaggcgcacaacgccgagtacaccctcagctgccgggacaactggttccgctttacctgtgcgttcccgaccaacggaatatgacatcctgagatgcagaatatgacaactcccgtgcattggcggcacaaatctgatatgataaaggcagtaaaggcgacctgagcgggaatggcgctttgattgcggccggatttttccggggcgtctgctgatgcataaggccctgcgatgcgtgtgtgcagggcctctggcctttgctttccgaaagtctgacgaggctcttggcggcagtctggggattgctgtacatagagaacttgaccgctgtgtggcttgcggcgggcggcaccgtgtgtgggagcggggtgctgcccggcggggctatgtggttttgccggtcaagagcttcgccgggctttttcttttttaccgttttgtcatatttcacggtttgtttcttgttttttcaccgggtgcatggtaaaattaagatattcttgaacaagaaaattcacaaaactttaaattttacggttaaaatacccggaaagaaagtgggcggagcggatgcgaaacaaacgggccggaaaggctgtggcagcgttggccatgggaattgtggtggccgcgggtctggtggctgtgggcgcaaaggaatccggccccagcctgacgtatcatgagctgctggtgctggccggggataagactcaggcggcctccgcgaagcaagacctggaagcagcgtctggcctgccggaagccatcggggaagaagcggtcgctgtcagcaagttaaaagaagagctggaagagatcgacgcggaaaacagcgcttccagtgaggccgtgccggaagagatgccggaatccgaggcggctgcttcggaagaaagtgcctcggcggagagcaccgccccggaggtttcctcggcctcggaagccgccgcgtcctccgtgccatccagtgcggcggaatcccatgccgtgtccgaagccgccagtgccccgtccagtacagcggccagcagtgcccccactgcggaggaactctgtgaccagaagattgcggagtatatccgccagatcgagcagctgcaggcccgcagtgaaaagcggctttacagtattatgctgtcggcctatagcgagtatatgtctcacccggtggaggagcggaaccttgtgacgaaagtgtctgcggtcctctccaagagcggggagctaacggccgcccagaaccagtgtgacgcggagtttgcgcagatcatggctgccatgcggaagaccctgcgagaaaatggccgggatgagaacattgcggatgaggcggaaaaaacctataagcagaagaaaaacgccctcatcaaggaactgaccagccaggcctacagcggtggtgacggcagcggccaatccggcagatggctggccgagcacgccgatggaaacatcgtggactgagatggaaataagaaaaacagcgccgctgcggctctgggagaatttcctgagaaatgcagcggcgctgttttgcagatgaaacactttcgtgtcctgaacttcacggaaatcaatttacaaacctgaagagatgtattataataaaatcgctgtgtttcgatataacacaaccaaaggaggaaaacttggtgctggttactctgattgagagcgtttacagttttttgtggggagatctgctcactctgccgctgggcggggtgacgctcaacctctcccttatggtcatcctgctgtttacggcgggtatctatttcacactgcgcacccggctgcttccgatgcggctgttccgggatatgctggatgctgtctgcgagaaaaagcaggggaagcagggcggcctttcctcgctccagacgctggtggtctccaccgctacccgggtgggtatgggcaacctcgttggcgtggtggcggcggtttccgtgggtggtgcaggggccgtgttctggatgtgggtcacggcgctgctgggggcgtccacttcctttgtggagtccacgctggcgcagaaatataaagagcctgatccgctttatggcggctggcgcggcggcccggcattttatctgcacaagctggcagagcgcaagcgggggaagctgctcaaaaaatctgttgtggcatcgttgtttgcagtgtccggcctcatctgctggtgcggcatcagccaggttatcagcaactcggtgagcgaggcgttttccaatgcgttttccattccgccgctggtgacgacccttgcacttaccgcgctggcggcagtcatcgtcctgcggaaagatgcaacggtcaagagcctggatgtgattgttcccatcatggcgggctgctatttcctcatgacgctctatgttgttttcaccaatctgccgcagctgcccggcgtgcttgcccgcattttctcggaggcatttggcctgcggcaggcggccgctggcggctttggagccgtggtcatgaatggcgtcaagcgaggccttttttccaatgaagcaggttccggttctgctccctgcgcggcggcggctgccgagtgtgatgacccggtcaagatgggattggtgcaggcgctgggcgttctgattgacaccatcgtgatctgcagctgtaccgcttttgtaatgctgctggctccggaaagcgtgaccgctgggctgcagggcatgaatctgttacaggcagcgatgcagtaccatctgggcggcttcggagtggtgttcattgccgtcacgctggcactgttcagcttctcaacgtttatcgggattttgttctatgcacgatgcaacgtggcttatctctttggcgaccattggggctggcagaccgcctataagctgctggcactggcgatgatgctggtgggcggtgtggcggcctatacggtcgtatgggatttgggcgatgtgggcatcggcctgatgaccattttcaatatgatcgctctttaccccttgtccggcgaagctttgaccgctctgcaggaatatgagaagaagaagcacctgaaataaagatcacggaaatagaagaaataaagacaccgcaccctgcttgtaagatgcaagccagggtgcggtgccttttttgctggaggaaaatgagagatagaggggcattcgatcggcttaattgctgaaaagtataagtttgtcagaagagaagcacaggaacttacggaatgagaaaccgctgatggttcagaaccgataagaaatcagacaattcgtaaagaaagctcaatctgatgcgatttttttagatagtaatataatgaggacaaggcgaaaactattgattgttgacgagacacgtgataaaataatatgagacttaaaatgtgaaataatgtcatttaataaaaatacaaaatatatttattgctgataggataaagcggaattttaaatcaattgaacgatacgtatgaatattgaatgcaaatttcgtcaacaaatattgtcagatttctgaattcggagacttaaaatgaaatgactgcacgggagaaaaggaaaaatgaatgcggtgagtttagagaataaaacaattttagtcacaggggagtgtgaaataatacgcggctgtcataatagggacaagggtacggcagaaaatgaaaggctccgcaacctgaagttcatattttcttacccgaagaatgaacgactgatctttttgggtggcagcaatgccatccagaaagaaatctcgaccatgagggtggggtgattgccagcggacaggtgtatgagcctatccgctctttgtgttggccgagatattgatgaagaaattgagtgggattgtgggaaagatttatgagtaagaaacttgcgattgcgatgttcggacagaagcgattatcgagagaaggcggagtagagatcgttgtcaaagagctctgcacccgaatggcacagaatggttgtgacgtgacctgctacaacagagcaggccatcatgtgagtggtgcagaatatgacgatgctggtaaaacggagtacgagggaatccgtcagaagtctgttccggccattgaacggcgcggatacgtcggcctttcccttagcgttctgttagcacagcataatcaagtgatggctgttgacattgtgcaagtgaaagtggatatgattaacaatcataaatctccaattcaagatgattatattgagaagtatcttgcagagaaagaactgaacttgaccgcaacgctggatgcaaaggctgcatactcggatgcggactttgttgtaatcgccgcacctaccaatgtctactcaacaaaatcagtcgcggtctgatggtctatggtggagtgtaatacacatgcgataataggcttttttgcataaatatacgccactgttttactcgaaaaaaccatgtattgtgcagtagtatgtcgagtctgaaaggtgcatttatacagcgtggtgttgagtaacggtaaaaaaatactattttcttgtcgtgtagacatcataatagatgaatatctcgttgtataagttgcaacaaggatgatggaaacgtttagaggcgcgttgtagaaaatgacggaactgctgaattccaataaagtgtcaaggtaaaagcaggtctactcaacaacttaacacttaggtgcggtggtagatggacacggcgtataaatatgcgccggggaaaggtatgaggaagcctacgggaaagggttgcgaggttaagaggttatgacaataaaggccggcacttaggagaatagatgcactgtccaacgaggtacgacgatatgatccagcacttcgatgatgagccgttcatagtgcgtttacctcaaagattcagttgaggaaaaacgatagcctgtccgtgacaggtctacacaaaagtttcagtggtggtcggaggatgaccactgtgagaaaaatgataaccacagttgtgtgagaaacatcgcgtcggtgctgtgaagtaacctcacgatgtagatgaacacactgtttgatatagattgatcggctcaatatgagccttttatataagtaagatgaatttcaggaggatttaaaattatgaaaaagaattacaaaatcgccgttgctggaactggttatgttggtttgtcgattgccacattgctctcccagcaccatcaagtgactgctgtagatatcattccggagaaggtggacatgatcaacaaccgtaagtccccaattcaggatgactatatcgaaaaatacttggcagaaaaggaattgaatttgaccgcaacgctggatgcaaaggcagcatatagtgatgcggattttgttgtgattgcggctcctactaactatgacagtaagacccagcactttgatacgtctgcggttgaagctgtaatcaagctggttatggaatataacccgaatgccattatggttatcaagtccacgattcctgtgggctatacggcaagtgtaagagaaaagttcaacagcaagaatatcattttcagtccggaattcctgcgtgaatctaaggctctttacgataacctctatccgagccgcatcattgtcggcaccgatttggctgacgaaagattggtagaagccgcacatgagtttgctggtctgctccaggaaggtgcgatcaaggagaacattgataccctgttcatgggctttactgaggccgaggcggtcaagctgttcgccaatacctatctggctctgcgcgttgcttacttcaatgagctggacacttacgcagaaagcaaagggctgaacacccagcagatcattgatggtgtctgccttgatccgcgtatcggtagccattacaacaatccgtccttcggctacggcgggtattgtctgcccaaggacaccaagcaactgctggcaaactatgccgatgtaccggaaaatctgattgaagcaattgtggaatccaaccgtacccgtaaggactttattgctgaccgcgttctgaagctggctggctactatggatatgatgcagagaatgagttcgatgaggacaaggagaaatctgtcacgattggtgtttatcgcttgactatgaaatccaactctgacaacttccgtcagagttctattcaaggcgttatgaagcgtgtaaaggcaaaaggagcaactgtcattatctatgagccgactttgaaagatggtgaaacattctttggctccgtagttgtcaatgacttagcgaagttcaaggagatgagcaacgctatcattgcaaaccgttatgacaagtgcctggacgatgtgaaagagaaagtttacacaagagatattttccagagagactaattgaaaaaagcaagtgagggaaaggaaaagttatgatgtacgattatttggtagttggctccggtctgtatggtgccatttttgcacatgaagcaaaagcgcatggaaaatctgttctggttgtggataagcgccccaacattgctggcaatatttacacagagaatattgagggtatcaatgtccataagtatggtgcgcatatcttccacaccaacaataaaaaagtctggaactatatcacccagtttgccgagttcaaccgctttacaaattctccggtcgctaattataagggtgaactgtattcgttgcctttcaatatgtataccttcaacaagatgtggggcgttgtgacaccggaggaagccgctgcaaaaattgaggagcagcgcaaggaaatcactggcgagccgaaaaatctggaggagcaggctatctctctcgtgggtcgtgacatctatgagaagctcatcaagggttacaccgagaagcagtggggtcgtgactgcaaggatctgccggccttcatcatcaagcgtctgcccgtgcgcttgacctttgacaacaactatttcaatgcgctgtatcagggcattcccattggcggctacaccaagatgattgccaacttgctggacggtatcgaggtgcgcctgaatactgactatctggaaaacaaggttgagctggatgcactggccgacaaggttgtctacaccggccccatcgacgcctactttgactataggttgggcacactggagtaccgctctgtccgctttgaaaatgagattctcgataagcccagtttccaaggcaatgctgcagtcaactacacagatcgtgaaacaccttggacgcgaatcatcgagcataagtggtttgagtttggcaaggatgagaacggcaatgatctccacaaaaccattatcagccgtgaatatagcagtgagtggaaaccgggggatgaaccgtattatccggtcaatgatgccaagaatagcttgctgtattctgagtacaagaagttggcagatgcagagggcaaagtgatttttggcggtcgcttgggtgaatataagtactatgacatggatcaggtcattgccgctgtattggataaatgtgcaagtgagttgggagaagcgtaatgaaaaagaaaagaatactgatggtctgtgaggcctttggtggaggtgtatttacatacgtttctcagctttgcaatgacatggtagatgagtttgatgtttaccttgcatattcgcttagaccacagacacctaaaaactatacggattttttagatcaaagagtacatttgattgaaatggaaaatgttggtgttaaaggattgaccaacttaaaaagtgatattgcagcgattaaagaattacgtcaaattgaaaaagatgtgaaaccagatgtaattcatctgcattcttctgttgcaggtggtttaggacgacttgcatacaagggtaaaaataacactgttgtttatacacctcatgggtatgcacatattcttatggggccgggtaaaaagagcaaaatctataaatttgctgagaaagtgctgggaaacaaggcacttactcttacttgctgtgagagtgaggatgaggaagcaaagaagttctctaggagaacggcttatgttgaaacaggagtcaatctcgcagacctttcggcatctcttgatggaattgagcctgtaaaaaatgataagtttacggtgtttacattgggaagagcttgcgttcagaaacagccacagctttttaacaaaattgcggaactggttccagaggcgcaatttatttggattggtaacggtgaacttgaaaatgaactgactgctccaaacatcgaagtgaccggatggaaaccccgtaaggaagctctggctatggccaaaggcgcagatgcgttcattttgtgtagccttggtgaagctattgcaatgagcttgattgagaatatgtatatcaaaaagttgattcttgttagtaacacgatgggtaataaaagcgttattaacgatggtgtcaacggatatgtatgcaatacggctgaagaatatgcggaacgcataaaggtagcaatgaaagacttcccttcaaaacttccagaacgtgcatatcaagatgtacttgaaatttataacacggatgtaatgaagaaaaaatacattgctttctataatgatgtaatcaatcgaaagtacgaaaggtaagtatatgacaccttttttaagtattataatacccatatataaaataaaggaaagctatctgcgagaatgctttgacagtctattagcgcaagatatgaaggatttccagattatagccgtagatgatggatcaccagatcaaagtggtgatatttgtgatgaatatgcgcagaaagatgagcgtgttatcgttattcatcaggaaaatgcaggcgtgtcagtcgcaagaaatgctggaataaaagcagcttcaacagaatggataacattcgttgatccagatgactgggttgaatcaaatcatgtgtcaacattgtataacgcacaaaaaaagtataatgatttcgatatattctggtttgattatgttcaggaatttgatggaaagtcaaatgttaaatatctaaaagacagtagcggagttttagacaaagaatgggtacataatctgaaaattgctccttttaatttcttatcagtcaacggaagagcgtatgaatacgaaacaaatacaatttggaataaaatgtatcgtgcgtccttgttgaaagataacgagatgtggtttgacccaaaggcgagaaaaggacaggatgtaatttttaatgccgagtgtttacagttgacggataaattttattatatccatagtgcattatatcattaccgatatttgcaagaatccgtaacaaatagattcaatgaaaaagctcagtattataacgaagtggcttttgaaaactatgaaagaataatcaaaaagttttcgttgccagaagagtattggaaagcatactatgcaagagtactaacgcggttatattcttgtatgagactattttatttccacccggaaaataaaatgagtcggaaacttgtaaacgagcaattaaatcagacgttagataaatacccatataatgttgcactgaaaaaagttgatagaacaacgctcacgcaaagccaaagaatttttgttttctttttgaaaaagagagcatatggcgttctaaggattttggttaatggaaggcagtcgctaaaaaggttgagcggtgcgcgtttgaaaaaatagtttttggaggaaactggatgcaggagaaaaagattctcattcaaatgagggatttgcgcgtagggagtgggattgcttcctgcattatgaaatattacgaatacacagtagaacaagggtacacgattgatttcctgctgaatagaaatatagactctccatttgtagatactgtaaaaaaacataatagcaagatttacctacttccgcatgacacaggaaaacccaatgtttcaaattatcgttacatcaaaacggtattgagtaaggggtatgatatactgcacgttaatatcagcgggttaaatgctgtaatgtccttgcacgctgcaaaaagtatgggaatgagtagacggatatatcatacccatgctccgagagaaacatcctctatgaaagcgagaatgagatcattactgtatgacacggcttgcgtagcagatgcaaatgagtatgtggcttgttcggaatccgcgggaaaatcagtgttcggaaataaaccatttgcgattataacaaatgcgatgaatacctcacaatatcactttgatcctgatgcaagaatgcaactccgaaagagtcttgaaatagaaaataaatttgtagttggtgtagtgggaagaatgtccgaaccgaaaaatccggcttttataataagcgtattttcggagatagcaaaattgaatcctgcggcaatgatgatttgggcaggtgatggtgaactaaagcctcttgttctcaataccataaagaagaacaaaattgaggataaagtcgtattgcttggctcacgaaatgatgtgaataaattgtattccgcaatggacgtattattgatgccatcgaaatttgaggggcttggcttggtgtttgttgaagcacaaatagcagggcttccatgttttagctcaacaaatgtgccgaaggacgtgaatataagtcctaatatgaattatatcagcttgaatgaatcgccaaaagtatgggcgcaacgtatatgcgaaactcctcatttgcaaagagatgaatttaaggattgtgcaaccaaggctgggtttgaaattgcaacaaagaaaaattcattggtggagttgtacgatggtgtgcttcaaacaaagtaatacatctggagaatagaatggaaaaagaattggtaagtgttgttattacaacatataaacgtcgtgtgtctcaaattaaagcagctattgatagtgtgttgaatcagtcccatgagaatttggaactgattatcgtggatgatagcccaaatgaatatgaatatcgagatgaagtaaaaaattactgcgaaaatatatcggattccagggttaaatatattcagcatgaaaaaaatatgggtgcttgtgcagctcgaaatacaggattctctaatagcaacggcaagtatatcgcttttcttgatgacgatgatgaatgggtgaaagataaaatcgaaaagcagttggatgtgtttagaaagtccaaaaataatatcggactggtttattgcaatgcgaccattcatgaaggagatggaagcaccagatgcgtatttgatcgacatacaccgtataggggatctgtatataagcagctctcgtgcgataattttataggctcctgttcatttcctctgctgaaaagcgaagcacttgagaaggttgggggatttgaccctaaaatggtagcgtcacaggattgggatacatggcttcgtataagcaaaatttatgatatagactataccgaggattcgctcattcattattatatccataagggagagcgcattactggaaacacgatgaagagattggacgcattgcaccgtctcgatgaaaagcagaaagatatattgacaaccgataaagatgtacttgtttcgcgtagagaatatgaactgagactgtacattcaatcgaaacaggtgggtgaagcgattaagtgctattttgaaatagtggcagcaaagccgtacagagttggaaaaaatataattcttctgaaggcatttggtagatttatagtaaaaagaaaagatggtacgttctaagatgatttgaggtataaaatgttgaagaattattattcgatttataaatatggaaattggctggttcaacatcacgttccggtgctcccggctgttttgaagcttgtaagcagaatcttttttcctgcatgtgatattccatttactgcaaaaatcggtaaaaatgcgtattttccgcatcgtgcaatcggtgtggttatccatgagaatgcggtaattggtgagaatgccagaattcaagcgaatgtcgttattggcggaaaaggacagagtggtgttcctactattggaaataacgttcagataggagctaatgcagtaatagtgggggggggtagagataggagacaatgcaatcgtaggagcaggagcagtggttctgaaagatgttccggcagcgtgtgtagcgtgtggagtacctgctacggttgtgaaaaagttagtagaagagaaatgaggattgcgtaaacgatggaaaaagttattgcggttatagttacttataatagaatcaaactgctgaaagaatgcttgaatgcagttttgtctcagacatataaagtacataagattgttttaattgataacgcaagcacggatggaaccgccgatttgtttataaaaggcggagagtatgacaaagacgtaatagattatcgcagaatggaaaccaaccttggcggtgcaggtgggttttacgagggaattaagatttgcagagatatggaatgtgattacgtctggattatggatgatgatacgattccgtatacagattgcttagaagagctgatgtctgccagatctaaaattgagggtaaaataggatatttagcaagctcgattattggaccagatagtgagccaatgaatgtgcctgccattgatatgcgtcctgcaaaaaatggatatccgcactggtataaatatctgtcggagggcatcgttcagatttcaagagcgacttttgtttccattttggtttcctatgatgcaatcaagaagtgcggtctcccatgcaaggactactttatatggggtgatgattcggaatacaccatgagaatatcaaagtattatgcgccagcctattttgtaggtgcaagtgtggctttgcacaagagatttaatgcaaagaaattagatattatgatggagaacgatacgaaacgattggaaatgtttcggaaatattatcgtaatacaaccatcaatgaggggctttttgtaagtcagaagcaaagaaaaaaattggttattcacaattttaaggttgcacttcagaaattgcttaaaggtgactttatcagagctaaagtgattttcctcggaaccttggattctattactcagagaaaaaagtttgaggaatatattgcgaatgaactgtctttgcaaaaataatgtagttgcaataagcaatgcaaaggaaggaaaattgaatggcgatatatctagttgtgtttggactgtctacgctttgcatttatttagctagaacaacaaagaataagagtatacagaaactcttgattataataggattgttgctaccggcgattcttgctggacttagagctgaaaacataggagtagatgtaaaaagctatgctatttcattttttgaaagagcaaaacaaagtgatagcataatcaattttttgaaaaaccaatcaattcttggaaatgcagatataggatttaatttaatagtatatttggttgccaaagtagcaaatgattatcactggagtttgtttgtctacgaattggtcgcagtaacggtagtgtatatagcttttggcagatgtgagaagctgtatggaacaccagtgtggcttgtgatgctgttgtattattttagtatgtacaatgtatcactgaatattatgagacaaacgattgcggtcagttttgttacattggcagttacatatttgtttgataaacaatataaaccgtattttgtccttatggtaatagcatttgccatgcattcatcggctatattgggatttggcatatttccgatgtatctgtttttacaagataaacctggcacaagtgaaaaaaagcagtttctcaaaggaatgtttgcagttgcagttgttggtgcgatatcagtaacaattaacaatcttgttcggcttctggttaatatgggaattttcagagaaaactatcttaattacttgagcggtggtcagttttcaactgtatcagaaggaagatcaatttcactgattgttgcgttaatacaggcaacatatctgttgatattggttgtgcattttagatatttaaatagaagaaaaatgcaagggctattttatatatttgcatctggtgtcgtctttatgtttacagtattaggtcctttgtttgcagaatatatttcgaggtcaagttatttctttattccattgcaaatgataggattaagtaatacatatacttgctattcggaaaaatctaaaaacatttgggcatggattttgattgctatattattcgcaacatggtacagagcttatgtgctgttgaattatgcagcaacagttccatatcaattttattgggactaatcctcaaaaggtgactctatgcgtaaacaaaaatcattgaaactgaattttataatgaatgcgctattaacaatgtcgtcattcatttttccactgataacatttccgtatgtttccagaattttgctgccggaaggaactggaaaggtttcatttgcaacatcattgatttcctatttttcgatgtttgcacagttgggtattcctacatacggcatccgtgcctgtgcaaaggttcgagatgataaagaagaattgaccagaacgacacaggaactggtgattatcaattttgtgatgagcgttatttcgtatactgcattagcggttgctttaatgcttgttccaagattgagagaagaaagagccttatatattatcgtaagccttacgattgcatttaatgtgattggtatggagtggatgtacaaggcgttggaacagtatacttatataacgattcgttccattatcttcaaatttgttgcacttattgtaatgtttgtttttgtgcatcaaaagtcggattacattttttatggtgcaattacgatacttgccgcttcgggttccaatatttttaattttatcaatgcgcacaagttcattgatatgcgaccggtaggaaaatatcattttaagcgacattttaagccgattgcagttttctttgcaatgtcctgtgctacgacaatttacacgcatttggatacggtcatgctcggctttatgacaacggatgcggatgttggttattataatgcagctgtaaaaattaaaacgattctcgtcagtatagtgacttcgcttggtgtagttcttcttccaagagcttcgtattatatcgagcataggatgattgatgagttttatcggatagctcacaaagcaatcaattttgtgtttctgattgcgttgccgatgatgctctattttatgatttttgcaaaagaaggcattttctttctgtccggcagtgcctatgaaaaatcaattcttccgatgcaggttattatgccaacgctcttgtttattgggctaaccaatgtcatgggcatccaaatgcttgtgccgcttggaaaagagaaaatcgtgctttattcagaaatcgccggagccgtggttgatttgatcgtgaattttgctttgattccaagatacgcttctgttggtgctgcgattggaacgcttgctgcggaaattgtagtgtgggttgtacagtttggcgcattaaagcaagacattatgccagcgtataagaaaattcaatatccacaaatgttattggcactggtgattggctgtgttgcttcggtatgggtgaaaatgctgggctggaatagtttctttgtgctgcttttgtcggcaattttgtttttcggaagctatggtctggttcttctcattgcgcatgagcctttagttctggaaatagtgacccaagtaattgataaggcgaagaaggtgtgcaataaataaaaagcttgacaataaaaggcagagggggacaatcatgacagacagacagacagacagacagacagacagacagacagacagacagacaga

SEQ ID NO: 277 - DNA, 28762 bp, unidentified
  source 1..28762: mol_type = unassigned DNA
ttaacatctctcagactttttattatttatattcagaagcactgcacctgcagactcaagttgtcgaatatcacttttagaaacagttgcatgattaaaatcagcttctgcaaaattaaccttttcccatttgtttttcctcaacattgccccggcaaaattagctttttcaaaacttccaacctgtacatgcaaacattccataaaagcatctgcaaaattcccttctttaaaactacattctgtaaatgtactttcaaccaccttgtagcctttcaagtttatatgatcaaaacaacaattttcacatatcactgtatcaaaatcaaatccacctgcttttgcgcagctccaatcaacatctttcataatcgtctcattaaatacgcaactttcgattatgcatccattgaaattaccatttataatggttgaaccataaaagaaacatgagctaagtgttgcatcagtaaaatctacgtttttcaatacggcagcagaaaaatccacaccgactaatgttgcaccggcaaatgatattccatctgtaaatctgcatgctttcaaaacagtatccttaaaaaaactacgctcaaacgatatcttttcaaaactactattttccaaatattctcgttctaaatacttcttctcaaaagaaatattggcaaatatacagttctgtccaattgaaacttttctattattataggatggaatggaaatacttctctgaaatatccagtcccagtcggataaaatatttgattttacaatattctccatatcaatcctgttttccgcaaatgtattcttccgatctttcatactaattccaagtgcatcctgccataatctaatcagcattaaagtattagacaccgtatatttcattttctggtaattattacccccataagagtacttccagataatatcttcacttaatacattagaaaaaatactggataagcgttttcctatctgcattttttcacgttcatgaacagatttttccccctcatgccttattttttcatgtaaaaaaacaaacgtctcttcccatgtacttcctgcgatttcaccatatgacatgatttcacacatagaatttaaaaatgcactcacactttcttctgaatcactcatcaaagacttatttattttattgtatatatattcgcaaagaaaatagtcacgtatattattatgataaaattctaacacaccatccgtaccattgcttttccaataagcacataaaacacaacatttccgaatccatttggcatttgatggttccaaatcaaactcacttacaatagaatccagttcttccgcccggatgtaataaccctctttctcagattttttaaagatttcaaacgcaatacgacttacaatttccagtaaaagaagtttgttttttctaattggatgtttaaaagaactattaaaattctcatcatactcagtctcaataatcgcattcgtaaatatctcatgatataacgcccatatattttcctgcagttctttgcgcatctcacaggcaacaagcagatataacgccagcggcgtatccgcaacgcctacagctctcttttcatccatatttaaaatataatcttttgttttcagtggaatcttttctccacatttttcatattttgtaatccattcctctcgcattttcctatcaaaatgctgcattcggactactttaaacttaaatgttgatttccttaacttttcatattcaatatactgaggacgtgttgtaacaattattttattcctcttgaagattcttctaatagactccaatatctcttccagactgcttcttccatatccgtccagcatactaagttcatctgcaccatccaaaatcagtacataattgtcaaatcttattttattctctatataatcattatcattagaaaatcctaaataatctcttatggattcttctactgtatattctttttcatctatttccaaatctcttaatctgatgcagattaaatttccctgcaaaaaaattccccggcctacttcatctgcctgttgataatgataacacaaataggaaataaagctgctcttaccacaagctgcatcaccttctataaataagatcctcgtctctttctcattccaaagaaaatttcccaatattgaaaccagtttccgagacggaacatccgaatcataaatctcaggctgcacaaaaaccctctccagagtaacttctgcatctttatataagtgtctgaacaatttttcacaaaaattatctgcatactctttaatgcatgcatctatattgttctttatcggaacttccggttcaaaaggcccaaacagacttcgattgttattcataaatgcatccaacgaacccatcttatctgcatctgctacttcagaaagcccccgcactttttcaataaatgttgaaaaatcataaatattctttttctgattaaatacgattccattcggacatacgtaaccaacgttttctcttcccatatattttgatgactcatctgccttaggctttaatatcacaaaatataatgtatatccagataaatctgattcttttctcattacagtttccagcgtcttcagtgtatgtatcaatttcgccgatttgtctgtggaagttacctggattataatcttgtctttttcactaatcagatcatatccagaattattaaaggaaatcgtattcgcattttttaaatcccatccatacaaaatccgacatatatcactaacaaacgattccgcttcgatattaatatcgtgcaaattacagattctattaaaattaatataatatgaaaatatactcattcccatattaaatctgtctattatccgttttctgtttatcatacatacgttcctttcggatatctggtaatcactatctcgcgaagtcaaacaaatacactctttgataacattactaaaacaaatgcaaaacttgttttaaatgctatagttagtaacttatttaacgggaacttcccagcaaactatacccatttatgttctatctctatagtactactcttcatctgttattgcactcatcttttgccgacatttttcggcatatttcgatgtttttatttattcttatttcatagggtctgccccaatgttattccatttttactttatcacatctcagccgactataagatcgttgcctgctgctcaccacggagaggtgtgtgatttatcaaaaagttttttgatttgtccgagcagcgtagggaactaccgctccctttgttttgtttataaattctttagaaatgtttatttcttcttcatggggtctgacccgagagtcgctacaggctatctttgaaactgtctttcagaagcgtgtatatatccgcaacgctattaatgttggtttctgagataatctgtcgaatttgttccttgcaactgccataaaaaatacaaactattttacactacctctcttattagacgcttacttttcattcacttatttttcaaaatataacatctattttattctacatattattcactttttttcgcagctatgtcttccattatctttatagtatcccccaaattccctatgtaattataacggcatagaatctacaagttccttaatggctgtcgccttaaacacaatacctaatcctaatacctcttgtgtcacaaaatttgtacctgtcggaactgcctgtaattcattattccgtatcatagtcattgcaacaattccaagaagttttagttttttctgacctacaataatttgaccatttttaaaattctcataggtcaaatctatgtaaaccggactcccactcgaacctggaaatacttgagcatcaatcacaaattcaggttttccattaaaatcatattcagggtgactagcaatcattcctgtccttataagcggtaaattattcgacatatcatatctaccatctggataaccaacaaaatacacattctcagcaacagacaattctggctcattaaattccgcaagcattgaataatcgacatatttataatataatttatcttccattgcaatgaaaatttccgtgcaatccataaccgcaatatcaacatctggattcggatggcctttaacaacttgatctacaccttggatattaaattcttgttttcgaccatgcttaggttttccattttctttatatgtaaacgaaatcgcaatattaggagttcccattaatacatgcttattggaaactaagtataatttgtagttattttctcctacaggacgagataatagaaatccggttcctatagatgttatgtttccttcattatttttgcactctattcttatagtcgtatataatagttgctcaaaaacggtattcataatttattttcccccatatgctttatccacaaacatatttataatttatttccattaaaatcaattttatcggcatcagtcagttgacctgtataataatattctattagtattgtatgtttttttaattaacttcataatatattcccaatttgtatccgcatacattttctggaaattttttaattgtctcatcgagcaatcttttatcctgctttatggggtctgaccccgagagtttttacaaaattttatgtaattattagagcgtgtctaaaaaaggctttctgcaagatgtacgttacaatttgtgggatattttgcccggatgagggcgccgtagcgagctacggcaactgaattcgggtgaaatatcccacaaagtggggcgtgcagattgcgggaatgattttttcagacacgctctagagcagcgccagtagcctatgctctcgttttcgtttatagtttctttagaaaaaaatcatttcttcttcatggggtctgaccccgagagtttactacttttgcgatgcctgccgctactgcttctctgcagagaagctacctgaccgttgtcctgactgtggagcggtagcacacgataataaaaaggcagtacggccggcgagtaaaacggaaatcgaggaattgctcaaaatgcagaaagaagataaggaggacacacaaaatgaaagcacataaatattgctcactcggcgcacttgcctgcatggcaggatgcttctacacaggctgcaagaaactgatgcaggctcacaagtattttgcctacggagcattaggctgcatgggtatggcaatctactccggtcacaaaatgatcgcaccgaagaagaaaaaagctgaaaagcctgaaaagtaagaacacacgccctcgccgtaacaagcgagggcttttttgaacttcaggagttcattttatttccgtcataaactatacgcttccatcatgagccgaattccgactttcagaccttcctcaaaagcgatcttttcccatgcacagcacaccgttccctgccggtccatgatcttctcccagagcggaatcttatctccgacatagtcctctacgagcctatccataccatctaaccctcgcagccactcttccagttccttttccttggcctttgctgctttcccagcaactgtgtttttctctactgggttgttctctgtataatgctcgtagatcagatccagcaggttctccactggcgggtaatactccggctctgttttcttcaaatactcctccagcatttccttcaatttttctataatgctaccatccttcccaactgagattcgtatcctcagttacggcacatattaccgcacacttctgtacatagcaacctattttttgcggtttatcggacggcccatcttctcctttaccttgtcaggcacgtcgattagcccgaactgatagaacatcccataaatataagtcacacctcggatatcccccagcgctttgggacgatcaaccacttcttcttttatattccccagtgccaaaactatagaactccatgccaaactcttgctcttctcccgcctgtcaatccacagttctttcgtgtactcaccgttcttgcctttttttatttcataagagaatggcaacccggagtaggttttgaattttatcccggcataggccagaaccacgccccagaagttttcttctgtcggatcaaccctccaccgcttcatcactctgtatctacgctgccgctctgctccaacactgatcttttctttctctgtacttggaaagtacacaccttttttataaggcaggtacgaggtgactgaggctttggaaagattcaagatatttgcggttgataggattgcttctttatagttctgtgtttcacggtattcttcaaaagtattttttactttttccgccacttccgattcatacacaccagccgtgatgagcagcttccgtaccttgatgggatttaatcccagttcttcgccgatggcctgcaaggacatctcagaattataaagtgccacagcagcatccatctgctctttcagattcttcccggcatcgtactccggcttcagcttcttccgaccaccaccgggctttctggttttcttcattttactcatgcagctccagcggcagtccatccgggtcgtggaagaaagtcatcttcttgccggtgtaatcatccacgcggattggctcgcattcaattcctacctccgccagctccctcaccgtctgctctacgctgtctacatagaaagcaaggtgacgcaaaccacaggcttccgggcggttcacacgcttcggtgggttttcctcagcgaaaatctccagctctgtgtattcattcacacgaagatccagcttccagtcctttcgctccggacggtagttttctctgatgacagagaatcctaacttgttcacatagaaatcttttgcggcttcgtagtcggatacgatgattgcaatatgatgtatttttgataaattcattttttctcacgctccatttcttttaattatgtttttcttttattttcattataaactatacggcagccttcaaacaataccgtgtgaactcctggagttcagtttgtccacacggcacttatttttcttgggttcttgttatttcagcttttccagaatctcatccgcacttatcccgcttgccagcaacttcttcagcacagcctctgcttcggtctttttagcttcttcagcggccttagcatctgcctttgccttcttcgcttccaaggatgccacttctttttcggctttcttcagagcagtcttcttctctttcaggtcagccttcaaagtgtcaatgttggcggtgatggatgcgatctcagtattcagagatgcaatagtttcctgcttctccgcaatctgagttgcgtagtctttgataactttcggtttattcttgctacctttggttctgggcatcgtgataacctctttccttttatagttgttcaagtatagcactgtgtgggatagtcaatttagttttcgtcatcaagttgacatacttctccttctatgcaagcaaacatttctcccattggagtatagtgatatgtccagttgtcaagctcaaacaattccgattttttgttcggcacatctggctcattagaggttgcaatcttgcttaagtatttcatctcaagcaaatataaagcgcctaatgcataaagaacattcttttgattagccatctgtatattcgcataacgactatgtttaatcttacaaaatccattccaaaatgtaagtgactgtgctggatttgccgcactccaaccctgatatggcagaaattccatatctcgctctggaatcagaattttctgattcacaatatcagaataatcacttaacacaaaggtacaataatcattcatgttttttcgatcttcagctgcaaacccacaatacaccttaaaaaaattatctaattctgctccaattgattgcaacaaaagagcatactcattagaaaaggttcctgcgttttgccaatccaactcaatgtaattcaatgtgtttttaaacttttcttctaacacaagatagtaacgccaataatgttgtaagaattcttttcgagtcatacatcacacagccttacatttttaattttttctcacatcttcgccaatcataagatcgttgcctgctgctcaccacggagaggtatgtgatattattagagcagcgtagggagcatccgctcccagtatatcacaatttcagccagttttacagacgctttcttaccttcatcaccgcacagtacatcaatccgcctagcactccgccgactgtgttatagaagatgtctgatagttggaacgttcctagccgcatcaataactgcaacatctcaatgcttatcgaaaagataaatgctatcttcccgctataccacagtatcttcttccaactgtttcctatcttctctccgaacgtccacatcactactgctgaaaacggcaccatcataattacgttctcgatgcactcggtggtcagcttctgttcgccattcacagtctcccagatgccccaaccacccatgacatcggacaaaggatttagccatagattacggtttagtaacgtcctaaacaaaatcattgatgtcacaaaggtcagtaagaacaacttccgaaagaacacgctctctttgaacttctgataccatgtcactatggcattcttccagcctttgcctgctgtggaaggttcataagcatatagatagaagaacatggcaaagaatgaaagcagaagtgaaaatccaaacggctcatacagagcagtcaggatgtttgtgaggattttggctaatacctttattgcttccattacagatcactgaacagatcagccttgtacacgcctttttctaacattttcttgaagctatcctttactgctgcgacatcctcatgataggtcatgccgtaccaggtatcattggttttcaaaacctttacagacatctttccctgctccagcagctcaccgatgaagattgggatcagatactcggctttctgaggattgctcggtacttctttctcgaaaaactccttgaaaccattttccagcacatccaaaaaatcaggagtcaagccccacatattcatggataccagagaattcacatcaacaaccacaccgtctgcctctgctccatctgcagtctttacgatgttcttggtttccacaacctcagtcaagtttccattctcatccatcttgcagataccacgagtcacaccaccattatcagacagggtgttcttcagcacaaagcctgccatacaggacttgccgccattcaccagatactcatgaacagctttaaagccttccttgccatagtaatcgtctgcgttaatgacgatgaacggagttttaattacgtccttcgctgcaagcacggcctgaccggttccccagggtttcgtgcgaccttccggtaaagttcccggaatatcgttgatatcctggaaagcgtagtctacagttacgtcatgagaagagcaaatggaggcaatgcgatcaccaataacctctttaaactccttctcgatatccttacggatgataaatactacatggttgaagccagcatcaatcgcatcatggattgagtagtccataatgatatgtccagcatcatccactggctccaactgcttaattcctgttccgaaacggctgccgataccggctgccatgataagtaatgttgtgttcatattctcttttctctctgttaaaattctttttcgcatctatccaatacagctgcaattacctgatccatgtcataatacttatactctcctaggcgaccgccgaaaatcacattattttctgcatctgccaacttcttgtattcagaataaagtaaaccattcttagcatcattaaccggataatatggctcatctcccggcttccactcactgctgtactcacggctaatgatagtcttcggcagatcattgccgttctcatccttaccgaactcaaaccatttgtgctcaatgatacgggtccacggagtttctcggtcggtatagttcactgcggcattgccctggaaatttggcttatccaaagtttccgtctcaaatctaacagaacggtattccagcgtacccagcttataatcaaagtatgcatcaatcggtccagtgtatacaaccttatcagccaatgcatccagctccgctttgttttccagatagtctgtgctcaaacgaacttcaatttcatccagcagattggcaatcatcttggtatagccgccaacaggaatgccctgataaagtgcattgaagtagttgttatcaaaagtcagccgaaccggaagacgcttgataataaaggacggcaactccttgcagtcacgtccccactgcttctctgtatagcccttgatgagtttctcgtagatatcgcgaccgacaagagagatggcctgctcttcaagattctgtggctcactagtaatctctttgcgctgttcttcaatctttgcggcagcctcctccggcgttacaactccccacatcttgttaaaggtgtacatgttgaacggaagggagaataattctcctttataattagccaccggtgagttggtgaaacgattaaactctgcaaactgcgtgatgtaattccaaacctttttgttattagtatggaaaatgtgagcaccatatttatgaacattgataccctcaatattcttggtataaatatttcctgcaatattcgggcgcttgtctactaccaaaacagacttgccatgtgctttagcttcatgtgcaaaaatcgccccatacagaccagaacctactactaaataatcatatttcatactctttcctcccattcagtcagttattattttttcttgataattcgtccaagcaactgattttctatttctatgacaagagattcctttgcaattgttaaaatcaaaaaatatactccaaaaaatacaattgcagaagcacataaagtcataaaacttccccactgcattctctttattaaaaccgcgagaacccctccagctaaaacagaactgccaattgcaacataatgaacctgtctatatgcttccttaataattcctctaagcgcaacgtactgaacaataaaaacagcgatttctgctgccaaggttccaatcgctgcacctgtagatgccattttaggaatcagaagcgcatttaagataatatccacaatcattccagcaatttccgaataaagaactactttttcttttccaagcggcactaacatttgtattcccattatgtttgtcagaccaataaaaagtaaagttggcattataacttgcatcggaataattgcaccggcataagcatcgcccgataagaagaaaacgccctcctttgcaaaaagcataaaataaatcatcatcggtgttgcaatcaaaaacacgaaattgattgccttttttgtaatacggtaaaattcatccatcatactatgttcgacatagtatgatgctctcggcagcaaaaccacacctaaagatgtaacgatactcacgagaatcgtttttatctttactgccgcattataatatccaacatctgcgtctgtacgaataaatccaagcattacagtatccagatgcgtatatattgttgtggcacaggacattgcaaagaaaatcacaatcgcttttaagtgtttcttaaaattatagtgaccaacaggcttaatgttgatataacggtgtatatgaaagaagttaaaaatatttgaggcagatgatgccaaaatggaaattccaccataaatgacataatcgctttgttcatgcaccatgagaaacatcgcaacaattgcaataaacttaaaaataatcgagcgaaccgtaatataagtatattgttcaagtgctttatacagccattccattcctatggcattaaaaaagattgtcaggccaacaatcaagaacaggtctttatcctgccgaaatcttgggacatagtatattgctgcaaaataaaccacatatgccagtgcgctcatcataaggttgataatgaacagctcttgaaccattttcgagagttcttcccgattatcacgcacctttgcacatgcccgaatgccgtatgttggaattcccaactgtgcaaagagtgtaaagtaagatacgatcgaagttgcaaatgatacttttccggtaccaatgggcaatagaatgcgtgaaacatacggaaatgtaatcagtggaaaaacgaactgcgacatcgtaagaatcgcgttcattacaaaatttaatttaagagacttttgttttcccatttcctttctgttattctccttttctatgtgcatattcaatcttcggattaaagaaaaatccagagatcgttcctttgcacgtcacccaaactctttttgctttgtgatccggtgcttttctgagaatattcttgattcgcccaccaatcacacgcagccgacggcctacttttccattttttcgcgcgatgtacattccgtttcttgcttgataaaagaagcgttctattcttgtctcatctgccgaaaccacatctgcgcctttattggatggtgctttatgtacaataacactatcgaaatccaaataagctggagccaattttctcaatcttgccgtatactcctgatcatctccataaataaagaactcagaaatcggcaatcctgctgtctcagcatattttaaattgataaagcagccaacaaaagaacaagtatcaatcaacaacagcttgttttttctaattctgtccaaatccagccctaatctggagttgtactggaaatccggaacattcatatcaaacagtttcccatccgtccaatacactaatgaggccagataggaaaactcaccatctaatgcctgtcccttatccacaaggctttgcaatgcctctttttccgggatagagtcatcatccatgatccacgcatataaatagccgagctctatggcttttctcaagccaaaagcaaatccacctgcaccaccaaggttctttccggtattataatatttgattctcttgtcctgaatctctgcaaccatttcctttgtgccatcattgctgttgttgtcaacaatcaggatatcatggtccttaaatgtctgattcaagagtgcttctatgttttcttttaataatttctttcgattatacgttactattacttctgcatacttattcatattctttctcatttcggttcctttcaaaaaattcttttttgctctttatcattccaacgcaggcaacagaaattataataaaaggattatatctaaaagataataattgcgggtctgttatgcaatgaataaggaacaaagaacatcccatgcatagataaatattctttgtcacaacactatagcattgtaccgccatcattgccaaacataaaaccacaagcattatcacaccgtatcttactaacacctgcaaatatgaagaatcaacataaaaataatccataccggatacttttgtgccatcggttcctgtcagccatgtaatgggttgaccaaacaatgaaacaccatacgtttctaaagcaatttttccaaaatacggcctatttgaaaaagctgcatttatagccacgaatgcaggctcattatagtgagcaatataaaagtactgtgctactatcgttgcaattgctgaaaagaatggaaatatttctaatattctccttggaaaatctctgtcaaacagaaactgttttatcttttcaatattcaacaagtaatataggataatgcttgcattaataacaacaaatacagctaatgtatccgtcatcttataaaaccaaacatttatgacttcaatcaaaatccaacttctaaactttattttgttttttctactggcaatatacgccaaaactgtgtgcaagaagagattcggaccaaatgtggcaaaataaaatcccaagtactctcgtcctgcactagtttgagacgggagaattcctataagccatgcaaaaatcactatcgcaattgcaatgccagcactaatacaataagtcttcagaacagattccggctctgcctttgaacaatacaatatgaatataacaatatagatcaagtcactgtctgcctgattgaagaatatatttcctattatcaggagagcgattagtccccataaaagcaaattacgaatgctgaactttgagtggcgtaaaagtaccaataccggaacagttgccgcaacaatctttaatccttgacacagcgttgcaagaattgcagatgacgaaagaagatatgactgcccaatgacaaacaggaaaatacagattccataacaaatatttgtaatatctttaactttaatctttgcgccttttgtagtaatcattcatccaatccatcgtcaagtgctgattgaccctgcaccccacaaaatcctttctttgaattattttcatattagctaattttttctggaagtaccagccaatctccaatttttttatcccactcttttgtttcaaacggcacaatcgcgccgaaatgataaaatgtcatttctccaaagtaaactcgaccatttgcttcataaaaatccactcgaacatgtgggaatccttcactgagttttttggcaagctcaatcattttttcaaaatgttctggttttttgatggcggatacagagttcggatagtgctgtgcaatgttcatgtggttaaactgcatatcataaaagtcaaactttgtgtttttgacgcctctttccgttgccacaaacatcagtttcggctctccattgaaacagaagaatttataatcacggagttctccggtttcctgatcttccatatatttttcagcaataattctcggcttgactcctttatatgaccattccctcgtccaaagataataattgtttgccagagacttttcgattttttccttagcctttttcaaatcaagtttggatttatccttgcagacaaccaatccacctgaatcatgtgtgcatttcagcacaaactgatttggaagctcattgaagttgatatcctcaaatttatcccatacaccaagcgtcgggataacatactgttcaccaattttatctgcaatatattttttcacttcgtatttgtcaaccaatgtaataagatccggccttctataatacagtttgagccagttcaatttttcgttgaatgtcttcggattcttaaaatcaataaactttccaaactctgcataataaaaaatttgcagatatggcttgtccggcatccaattaagcagtctgtggttcacaaaatagccagccacacgccgcaaaccatgttttttttcacccatcttactcacactccttcacataatccaaaagtatctgcatttttttcaaggctttttcagacgaatattcctccaataaacatcgccttgcttgttttccgcattctgccatctgtccaggatttgcaatggcccattccattttatcctttaaatcttcaacattgttcgtctgaaacagaagaccagtttcaaacgatttgatcaagcttctaggacctgttttacaatcgctggatatacatggaacaccgaaagccattgcttccattagtgcatttggcattccctcgtaatcagatgtcatcacaaacatatccgctacttgtagctgtttctcgatgctctggcttctcccccgtagaaaaacatgattagcaagtccatattcatcgactaaaccttcaaggtatttcttttgatttccctcaccgaaaatatccagtgtaatttcagattttatctttgtaatatcaaccatagctttcagaagaagtggataatttttttgttcgtgaagtctgcctactgcaattattttagaaattttcctactataaatttctttatgattatcaataaactttgatgaaagaggattgggaacaacaaagcacttttttcttaaatcggctgagaaatattccgattgctcttcattttgaatcagaatggcacaagatttcttagccaggtaatcgcgaaaatttcttaacaatcttttttctggcattgtccacggattatttctgatggtcaaaacaaacggaattttcattcctgtgattgcaagccaagacacatacagaacggttccaacaaacggaataattacatcaggatgaatttctttgataatttttctcatatcaaagattctcattccttttgttattgtactatcctttcgttgtggcatttcatgtatctgtaccttttctgaaatagaatagtctctctctgacgttttatatgtaataatatgaacgtcttcgccaacatcagccaataagccagataaaaccgaaacaactctttcggctccacctcctgtaaggctcctaattgtaaataatattttcattctatctcctgttccgcttttttgattcgctttacatatttcttaagagttcaacccactggtttataattgcggctgtattgaaacgatccaaatccttttttgtttttgacgcaaattgctttagcaacgtttcatttttcatcagttttatcgcacaatctgcgaactgctgaacatttccttcttctactaggtatccattgataccattatcaatcgtttcttcaggtccttccttacagcgaaagctaacagccgggagtcctgttgccattgcttccatcagaactagcacaaacccctcataacgcgaagataaaaaaaacaaggacgattccatatattctttatgaatatcatcagaaaatccttttagttctatattcctgagccccagtccgtcaatctgcccctgaagttctttttgaagcggtccttgtccataaatatctaatttccagtccgggacttccttttctatcaaggcccaagcctcaaccagcatatcaaagcccttttgtctacttaaacgtccaactgcaatcgcacgtttttgtgtcaacggcgtactttcgcttgtatcaactgcaattgggttataaatatatgtcacatttttgcaatgtttgtattgtgtcaagtagttatttaaatcattcttgcctaataccacaacgcaatcagcatgttctgccgccagttttctggcatatttgaccagtttattagggcttatataatagttaaaatgttcccatgcgatacatttacatattttctttatctgcaaaggaatcaaataaagatataacgctacatcgactgctatcatgacgtcaatctgttcttcctttacatatttaatcaattgcttttcgacatagatttttctcaaagctgaattctcgcatttttctccatttagtgagtaaagtttaatgtttttatctatttcaaatttgcaagagtttccatgctgacaactgataatcctcacatcaaaatttttttttactaactcatttgcaatgacagatgtaactctctcagtacctccgccgctttcaaaattcattattaagaaacctacttttttattcatctcaggcagttctccatcggttcaaataataactttccatatattttgcagttgcgtccatatcaaatcctgcatcaatcacatactgctgcatattggtatgtgctttcagattctgtgccatttcaagtgctgtattcgcccacttttcttccccatcactcaacagcagtttccggtagattggtgtaatatccgtttccggcggcaatccttcagagcagacaataggaacacccgccgcctgcgcttcgattgcaacaatacccagaccttcaaacaaagatggaaaaacaaacacatccatcgcttgataaattctgttcatatcctttctatttccaagaaaatgcacacaatccgaaagtcctttttctgccactttgctttttactttctcttctaatggcccggtgccaacaagaatcaattcagcgttaggctttttcttcttgatttctgcaaaaacatcaatcaggaaatcatggtttttctgaggatgcaggcgaccaacatggccgacaacaaatttatcctttaaccccagttctttcctgattgcatttctggtatccacatccgcaataaagttctgcgaatcaatcgcatttttcagcacttgaaacggcttgtctttgaacagatattttccagcttcctcagagcaggcgaaaagatctgttgcgtttttggtaaacattcgttgcatgaacagcttcggtaaatattttatatcgtgtactgtctcattattatgtgaatgagcaattctgacggggatacctgctttctttgcagctttcaggcagaaatatccaatcgtgtaggcgtgacaatgaacaattttatattcgtgatgctgagcaaagaaaactgccaaatctttttgaaatttaggaaggttcaaatcctcccggaaagacagtttgtaaacatgtccacccattttttcaatttcatcatcgtaaaactgtttttccttataaacgaccaaaaaatcaaactgtactttcgttctgtcaattttccggtatatattcatcaacaaagcctgcgtaccgccagcttccattcgctgcaagatatgcaaaactcttataggctctcccatgtattcttcctccacaaaatctcaaagagatttaattttttgaatcagtttattcggcagcacagatttcaaccgtgcttttggctgaaagccaacctttatattccctataaagcctggttcatcgatgctcttatagaaagtatctctagtcacaggcctgttgctcggctgtaccaaattatgctgcttcaccattccctcttccagtgtcgcttcttccacttctgcaagagggcgcatcatttcaaagagtttttggcctttctcggtattgacaaatacactggatacgccttttggagaattaaaatcagggtggctcttggcaattccccagaaatcacctacggtcaaatctcccactcggctcgcatttgcataggcacactgataacagctctctctgtaacagtcgccatccataaaatgttttccatagcgatcaagagagagtgtctttgtctttgtctttgtctttgtctttagcagatattgtgttccccagccccgtttatctttggagcggaaattgaagtaaatcactttacctgccgtttgcttgttctggtattccaaatactttttaaaaaacttcggagacggaacgccgtgacaaatcaggtcaaccgtatataaattttcaggattgccacccaagaaagcatacaagccagcaatttggcagggtgttcctgtaaaaagcaccgtttttccctcaacgagtcgctgtttggcctttgcatagctgtctttcggatcggactgaacatacttagaagattggagtttttctctttcagcatcggtcgttacttcaatgtgacttactgccagctgttcatcataagcagcaccatagaccacaccacccgtttgcaaaacagtctttgccgcgctgtctgccgcgccaccggatgcggaacgcataatgtccgtatcatttttgttgcgccacgcccagactttttgggggttgttccgatgaaattctgtattctccaccggacatttttttaggcacaatttgcactcgatacagcttttttcatcaacggacggataccaaaagccctcgttactttccaccatagagatgcagtgtttcgggcagctttgcgcacagcttttgcatcccacacatttctcttttatccttgctacgttctccatcttatccctctaaattacttcgcagatactccttcgccacttctcgatgtgctttcaacagctcatcaacttttgcgtaatcaatcgtttcttcattgatattttctgcatcttcaactttcgctgtcattctgtctgccaaatccaaccgttccagcaaatcactcaacttttcttcattaccatagctgttacctacactcttgcgaattaatgttgtaaacggccgatgtgtgatcaccgagaagatgctgccgtggaaggtatcggtaataacttcttctgcatttctgaaataggccagaacctcaaagggtgagcagtctacgaatcggtctgcacatttttggataccaccaattgcatataccttcaaattcttcttctttgcataagcagcaatccagtctgcttcttcattggaaatacggcctgcatacgcatacagaatcagatacttctcgtcaacccgcagctgtggaattttatcgcagcagttcatgtaatcataggtcagaaccgggtccaagttataaaccggctttttttctgtaagctgctccacaatggctccagaattcgcatctcgtacagaaatcgcatcaaatttcttcaacaatactccaacttcatcagcctttttatacttttccagcttttctaatgttgtattaccaaaagatgccgcataagtgagaagtctcttcgcatgattatcttttccaaacaattccagcgaataacccacattggaatttttctgaatgcagttgaaaacctcatcgctgccaatcacaaggcaatccaatgtcgggttatagttcatttcatccgtaattcctaaaagtggcatatacttttttgaaaaagtctgcttataacgaatgaacgacaacttatgcgcaaatggagcctgatattgaaaagtttccagacctttttcgaccttacggacaaacttgtttttgctgtcagcattttccgtaattacgggtgcgcctacatggtagtctacaaactctactttgcagctcaattcttcaatcagctgctttaatgcatatgcctgcaaaaacgatccgtagtttgcaatacgctgcatcgacatgattccaacttttctcatccattcatcctcaatacaattcgtttaccagtttctcaagtccttcattaaacttggcattattactactcataccatgtcccatgccggcaacaatctgatcatagttcgttatgatatctcccagtgtattaatgtcctccaccggaataatcgttcccattctctgcgccacattccttgcgaactcaacttgatggtcgttcacatgctcattgaactgatgctgacgcggcacaacaataggagtcttacctatctgtagtggcatgataaaacttgccgggccaccgtgagtgattacaatacgggcgtcggccacatttttcaccatctgctgatatggaatcaacttactccactgacagtatttcggctcgtatgtactaaatccagtctggataattacatcttcgtttataatgccgtctttctttaattcatctattttctgaatcagccgattaaatggctgctcatgtgttcctaccgtcacaaaaatcattttctcgtcccctacttagaatatgcttccaaggttaaccgcctttggataaacctttttctgctcttcccactgcacaacaaacttgtccacaatggggtaaaccatctttcctgtcattgtcggtttatcaattcgatcaaaaacctcgatgtagaccaactttgcgcccatcattttaccaatataaaaaaacgggaccgcaactgctgcaccgcaggaaataatcaagtctggcttttccttatgtaacacattccatgcaatcttggtattcttaataagagcctttagactccggtttgtcggataataacaaggatacattttttcaccttcgagcaggcttcttgcatcctccttatcaaacgtaacccaaaaatgatccttgtttttccaaaatggctttaacatataaaggtgggttaaatgaccgccagatgaacccaccaagcatacctttatattttctttatttttcatctgactctctcctctaattttccttgatcttgcttaatctctctggaaaatatctctggtatagactttctctttcacatcatccaagcacttgtcatagcggttcgcaatgatggcctgactctgcttcttgaactcatccaggtcattaactactttactaccaaagaaagtatccccgtctttcagggtcggctcatagatgatgacagttgcgccttttgccttgatacgcttcatgacaccttgaatggaactctgacggaagttgtcgctgttactcttcatagtcagacgataaacgcctacaacaacttctttctccttgctctcatcccagctgtcatttgcttcataagcaccagcaatctccaaaacacggtcggcaatgaagtctttacgagttctgttgctctcaacaatagcctcgatcaggttttccggtacatcggcgtagttcgctagcagctgcttggtgtctttcggcagacagtatccaccgtagccaaaggacgggttgttataatgagtaccaatacgaggatccaggcaaacaccgttgatgatctgctgagtgttcagccctttcatctcagcataggtatccagttcgttgaagtagctgacacgcagtgccaggtaggtgttggcgaacagcttaactgcctctgcctcagtaaagcccatgaacagagtgtcaatgttctccttaattgcaccttcctgcaggagttctgcaaaagtgtgtgcagccttcaccagacgggcattgtcaacatcagtaccgacgatgatacgagaaggataaaggttgtcatacagagctttgctttctcttaagaattccgggctaaagatgatattgtcacagtggaacttttcacgaacatttgcagtatatccaactggaatggtgctcttgataaccatgatagcttccggattgtactcgataaccagcttgattacagcttcgactgcactggtgtcaaaaaagttcttcttgctatcgtagttggtaggtgcagcaattacgacaaaatctgcatcactgtatgcttcctttgcatccagagttgcggtcaaatccaactctttttctgccagatacttttcaatatattcgtcctgaatcggagatttcttgttgttgatcatatcgaccttagcctgcacaatatcgactgcaactacctgatgatgctggctcagaagcactcccagcgaaagtccgacgtatcccgtgccggccacagcgattttataatttttcatagttctgttctccctcactaatttttcatttgataaaacagcaaacaagcccacggcggatcactcaatggcaatccaccgtaggctcgattcgttctccttaattttttacttgctgctcattttgtgggtcaaaacagagctgcaccaaagcctcccacttataacctctggatttcagcttctccgcagcctgtcagcaaataaatacttttgttgaacgagtcgagccgtcaaaaccatttagttatcgtagtttttcttggttgaccctattatatctccagccccagtgccagccacagcaatctttaaatccttaaactctctcattttttaaccctctaattttctttatcatagaatttacactgcatgatttatataatccttcgttgcatcatccgcatgttttacaatgcatggattcccaaaaacaatagaatggtccggaatatcgcagttaatataggtatttggagctataagtacatcattgccaattacaacattaccaacaattgttgcatttactccaatccaaacattatttccaatacaaggtgttccttttctttttccacgattttcctgaccaatcgtaactcccttgtgaatattaacattgttaccaattattgctttcgcattaattgtgatcccatatggatgtccaacataaaacccatagccaatttcattatcaacagaaaactcaattccctttttcttggtagaaatctcaaacaatttcttgtatattttatgaagaaagggatttttactcatttgtgctttacgataaaactgcaaaaaacgtggtacccccccccagaatatctctgcttatcaagttccaagatattttccataaattctaaccctctatttttccttatttataaaactcagcgtaccactcagcgaagttacgcagaccagttctcaaacttgtgctcggcttatatccaaagtcccgctccaacgcactggtatctgcataggtcacaggcacatcacccggctgcatcggaacaagttccttgtgtgcttcaaagtcataatcttccggcagcacctttgcacgaaccagctcctcactcagaatctgcacgaagtccagcagattctccgggttctgattgccaatgttgtaaactgcatacggcggaatcggcaaaccatcctcgccattcttcttgtcaggtgctttcttcatcacacggacaacaccctcaacgatgtcatccacataagtaaaatcacgcttgcagttgccatagttgaagattttgatagtttcgcccttcaccagcttgttggtgaatccgaagtaggccatgtccggacgacctgcaggaccatacacggtgaagaagcgcagaccagtggacgggatgttatagagcttagagtaggcgtgtgccatcaactcattagacttcttggttgctgcgtacagtgaaacaggattatctaccttgtcatccgtgctgtacggaaccttcttgttggaaccgtagacggaggaagaagaagcatacaccaggtgctctagactctcgcaatgacggcaggcttcgaggatattaaagaagccgaccaagttagattccacataagcatccgggttggtgatggagtagcgcacaccagcctgtgctgcaaggttgacgaccacagacggcttgtacttctcgaacagctccgtgatcagctccttgtcggcgatgttgcctttgacaaaagtaaatgtgggatacttagccagctcgttcaggcggaactctttgagtgccacgtcgtagtaagcattcatgttgtcgatgccgatgaccgtagcagaaggagcctcctgataaattcgtttcacaaggttggagcctatgaaaccggccgcacctgtgactaaaattgttttattatctaaagtaactgtgctcatatgtattcctccatttttgttaacttcctaatctatgtacacatctgctcttcacagatagtatttctctctaatttccactgtgtgataaccacactcggctaagtgttttcttatactgtcgtatccaattaccccagcaatcatatttcccttgttttctactccataaaacatccgttgagtacactcgtttctatttctctatagccgaagtgttgatttgtacggtcgaaccccgtataccctgcaatgacgtttttctaagtgttggattgttgaatcgaaccctgtcggcgcatgagttttgttaaaactgtatatatcatccagtccaattctcaccattcattgttcgttatgaacaaatcattcacttcaaccactcaaaacatgtaattatcatcaccatacatgctctactcaacagctgttttatgaagtaggaatcatctgtttttctctatttttcatgactcaacaaaccgttatgatgtaggtgtcattagcgggtcagatagtgtactcaacagcagtttcagacgttaatgataaactcatggatttttgttgttttctcctgttttccgccatttctatgattcttctgaaaaagatgtgccaattttgtgccgcatgggccaaaagttcagcgttttgtataagcatctagcatttacagctcatatagttgtaaaatatagccaatttcagcaactcaattagtgtacaaaacaggttctttttggcaatgctacgtcaatacggtttgttgagtagacatttatcggcgccgcaatcatatttcccttgttttttacttcataaaacatccgttgaatcctcctataccgacccttccctcttcagaaccgtcatcactgtcttaaacaaaatctttatatccaatccaaaattccagttactgatatattctgtatccagtcgcacgacttcttcaaaatctgtgatatcacttcgaccgcttacctgccacataccggtaattcctggtttgatggcgattctggctctatgatgcagttcatatttcagcaattcgtcctgtaatatcggtctggtacctaccaggctcatggttccatttaatacattccagaactgtgggaattcatcgagggatgtttttctgataaattctcctattcctgtttttctgcttccgtccggaaggattttgtttccaatcacacgtgggtcaaagtcaagcttgaacatacgcccgtcgctcattttattctgtgccataagttctgctttgcgttcttcggcatccatgtacatgcttcgaaatttatacatcttaaatggttttccattctgaccaattcgtgtctgtgaaaagaagatcggacctggcgaactgatgtaaatagccggtgctacaaaaataaaaataattcctgtaaggaaacatcctacaagtcctcccagaatatccagtgctcttttggcaaatgcctgtctgtctgtagcatagttcatagtggttgtcagaaccgtatatccgcctactgtttctacaaactgtttctgtcccgaagtacttttcacttttgccagatttacatgaactaccattcccatctccagcaattcctgtatcagttcatccggatatgagtaagattcatctatatttacaaagacttcgtctacccattgctggcagatataggatgctgcattctccagttctgctactacaggaattcctgaaatcttcctgccgactgcatttttatcaacgattatcagaccattgatgttatatcgattgtaattgtgttcttttacattctggattacttttgctgcctgatcatagttcgttacaatgtataacgaatgctctccaccttctgccattttatggatcagatgtttcttccatgctattcttgtgccataggaaaggaatacataaaatactcccattagatacagaacagttcttgagaaactatgtccatcactgacagtgaacagatacagaccacttgccagttccagcagaatcatctgccggataacagaatgtaattcctgataatgcccccttctcagaactcctttgtaagattcaaaaataatgattagaaataaatccgccaatattacgaagcttatcatattgcggtaaattcccgctctgaacagactctgaacagaaccatttcgaatcagatgtgcaattagtaaggacaagaataagcatattaaatctataagtatgaaatccttgtgtttataccatcctcttgactttttcctatacatacgctcttcctcatcttctccttcttttttctttttttaaagcatcttcaatctggtctgatatcttcggacaaaccaaataagccgcagtcttttatgttccggcttttttattctttatttatatttgtcatatttctctttctcatcttcatatttgtgcatcacccttttgaaataatttccagacctgtgcgcagttcctgctgtccatctcccgccgggagtaccagccacgcaaggcgtttatgtctgtcaattctgcggataaatttctctcttccctgaaggggtccctgtgtcacatgggttgtgccgtctttgatgtagcctgttgacattgagattgtctttgtatccggctgcatcagtgctttcaggaattcttcctgttccggacgtaagggtgttatgccggacatgacagcttctgccagagagtctgagcagtgctgtctgctcagtgtggttttcagttcctctttgtccctgcattctatgaagaagcagtttgtaaacagcggtttctgctctacatgccaggaaccctggtatcttttcatgcagtcataggtggggatgaaaatttttttcttatcctgttctgacaattgggtgtcgtaaaatttcttaaagtctgcgataatatttcccgtacattcgtacacgaataacatggcggaggtcacctcattttccaactgaagccacagagtatcacactaagtggtacaaaaccccgaaactcctgtagttatcaggagcttcggggtttttgaccagattatatgactgttaacaggcaggagagcttttgcatgttttgctgctttagttccatggagggatgcacataccggttcagggtaatatttacagtagcgtgtccaagaatttcactcaggctcttgacatcaaagccgagttcaatacagcgtgtggcaaatgtatgtctcagtgcatggaaattcacaggaaccaggccacactgtttctgtacataatggaaatatttctgcatagtgcggggttcaatatatttttcatttacagcggcaagaacatatccctgacggttgggaaattccttttgaatgagctggatcagactgtctggaattggaattgtacggatagaacatttgcttttgggcgatgtaaccataatacgggttttctgtgcggtggtgga

SEQ ID NO: 278 - DNA, 9695 bp, unidentified
  source 1..9695: mol_type = unassigned DNA
ttggcagaggactttgtgatcgagatgctccatattaccaaggaattccctggcattaaggcaaacgatgatatcaccctgcagctgcgtaaaggtgaggtacacgccctgcttggcgagaacggtgcaggcaagagcacgctgatgagcgtgttgttcggcctgtatcagccggaacaaggcaagatcctcaaaaatggcaaggaggtcgccatccggaaccccaacgacgcgaacgcgctgggcatcggcatggtgcaccagcacttcaagctggtggagtgcttcagcgtgctggacaacatcatcctgggcgtggagcccgacaagatgggctttttgcagaaagccgaggcccgcaaaaaggtcatggccctgagcgagaagtatggcctgcgggtggacccggacgccctcatcagcgacatttccgttgggatgcagcagcgcgtggagatcttgaaaatgctctaccgcgacaatgagatcctgatcttcgacgagcccacggctgttttgacgccgcaggagatcgacgagctcatggagatcatgcgcgggttcaagaaagagggcaaatccatcctcttcatcacccacaagctcaacgagatcatggcggtggcagaccgctgcaccgtcctgcgcaagggcaagtatatgggcactgtggagatcaaggacaccaccaaggaagagctttcccgcatgatggtgggccgtgatgtccagcttcaggtcgagaaaaagcctgccaaccccggcaaggcggtgctggacgtgaagaacgtgaccatgcacaacagccagagcaagaaagactccgtcaagaacgtttcgttccaggtgcacggcggcgagatcgtctgcctggcgggcattgagggcaacggccaaaccgagttcatctacggcctgaccggcctggaaaaactgtccagcggcaccattacgctggacggcaaggacattacccgtgaatccatccgccagcgctccaaggacggcatgagccatatccccgaagaccgccacaagcacggtctggtgctggattacagcctggagaacaacatggtgctccagcgttactggcagccggagttccagaaaggcggctttatccaaaaagagaaagtgcgggagtactccgataaactgatcgcccaatacgacgtccgcagcggccagggcagctccaccatcgtgcgcagcatgtccggcggcaaccagcagaaagccatcatcgcccgcgagatcgacaaagaccccaagctgctggtggcggtgcagcccacccgcggcctggatgtcggtgccattgaatacatccaccggcagatcgtggccgagcgcgataagggcaaggccgtgttgctggtcagcctggagctggacgaagtgatgaacctctccgaccgcatccttgtcatgtacgagggtgagatcgtaggcgaatttgatcccaagaccaccactgtccaggagctgggcctgtatatggctggtgcccgcaagcaggggaaaggggagtaaacaggaatgaacaagaaaaaactttcccacagcgggctgcagagctctgtcacgagcgtcatggcggctctgctgtgcatcgtcattggtatggcagtcggtttcctcgtgctgctggccatcaatccggcccacgcgtggggcgacggctttgtccgcatcatcaagggcggcttccatgatgccccctatggcgtcggcaaggagctggccaacgcggcgcctctggtcatgaccggcctttccgtcggcttcgcctttaagacgggcctgttcaacatcggcgcttccggccagtacacgctgggtgcctttggtgccctgtactgcgccatcatgctcaagctgccctggttcgtctgcctgctggtggctaccatcctgggcggcatctggggtgcgatcccgggcttcttcaaggcctacttcaacatcaacgaggtcatcacctccatcatgttcaactggatcggcctttacctcgtcaatgagctcatctaccagaacggcaccggccccatgtacgatgtgcgcaacacccgtaccctgaacctgggcaagagcgcggagctgtccaaggcattgatcccggactttggcctgaacaagatgttccagaccaacagcaccaccattgccatcttcctggcggcagccgtggcggtcctgatctgggtcatcctgaacaagaccacctttggctatgagctcaaggcggtcggcctgaacaagagcgcggcccgctacgccggtatcaacgagaagaagaacatcatcctctccatggccattgcaggtgcgctggccggtttcggcgcaggcctgtattacctctccaacgtgtcccagtggaacccgctgaactccaccagcctcccggccatgggcttcaacggcatttccgttgccctgctggcaagttccaaccccatcggtaccattttctctgccctgttcatctcccacatctcggtcggcggctcgttcctttccaccaagtattaccccaccgagatctcggacctcatcagcggcatcatcatctatctgtgcgcattctccatgctgttccgcggcaagatccacgccctgctgttcaagaatgcggataagaccaacgtgaacgcagagcctgcccctgcagaaaacaaaaaggagggcaagtgatatgctgcttctgatcaaatataccctgctgtatggcatcgtgctgatgctggtcgctctgggcggcatgttcagtgagcactccggcatcatcaacatcgcgctggaaggcatcatggtcatcggcggtgtggcgggtgtcctcaccctgaccatgctcccggcgagcctgcccttctggcttatcgtggtcatcgccgtggtggtggccgcgctggcaggcgtgatctacagcctgctgctggcctttgcttccatcaacctgaaagcggaccagaccatcggcggcacggccctgaacctgctggctaccgccgtggccgtcgtcattgccaaaaacttcagcgacagcggcagcgccaagctgaactactccaacaagccgttcctgttcagcatcggcaagctggaactgagcatctttgtgccgctgggcatcatcctgctcatcatcagctatatcgtgctgtataagacccgcttcggcctgcgtctgcgtgcctgcggcgagcatcctcaggcagcggattccgtgggcatcaacgtgtacaagatgcgctatgcaggtgtcatgatctccggtgcactgggtgccatcggcggcctggcctatatcgtgcccccggtgcagacctggaactttgaggtcggtgtggcgggtgcaggcttcctggccatggccgttatgatcttcggccagtggaagccgttcaacatctgtggggctgccatgttctttgccgtgttcaagagtctggcaaacattgcggactccacgttcctggcacagttccactggtccagcaacatctacaacatgatgccgttcatcgcctcgatgatcattctggcatttacctccaagaacagcatggcccccaaggccgagggcatcccttacgacaagggttcccgctgagaggagcgtgacctacgatgcgtatttatgatctgatcgcaaagaagcgggatggcggtacccacacccgggaagagctggaagccatcgtcaacggctttgtcagcggcgaggtagccgattaccagatggcggcctggatgatggccgtttacctgcgtggcatgaccgatgaagaaacggctgagctgaccgatgtgatggcccacagcggcgtcatggtcgatctttcgcccatccccggcatcaaggtggacaagcactccaccggcggcgtgggcgataagaccaccttggtcattgcgcccatcgtggcggcctgcggcgtcaagattgccaaaatgagcggccgtggtctgggccacaccggcggcaccattgataagatggagagcgtgcccggcacccggacagccctgacccaggaggaattctttgcgcaggtgaacaagatcggcctctcggtcatcggtcagagcgagggcatcgccgtggcggataaaaagatgtacgccctgcgggacgtgaccgccactgtcagctgcatccccctcatcgcctccagcatcatgtccaaaaagctggcctccggctcggacgccatcctgctggatgtcaccaccggcacgggcgcgttcatgaagaccgtggaccagagcattgaactggccaagctgatggtctccattggcacccaccatggccgccatgtggccgccatgatcaccgatatggacaccccgctgggccataacatcggcaacagcctggaagtgatggagagcatggacgtgctcaagggcaagggcccggccgacctgaccgaggtctgcctccagctagccaccaatatgctggtgctggctgataagggcaccccggcggaatgccgcgccatggctgaggctgtcatcgcggacggctccgcctttgaaaagtgcaagcagatgttcgcggcccagggcggcgacacccgcgtgctggacgattacagcctgtttgcaaagcccgccgccagctatgagctgctggccgagcaggacggctatatcatccagaacgatgccgagaagatcggttctgccagcgtgctgctgggcgcgggccgccagaagaaaggcgacccgctggactttgccgccggcatcgtcctgcacaaaaagcgcggcgctaccgtccacaagggcgagagcctggccacgttctatggcgcgccggacaagtttgccgccgccgcggaagaataccgcagcggcctggtctacggcgacacccaacccgaggaagccccgctggtctacgccctcgtcaccaaggacggcgtggagcggtacgaccagtaagcggtttcgttcaagatgcgagcaggagcctgagatgtttcgggctcctgctttttgcgtgctgggtgcggaaattttaaatctgcctaagattcccctccaaaacccctgcatttgttggagaatgcccgcatttggtggaactttctgcccggatgtgctatacttagatttgatatccccgggcaagggcagagcacccgcctgtgaggaaagaaaggattttggtatgaagatcgttttggtaggcggcggcaaggtcggtgcggcattggcacgccagctgagtgaggaaggccataacgtgacggtggtggacaccaataaggcccgtgtggagcacattggcgagagctacgacgtcatgagcattctgggcaatggttcttccatcaccaccctgtcggaagcgggcgtggaggacgcggacgtctttattgcggtcacgggctcggacgagctgaacctgctgtgctgtatgttcgccaaaaaggcgggccactgccacgccattgcccgtgtgcgcaacccgtcttacagccatgagctggactttatcaaaaagcagatcggcatttcggccatcatcaacccggaaatggcagcggccaaggaaatttcccacctgctccgcttcccgggggccagcaagatcgatacctttgcgggcggccgtgtccgcctcattaaatttgcgctgaccgaacagcaggggctggacggcgtagccatccatgagatccccacccggctcaagagcgacattctggtctgcgccgtggagcggaacggcggggtcatcatccccaacggtaactttgtgctccagaacggcgaccaggtcacgttccttgccacgcaggaaaaggcccacgagttcttccagcgcatccacctgccggtgcgcccggtgcgcaacgccctcatcgtgggcggcggcgccatcgcgtactacctgagccaggagctgctggaaaatcatgtccgtgtccggatcgtggagcgggacccggcccgctgcaatgagctggcagagtccctgcccggggctcagatcctgaacgaggatggttctaatcgcgagttcctcctctccgaggggctggaatccaccgaggcgttcgtggcgctgaccaacatcgacgaggaaaacgttttgctgaccctgtttgccaaaaagcattcccagggcaagctggtcaccaagatcaaccggctggagtttgacgacattctggccgggctggatctgggcagcatcgtctaccccaagtacatgacctgcgattacatcgtgcagtatgtccgtgccctgcagaacgaggcgggcaacaacatcaagaccctctaccgcattctggacgaccgcgtggaagcactggaatttaccgtccatgaggagagcaaggccacgggcgtgcccctgagccagctccacctcaagaaaaacctgctgctctgctgcattacccgcggcaatgagatccgcatcccccgcggcggcgaccagatccaggtgggcgacaatgtcatcgttgtcacgctggagcacggcctgcacgacctgcgagacattgtggaagactgacggaggacatgacgtatgaattatgcgatcgtgttccggctgctgagctatattctgttttgtgaggcggcgctgctgctgctgcccgccatcgccagcctgtgctatggggagtggagcgtgctgggcgtctttgtgcttacggcggcactctgcctggtgctggggttgctgctgcggcggatcaagccttccagcaaggtgttctacatgcgggaaggttttgccaccacggccctgagctgggtcgtcatcagtatcatgggggccatcccctttgtgctcacgggctgcatccccaacccggtggatgccatgtttgaaacggtgtccggttttaccaccacgggtgccagcatcctgcccgccgtggaggggctgcccaagggagttctgttctggcgcagcttcacccactggatcggcggcatgggtgttctggtcttcctgctctcgctgctgcccctgaccggcggctcccatgtcaacctgatgaaagccgagagccccggcccccaggtggataagctggtgccaaaagtacagtccacggccaaaattctgtacggaatctattttgcactgaccgtgctggaatttctcttcctgctggtggggcggatgccggtgtttgacgccatgctgacggcgttcggcacggcgggcaccggcggcttcggattcaagaacgacagtttcggcagtctttcgccctatattcagtgggtcgtgaccatcttcatgatcctgtttggcgtcaacttcaacacctatttcctgctgctgctgcgccggttccggcgggcagccgccagcgaagaagtgcgcggctacttcctcatcattctggtggcaatcggcatcatcaccctcaatatccatgggatgtacgacagcctgggtgtggcgctccgccatgcggcgttccaggtgggctccatcatcaccaccaccggcttttccagctgtgattttgacctctggcccaccctctccaaggaagtgctggtcatgctgatgttcgtgggtgcctgcgcgggcagcacgggcggcggcatcaaggtgagccgcatcctcatcctgggcaaaacgctgggcaaagagctcaagcaggcccttcatccccaggtggtggccccggcccggatggacggcaagctcatcaaccatgagaccatccgcgccaccaatgttttccttgcggcttacatctttatttttgccgcgtcgctgttcttgatcagtctggatggctttgatatggtgaccaactttaccgccattgccgccaccctgaacaacatcggccccggcctcaatcaggtaggccccatgatgaactttggcggcttctccaaccctgccaagctcgtcatgatctttgacatgctggccggccgcctggaaatcttccccatgctggtgctcttcctgccggacacctggcggaaattctgaaaatcttaccgcaaacaaaaaaggcttcccgttttatcagcggggagccttttctgatgttggaaatcggttatagctctactttttcctgcgcgcgatattgcagcgcttccagcagggaatcctcgtccagcagctgcttgcctgccaggtcggccacggtgcgggctacccggaggatgcggtcatgggcgcgggcggagaggcccagcgtctcatacgaggcgcggaggagccgctcggcagcgggggtcatccggcagacgcggcgtacttgcccggcggtgagccgggcgttgcagtgcacgccctcaaagccgggggcagcgtaccgctttgcctgaacctgtcgggcaaacagtacctgcctgcgcaggtcggcgctgctctcagcggaggcggtgccgtgcagctcgtcaaaggcaacgggatccatctccacgcagaggtcgatgcgatccagcagcggaccggacacccggctgcggtattgccgcaccgcgctcagggagcaggtgcatggccgggtggggtggccgtagtaaccgcacttgcaggggttcatagcggcgaccagctgaaaatggctggggtatgtggcactgcccgcggcccggctgacggtaatctgaccgtcttccagcggctgacggagcacttcgaggctttcgcgggagaactccggcagctcatccaggaacagcacgccgcagttggccagactgcactcgccgggacggaactgtgctccgccgccggccagcgagacagcgctggccgagtgatgcgggctgcggaacggcctggccgtgacaaggccccggcccttgggcatctgcccggcgatggaatagattttggtcgtctccacggcttcctcccgggtgagcggaggaaggatcccgggcaggcgcttggccagcatggatttgccggtgcccggagccccgatgaggagcacattgtgtccgccggcagctgccagcaccatggcccggcgggccagcggctgacccatcacgtccgcaaaatccggggcggcgttccaggcgtcggtggggtcaaagggagcgcagcggatgggggagatgggccggatgccccgcagggcgtccaccacttccagcgccgtgtgggcagggtagaccagcatggtgtctccgcaggcctcggctgcttcggccgcgttctccgcagggacatacagggcctgcaccccgctggcggcagctgtcagggccatgggcagcacgccggacaccgggcggaggctgccatccagtgccagctcccccagaaaggcggcctcctccggcgggggctcgatctgcccggccgaggagaggacggccagcagcaggggcaggtcgtacacggggccggtcttgcggacatcggccggggccaggttgaccgtgatgcggcggtccggccacttgaaccccaggttgcgggcggcggcgtggacacggtcgccgctttcccgcacggcggaatcgggcaggccgacaatggagagggcgggcatcccacccgagacgtcggcttccactgcgacagcaaagccgttgagaccgttgagaccaaagcttctgataacggaatacatggcgctccttttgcccggagggcggtcaagagagagaatggttaagaaatggtaaagaatggtattggacgtcaa

SEQ ID NO: 279 - DNA, 11781 bp, unidentified
  source 1..11781: mol_type = unassigned DNA
ttatttttccgccgctttgcggagcaggtccacggtgtgttcaaaagccacaccgcggacatcaatgatccgggagttttccgcgattgctccggtgatttcctcccggaattttccggactgttcttccgtgagcaggtttttggaactcagggagcgcgtgatgagctggaggacgtaccctgtttccacgaaagactggcgtcccacggcttttttcatggcttccatgaattccggggcgtgttcgggcggcaggccggccacggccttttcataagcgcggatgaaggaatccaccggggctttggaaacttccgtcttagtgaggtcaaagctggattgataagcgagagctccttcttccgccagttgaagggcgttttttccgaatttgttgacggcagtcatatccgctcctttttccagtagcagggccgccacctggaaattaccgcgcatggctgccagcatgaggggcgtaaagccgttgccctcccggttgttgatgtctgctttcctttcaatcagcatgtcggacaggcggtccagcccgctccaggaagcccagtgcagcgcggtccacccgtccttgtcctttcggtcgatttccacgcgggggtcttccagaagccggtccagatagggggcccgagtggcttccagcttcagcgtggtctcaatgttgttgtagttggcgtagcatacccacatgacaggagttctgccatggggatccgtcatgttgacaaaagcctttccttctgccgcagccagttcttccccttccttcagggtttgttcgaattccttcatccccttgactcgggcttccttctcctcctgttcggaggaagcgttgacttctttggcctccgctttcttcattacggtgataaggtccagggccgggttgggatctccagagaaagatttggagaccaacaggctgagaccgccgaggagggagctgaaagctaccaggatgagggaatccacaatgatgttgcgcgtgtgctggttcatggtctcgtaagttcaggagttggcttccgtaaattcttccgccgtcagggcgggatccgtttccgcttcaatggcgctgatgggtggcgatgccgcgtcttcctcgggatggtccgaggtgatggtcctgcgggtcatgataatggcgatggggctgattacggccatggccaggtaaatggtccacatgaattccggggagtcccagaagccgatgtgcccggtatccatcttggcgcagatgccgtcatagcagaggtaggcgacgagcaggccgccgatgatgccattgatgggtttggcgatgaacatgggaagcgccgccagagacatgtaggaggccactttgtctttcggagctacccgcgccacatattcggagaagcggggggagaagagcagttccccgaatgcgaataccaggatctgcgccacaatggctaccagatacgcctgagagcgcgtttcaatgccgggcaccaggtagtaccattcaatgggaatggccatgaaaacgagagagaaagcggagatggacatgcccgcaatcatgagaccaacggtagagaagcggcccagcaccggaatgagcaggatgaggccggagacgatgatggccgggttgacggcattgatggagcctatggcaaagtcgtcatatagcgtacgcacgtagtatttgggcatcaccaggaattgcagcgtgaaaacgatgcgcacgcccatggtcagcacaaggaagaggataagtttgcggaaggcggattccttccacacctccatgaagagctggagaggtctgcggaggggggcattgatgttcgcctcccgttcgctgggttccgcgtagttgtcttcattaataaaacgggtggtgatgcagcccagcagcaccatcagcgttccgaagttgataatccagtatccgccgtccacggcgccgaagtgcttgcggaaaaattcaatcaggaacacgttcgcgatgacggcggaaatgttcatcagcaggtagtagatattgaagcccgtggaacgcgctttcagcggagtgaagcgccggatggaagtttggatgacgggggacatgaacgccgtgccgaaggacataatcagaatgcccgccatgacggccagccttccggagtccacggttgggctgaggtccggaccgaagcccatgataaggcgcccggcaatgaggatgatgaagccgatcaggtaagtgcgccgtatgccgatgatgtcgcagatggaacccaccgcgaagacgaaggcggagatgaaaagggtgtacaggcctacccagagggcggcgtccgcatcgttgaagctgcaatagtctgtcaggtagaggacgaataccgtaatcatggaaaaataggccattccgtcgaagaactggacgacgttggtaagccagaaatccttggatacggttttcaggatcttgaattccgaaaaatatttgaggatggggtttgcggactcattcatggagagatggaaacggtaaggaaaagttgacgacgatgaaagagtgggttacacgcatccccgtttcaagatttttttctcccaaaggccggtttgaccggaaaaatgcgcttcatcgccggggaaaccgctatctgggcagaatgcgtcggaagcctgccacgtggcaccatgacaacgctttcaggcattgttccacagccatggcgtccgaaggcagcacgggccacagcccggcttcctttagccctgatttggctatttccgccgctttccattcgcggaactgggagggaagggcggagaaagtgaaaaaggcccagcaggccagcccgatggccagcgcgatctggaatttcaacagtccggccgtcagcattcccagcaggataagagctgtgaaaaaaggaatcatcgtggcgcgcgcagaggcggttttgcgggcttttgccgcctccgggtcttcccggaccaggctgctcatggcccaggtatgggctacgcaggccagccggcctgcggtcaccttgccttcccatgccggaggaaggctgatgaatccgttttcatccactccgggaaaccgggctttctccagtttccgctggcgtttttccgcaccgtccaggcggtggattaatcccgccgggccggggaagccgggcagttcccgggattcgtaggtgcgcaggggaatgatgcctttggtgaaacgcagcgcggcaatgacaccgagcacgaccacggaaaggaaaatcactactgcgaatagcatagacggttttttctcatatgcccgtgtgtccgtcaatctctccggctggcatgaagccgtccttcccggccagcagccgggtacgggtgcggacatcgttttttccttcttttcccgcccggaacgcttggaaaacggagggatggagcttatgtcggaatgatctgcagttccgggtgttcctctgggcgggcacaacattccggcatggattttcttcatgccggaggcgctggatttgggttgattttccggcgtttttcatgtaatggctgaccgcaatggtccatattcgggaatgcatgaggaggtggctgccgtttgtcataatggcggcctccctgggtgtgtctctcgcccaggatgtagcgagccccgatgccgcggatctggatttggacctggtcaaactgaaaagtggccccaagggcagacagagggaagccatgaggaaggtcctcctgcttgtgcatctgaagcaaaaggaaacgtggctggcggaatccacgggggatgaggccgtgcatctggcggcggagatttccttccgccggtatttggcttcagtggatatgggcggatgcccaggggaattcaagtgcgctttcctgcggtatgcaaagctcctgaattcctttgaagaaaaagatttgaatagtgtcgcggattttcctgcggtccctctgcaggctgccggaagagagctgttccgggtgctgcttacttaccgtctggagccggagcatctgctggaggaaatgaaagcgctggtggatgaggaaattgagggtaaggaggagctgtctgcaggacagatgatggatattgtccggggaatgcgggaagccctgcaatccggaagccgcccctttccggcggaaaggcctccggaagacagggtttccgggatgtagcggcttttcatggatggcatgccggtaccgtgaggaatcttgtggaggcatgtcggaaagtccgctccggctattccggaaggaaaatggattaagacggctgtacgtcacggtttccaggcggcggccatcagagtctggaaatggggcgggtccggctccctgtccacaatatccgtgtggatgttccggaatcccgcttccttcagcatgctttccagggcggcgggcgtgaagcccagccagcggtccgcgtaaagttcacgggcttcctcctgtccatgctggagcagatccagcaccaccaggcaaccgccggatttcaggatatcccacgcagcttccagcgctctggacggcttttgcgcatggtgcagggcctggctgagcagggccagatccaccgtgccgggtttaatgggcggcgcttcgatatcgcccaggcggtattccagattgtccagcccgtgtttgcgcgccagctcctgccccagctccaccatgctgggggagttgtctacggcgatcacctgtttggcgctgggggagatgagctgggaaacgaaaccttccccggctcccaggtccgccactacgtcatagttcagaatgcggagcagagcaccggccagcgctttccaggaacggccgggcgcgtagttcttgcccagacggcacactacttcgtcaaaataggcctgggtgcggtttttgcgcttgtccaggataacctgaagggcttttttgtccgtttccgcctccggcaattcctcgcaggctttcagggctacattgtgcagatcacctgccagggaaagagtgtaaaagacgtttttgccggaacgggcgtcctccaccaccccttcctgccggagctgggccagctgggtggaaatgcggctttgccccatgccgagaatttcctgaagttccgcgacgctcagggattcttcattcagaacgttgatgatgcgcaggcgggtgggatctgccaggagtttgagcgtttttagggttgacttcatagcggaataatatatcaacacatcgagatttatcgatatgagtagaaacacccctcacatctttacgtcggaatccgttggagaaggccatccggacaaggtggccgactacatttccgactctattttagacgcctgcctggctcaagacaaaactagccgcgttgcatgtgaaacgttggtgaagagcaatatggtcatcattgccggagagctgacgaccaaagcggtgatcgatccggaaaaaatcgcccgccaggccattcgggagatcgggtactgcaacaggcaggacgacgacgttttccatgcggataccgtctttttcacgaatttgctcacggaacagtccccggatattgcccagggagtggacgcccgggaggcggagggcaagggccatgcggagcagggcgccggagaccagggcattatgttcggcttcgcaacgaatgagacgccggagctgcttccggcccccatcgtgtttgcgcataaactgctcattgagctggccaggaggcgcaagcgcgggcatgtggactggctgcgcccggactgcaagtcccaggtggctgtggcctatgacgaagacgggcgtcccgcgcatattgaaaacgtagttatttccacccagcacacggaagacgtggaccatgacacgatttactcatattgcgtcaaactcattaaaaatgtgcttcctgcggagcttctggatgagaggacggaatatttcatcaaccccaccgggaaattcgtcgtgggcggtccccacggggattccggcctgacgggccgcaaaattattgtggacacatacggcggcatggggcgccacggcggcggagccttttccgggaaagacccgtccaaggtggaccgttccgccgcgtatatgtgccgctgggttgccaagcacattgtggctgccggactggcggacaaatgtgaattgcaggtggcttacgccattggctaccccgctccggtttccatccgggtggatacgttcggtaccgggaaagtggaggaaatatccattgaaaatgcgctggaaaacatcttttccttcaagcccgcggatatggtgaaacagctgaatctgcttcagcctatttaccggaagacgacgcactacgggcatttcactaatccggaactgccctgggaacagctggacgaaacgcgcctggccttcctgaaacaacttcttcattaatcctacgacaacgcttacagacatgttttcagaaacggaacaatacaaggtgcgcgatatcggcctggcggatttcggacgcaaggaactggatattgcggagcatgagatgcccggcctgatggccgtgcgcgaaaagtacgctgccgccagacccctggagggcgtgcgcatcatgggctccctgcacatgacggtgcagacggccgtgctgatagaaacgctgacggctctgggcgcttccgtccgctgggcgagctgcaacattttctccacccaggaccacgccgccgccgccatcgccaaatccggcacccccgttttcgcctggaagggggaaacgctgcgggaatactgggactgtacgtggaaggccatgaactttccggacgggctggggccgcagctgattgtggacgacggcggagacgccaccctgcttatccaccgcgggtatgaaatggaagaaggctccgactgggtggataccccgtcggaatcggaagaagaggaagtcatcaaggctctgttgaaaaaaattgccgaggcgactccgggtatttttcatcgctggcttcccgagctgaaaggcgtttccgaggaaacgaccaccggcgtgcaccgcctgtaccagatgcaggcagccggccgtctgctgattccggccatcaacgtaaacgattccgtaaccaagtccaagtttgacaacctgtacggctgccgtgagtcccttgtggacggcatcaagcgcgccacggacgtgatggttgccggcaaagtggccgtcgtctgcggctacggggacgtgggcaagggctgcgcccagtccctgcgcggcatgggagcccaggtggtcgtgacggaaatagaccccatctgcgcccttcaggcagccatggaaggctaccgcgtgctgacggtggaagacacgctgggctgggcggatatttacgtgaccaccacgggaaactgcaacatcatccgcatcgaacacatggaaaagatgaaggaccaggctattgtctgcaacatcggccatttcgacaatgaaatccaggtacacaagctccagacgtatcccggcatcaggcatcttaacatcaaaccccaggtggaccgctacacgttcccgtccggcaacagcctgtacctgctggcggaaggcaggctggtcaacctgggctgcgctacgggccatcccagcttcgtgatgtccaacagcttcgccaaccaggtgctagcccagctggaattgtggaatacccgtaaagaccgttccgtgggcgtggaagtgctgcccaaggtgctggatgaggaagtggcgcggctgcacctcgccaagatagggtgcaagctgactgtcctgcgtccggagcaggcggactacatcggcgttccggtggaaggtccttacaagccggacttttacaggtattaaccttgtcaaggttttcttttcccggccgttccgcgcaggcctgtccggcggaacggcttttttgttttcccgatgatggaagggagggaggcagggtatcagtacgtttatttttcttcctgttttttatgcaggatccctgctgttagtgaaaaaaaggaagactttttatccggtctttaatgttcaaatacctttgcagcaggcaaaacgggagcaatcttggaatgctgaccagccaaagccccggcctgcattgcaggatgttccaaaaccatttgagtttggtaagaaggctgttatcgaatgaagcataggggaagagcaggagccttctctgttccgcctgaatcagcctcatcaggcggtcggcggcctggtatgttatttccccggacttatgctttccgtatacctctttcatgatcattatccaggttgttatctggaattccgatctcttgatcagggttgtcctggggttcccgctcttaaaattgcagatattgctgttgtgtctccgatagtacgaacaccgtttgccggatgcgaccatgcctgattttttcaaataggcgcgcatggacagcatcatatcgtccgaaatgccgggacctgaaggcaaatactcgaagtcgctgaacaaagacctgtggtacatggcatttccgccaaaacagctgtaaacatgggaaatgtcaaaaatacattccctgtaaggtttgacgacgacggaatctgagtctggcagcatgcgtccataggcgggttgtccatcttcatcgatttcattataagaatggcagtaaaccagatgaccgggatattgttccgccagagacgccaacgaggaaatcctgtcttcccgggcgatgtcatcgccgtcaaacttgataatccattccccccgggacaaatgaacggcacattgcaaattccctgcaattccccggttgctttcgttacggtggagaataatacgccgtccttctccctctttttccaccatttcttccaggcattcaaaagaaccgtcctgagaaaaatcgtccgaaataattatttcccattctcctggataatcctgttttaaaatagcccggaactgttccttgataaaacgtttctgattgtaacaaagaagaatggctgaaatcatgaaatcgaataaacagtttaagtttttttaaactgtctaaaaataacgaattccaaattcgattggggaattccaaatccgctgtaattaaaaagagattgcgtgcggttgtttctgcatgacaggagagcctcttcgcagaaaggaaataaaactgatgatcaataattttctttgaaatacggactttccggcaggtatggatgtttctgccggaatgggaattgatggggttacccggatggaatcatgaagacggaagatcccggtcattggggaagcttattttcagaagttcctttctttcaaaatttaaccttgactccggatttggaatccgtgtaatatgccccgcactctttttactgtgcgtgcactcagagagcaaatccctttttttcaataatttatgttgaagggtacggtttgtttctcaacatcaaacggccatggatacttcttcccggaaaacgtctcttgttgtgttgttcaaccatcagtatgaacgtaacattccggtaatcagagagctttattcaagacgcttttccgggttgcttcaattaatgccctactacaagggagatgcccctgacgtatgttccgtcttcgggaattctttccagttctataattatattttgcagtccagggaaagaatcaggcggttggatggcgattattttcttattatcggagacgatcttcttttaaatcccaggtttgacgaattttcaacgccgtccctgctgggaatccatggggaggatacgtgttaccttgacggttttgtggatgtttctcttccggtgtgttaccggggaacggcggaagcccaccatttttccataacccctcccggtattgatgcggaaagcgtcaacaggaacgttccgtcctatgaggaggccaggcggattttaaaatccaggaacctcatgcggcatgatgaattgtcgcgcgtacgcatgtttctgcccaaatggagctccggggggattcatgcgaattggaaagtgttgaagggcagggtatggcatctgctgaattactggaagcaccggattaaaaaataccggtattcctatcctgtcgttttcggatattcggacattgtctgcattccgaaagggaaattggacgatttctgccgtatccttgaagtgttctccgcatggaacatgtttgtggagctggccattcccacggcgttgcagcttcttcccggaacaaagctggctacgctggaggacactcagtacaagtcgggaaacgtctggtttccccaggatccggaacactttgaagccatgaatgccgtcattgacgggctcgtgtcctcttccggaggagacctcggcaagctgcttgcctcctttccggaggaatacctgtatctccatcccgtgaaattgtcccgcttcgccagatagtggcgtcaataaattggtctttttatcccatgatgaaatatgctgtgatcggagccggggtttccggattgtccatggccggaatgttgctgaagaaagggcatgaggtggtcgtttatgagaggggttcccggcccggcggcctgattaaatgcacggaagtacaggggaacctgtatcatcgtgtgggcggccatgtgttcaattcccggcggcaggaagtgctggactggttttggtcccggtttgacagggagcgcgattttgtttccgcccggcgacgggctgtcatttccctggagggcggggatgtggtggattatcccattgagaaccacctcgaccagtttcccgaggccgtccgttcctccatcgtccatgagctgctggaactttacaggaatcctcccgcggagccccgctccctgggtgagttttttctgaaccgtttcggaaaaaccctgaacaacctttatttcacgccgtacaataacaaagtgtggaggcaggatatcagccaaattgccatggattggctggaagacaagcttcccatgccgagcgtggcggaaatcctgttgaacaatattgggcacatcaatgaaagcgccatggtgcacagttctttcttttatgcgaaaaacggcggttcccagtttctggcggatacgctggctcgcggccttaaggtcaggtaccggcaggaagctgtaaatatcctcccgaaggacgggaaatggctcgtgcagggagaattgtttgacagagtcgtctttacggggaatgtcaggcagcttggggattgtttcccctgcgtggatgaattgcgcccgtttttcccccggatttcagaattgcgctctcacggaaccacttccgtgctttgccggatttcccccaatgattacagctggatttacatgccctctccgtcccaccgttcccaccggatcatttgcacggggaatttttccagaaataataataacggggacatcaccaccgcgactattgaattttccgagcaaatgacggaaggggaaatcaggcgccagctggagcttattcccttttcccctgtgtatctggcccatcactgggaagaatatacctatcccgttcaggatgcttccagccgaaccctcatacgggaactaaaggagcgcttggaaccgaaaggcatttatttattaggccgttttgcggagtgggaatactacaatatggatgcggccattggcgcggctcttgatttggataaaaggctggcagcggagcagatgccacggggataa

SEQ ID NO: 280 - DNA, 13744 bp, unidentified
  source 1..13744: mol_type = unassigned DNA
tcaattctttatcggcaaccgttcccacagccaacgtggaatcattcgccagaagaataccaataggcgatagcgtccgtcaattactgtcactcgttttttgtgtttcaacgcccggactatatattccgccactttatcggcatgcatcagcatcggatacttgccgtttcgcagtaaatccgttgctacgaaccccggacggatgtcggtgaagcggatattaagatgctgcatccgtgcgagttgtgccaaagcatcgatgtatgtattctgaaaccgtttggtggcggagtaggcgggtgcgactcccaatcccttggtacctgctatggagctgattacagcgatatgtcctttttttgtctttttgaaataatcgaaagctgcggttaccattcggataaagccttcgacattggtacgtgcggtattcagttctatttcaggttccaggttcctgttctgataacctacgccggaactgaggaagaataaatccatgccgcctaagcggtctatcagttctgtaaggtgtaagacggcattttcctttgtcacatcaagatgctgtatctctatctgttggggattggcttgctgcatgcttcgcaggacttcttcccgtctgccggcaatgcctatgcgccagccttgttgcacgagtattccggctacttcctgtccgatgcctgaggtggctcctatgatgatagcttttttcatgggaagagattatccgataatggttgctacgatttttcttcctccgccacggttgcggaattcacaaagataaataccctgccagatgcccatattcatccgtccattggtgatggggatggtcagttctgctcctacaatggtagatttggcatgcgccggcatatcgtcgtcaccctcgcaggtatgttcgtagtaaggctcacgctccttgacaaggttgttgaagatagctttcatatctgtctgtacatccggatcggcgttctcgttgatggttagtgcggcacttgtgtgtttgataaacaagtgcaatagtccggtcggaggcaactgtggcaagttacgtactatttcttccgtaatcagatggaacccgcgtcgatggggggtaagggtaaattctttctgtataatcatattttctattctttattccattggccgtacttggcaaggaaacactactgtgaacgtgctacctttatttacggtggaggttacttcgattgttccgttcatatgttccatgatagacctgcagataggcaagcccaatccggctccctgaatgaaagcatcagctttttcgaaccgttcaaatattatgccgagcttttcctcagggattccgcgccctgtgtcggaaacgcttattcttgtttcggacggtgtcgtctcgtacgaaatttcgacatagccctgtacggtatttttcagtgcgttcgatatgaggttgctcaaaacctgcttgatgcgcatcggatcttgctttatcaggttaggagttgccgggtagcgtttcttgagcgttacgccttcaggtacgttgggctggcattcggtgcaactttcatctatcaggtcggagaggttgcaccagaccggggacaactctatgtgtccggcttctatcttcgataaatccagtacatcgttgatgatgttcagcagcaattcgttgttgtggtttatcagggagatgtaatggttgcgttcctcagcatcttctatatggggcaggaggctggaaaagccgataatagcattcagcggtgtacgtatttcgtgactcatgttggcaagaaaggccgatttcaggcggtctgactcttcggctttttctttggcatctatcagcatggcttccgtggctttgagccgggtaatgtcgtagttgatacagattagttcgatactgttccgttcgggagcgtaggttttcactatcaggttgacatgtgtccaagtgtagctgccgtcttctctgagaacacgtacttctttattgaacttgtcttccataccttttgctgcattgttcaggaaaccgagcatggcgcgccggtcttcgggatggatatgtctgtacactccgatgattcgggacagaggagttccttcttgttcgccgatattgatgtaccagctgtgttgggcatctccttgccgggtgagtaagtcgtagtgtgcgtatcctactttggcatagttacctatcagttcgaagaaactttcgaattcctgtatcttgttgtaggctacggtggtttcggtcttatcggcattaatcaacaggtagttggcgggggtgtggttctcgtcgtacagcgtggttactttagttacgaggtctattgtaccggtcctggtttgtggattgtagtaagaacctactttcgagaagtcgtagcggaatgtgaaatcggcgtcttcatattttttcagtttctctttcatctctttcgggaagatagggttatcaaatatattgatacccagcaagtcttcttttcgttgcagatgaaacatttccaattccttatcgttgaggtctgtcaatactccgtctgtattgtagacttcaatgcctaccggaagatgcttatagatgttgtgcaagagttgttcgcgttgtcgcaacatctgtgtggcggacgacatataaggaccgtcctgtatttcggctatgccgtaaatcttggtctttccgttttcatcggttttttgcatacagattttgctgcggacccatgtcggtcctttgacggtatcaagcagatagacggtttcattcgtctgttgtatgttgtcgaaggaacggacggtagtatgcggctgttcctctctcagtatgcgcttgttgaaattttcaaaactgatacaaccgccttcttccaatcctaacaggctggcgatgggaccgtagtatatataattggcatcttgtatatcggctttccaccagcctatattggcgttgtgcattatttctgacagcaggttgtaatccttttcagcgtccatacatggatgtttagggttgtttatattatatgcgcatacaaaaatagatataattcgcagaaatggaaagaaatagggagcggatgttttattaaaagcggtacaataatgattttgttgaacttatctttgtcttggcctgtgaaaccgtgatgccagttattgataagagagcgtgaatttgcatgctattttgaagaatgatacgggtaataatgggagtaattaccgtaacaacaaccggaaaaatatggctttttaatgattcgcttgtaatttattcggagataagcggtatctttgttaccgtttacaacgcatttacccaacaaaacaaaaaatatatggaaaaagttattatcaattcgtacgaggattttgaaaagctggtaggtcagcaaatcggtgtttcggagtatgtggaacttacgcaggaacgcatcaatctctttgccgacgcaacgctggaccatcagtggattcacattgacacagaacgcgccaagaccgaaagtccttttaagagtaccattgcacacggttatctcaccctctccatgttgcctcatctgtggaatcagattatcgaggtaaataacctgaagatgatgattaactacggaatggataagatgaagttcggtcaggctgtactttccggacagagcatccgtctggtggcttctctgcattcgttggcaaacctgcgcggtgtggcaaaggcggaaataaagtttgccattgagattcagggcgagaagaagaaagcgcttgaaggtattgctgtatttttatattatttcaactgattatgcgcaaaatggtgtgcccccaatgcaaggtgggggcattttatgtcttgaacgggcagggagagcgtttgcccgtatatgtgtcggacaaaggtgaggtcgtaccgaaagatccggcagcttctttggaagggtatgacctggaagaggtttactgcttatgctgttcctggcacgggactccgaaacgtctggtgaaatattgatatatacgctctttccataaatgcctgcacgctgcggccggatgatagagcagcatgcgcggtccggcatatcgcatgacttcctgcatccgcttcttcatctccggcttgtagcaatgtaccgggcatagtctgcaagttgttttattctctccgaacgggcagcgcgacaggcgcatgcgtgcgtactccagcaattcgagacattgcgggcagagttccttgttgccctctttcctgcggcaatagaggcggatcatctgttctacggtgcgttgttcttgggcaatgcgtgattggcaggtcttattcatccatattgcgtttcaggtaaaccatatctttcagttgtttgcccgcttcataaatgggatggtcgtagttatccgtaaagaagtccgggatgcggtgggaataggtaaatccgcagttctcgtaaaatggaatcgccaatgggctgtctccggttcctacgagcattgtccggcatctgcctgcataatgcccgaaaagatactgtatcagtttcttcccgtatccccgacgttggaattgcggataaacggcaatgttctttatctcaaaaatatcttctgcttcgcgggtgacgacacaggatgctctgatactgccgttctcggacaacacgaacatttcaccgcgttccagataacggtctatcatggattcttgttcatcggccaaaagcagcaggtcgaggtattgtttcttattatggagcacaggctgtatacttatcatttcattgctgtttgaacgggtttgtatggcaaagataatccttatgggcatagaaccaaacaaaacaccaggaaatattgttgatttccaacatggaatagattaatggttatggataaaatgaagtctttgttcttttttttgacgctttggacatttttgccactttttgcaggctatgctcctgataatgtgcaaactgccctgacgaaaatgtatccttccgccaaaggggtagcctggtcgcaggacgaggagtattacgttgcggattttatgatgaacggatttgataccaaggtctggttcaatacggatgcagagtgggtaatgaagcaaacggattgggaaaccctggatgaggtgcctgccgccgtattcaacgcttttgcagccagtcagttttcggacggagtggtacagaatgttgtttgggtgcaatttcccaaatggcaacctattgtagccatacaggtgggcaggccgaacgtgcagataaaatatcagatattgtttactccgaacggtgaagttctccgccagcagaatatcacttacgcttacaatacgcttggggcaagtactttcctgtaatcagacgtgagacgccccgctgtcgggtaggcatctcatttctgtcgcttggtataaaaaacaaggctgtgtattttttatactctctgtttacgctatctttgccgcaaagaaagactttatcttatgaatcggactacttttctgcaagatgtttacagtgttgttgccgctattcctgaaggatgcgttgtaacctacgggcagattgccagtttggtaggcagacctcagtgctcgcgtatggtggggcaggctatgcacaacgtaccggaggaattgcatttgccttgtcatagggttgtaaacagctggggcagattagtgccgggttggacggagcaaagagtattgttggagaatgaaggtgtccggtttaagacaaacggctttgtagatatgaaaaagtctcaatgggaatttatgaaagaacaataaactaacgaataataatcgaaatatgaaatttataggtgcacatgtatctgccggcggcggtgtggagctggctcccgtcaatgcccatggaataggagcgaatgcttttgccctgtttaccaagaatcagcgtcagtgggtggcgaagcccctgacgcaggaaagtattgccttgtttaaggagaattgcaggaaatatgctttggaggcacgttatattcttccacatgacagttatctgataaatctgggacatcccgaagaagaaggactggagaagagccgtgcggcttttctggatgagatgcgacgttgtgaggaactggggctggaactgctgaatttccatccgggcagccatttaaataagatttcggttgaggcttgcctggacagggttgccgaatcgattaatattaccttaggcaagacgcaaggcgtaacggcagtcattgaaaatacggcaggacagggcagcaatgtaggcaatgagttttggcaactgaaacatatcatcgaccgtgtggaagacaagtcgcgcgtaggtgtctgccttgatacgtgccatacgtatacggcgggttatgatatcgtaaatgaatacgacaaggttttcgacgaattcgataagaccgttggcttcggttttctgcgcgccatacacttgaacgattcgaaaaaagcgttgggtagccgtgtagaccgtcacgacagtatcggcaaggggcttatcggcttggatttcttcaaacgttttatgaaagacgagcgttttaacgatatgccggtgatactcgaaactccggatgaaacgctttgggcggaagaaatcagcatgctgcgtagttttgaataattgtccggaaataaatgacgcggactttcgtggatgttattaattgtatccacgaaagtccgcgttatttgtgcccgaattatacgataatgaagtttattcgtttctcgtgatgcgtttgctgcctgctacctgcattattggttgaccttaacgtccttccactcaaaattagagataatctctttatcgcattgggcattctttgccttgatattcaaattctcgaaagtgaaatccttcaattcgtattggtcggactttctgacgttgaagaatatgtcgcagctcaggctgatattgcgcagcgtcacgttgttggcacgtgagagggggatgtccttgcggcctttgaggtcgaagaactgtgtccacggtttgatgagcagcatgcttttggcatcgcctgtgatgtcttccaccaggatgtattcgtagtgttgcggcgtatcgggacgcatcttcagccacaacaggcgcgtggcattgctgattttgcagcggcggagaatgatgttgcggttgtgtatcgactcgctgccgcatgtcagaccgctgtggcaaaagccgtatgtgcagtcttctatgataatgttggtgttgctgccgttattagggtccttatccgcccacgggcctttgccgcctttcagtgccacggcatcgtcgttgacggacatatagcagtttttcaccagtacattgctgcagacgtcaatatcgatcgcatcgctgctcggtgctttcaccggggcggcaggagcgaaaatatggagattcagcagctttatgttattgcaacggtagatatgcgtagtccagaacggagagttcatgaggcgtactccggagatttgcacatcgttactgttggagatgtaaaccaggcgggggcgcaactcgtccatattggtacatttcgggataacctgccggcgcagccagaaagatttccagtacctgtgcccgttgccgttgattgtgcctttgccggaaatggtaaatccgtttaccttgtcggcattcaccagtgcggcgaagtatttcaggctttgtccttctatgcgggtgttgacaatggtgaagttgctgatgtcgtcacttcctttcagcactgcaccttcttccatgtatagatgcgttttcggcttgaagaagatggagccgctgaggaatgttcctttagggatgatgataacgccgccgccattctcggctgcccggtcgatgacggcctgtattttctccgtttgcaggattgtactgtcgtttgccacaccgtaatcggtaatggtatacttcttgcccagagtgtcgatgtttacgatttcgttctgtctgaaccagtcgggaataggcgtgccgtcggggaatttctcttgctcggacatttgcaggctgataaatgccgtaaataggaatgcaatgattttcatggtttccgataaatttaaaatctacttatgaattatgttgcaaacataggaaacttagtgcaatgccggacgaaagacgttgatttaaattctgtgtaaaatgacttttcagcctgcttagaacacgcattccacacggttgccgtcggggtcgagcactacgctttcaaaatatccgtctcccgatgtacggggttctccgctgatggtatatccggcacttcgcagcttttccgtcagttcgagaacctcttctttgctgtcgagtgcaaaggcgaagtgggtcaaaccgagcctgttttccccgatgggagtattctgtacatcggtacggctcatcagctccaggtcggctccgcagtcgaagcggataaagtaggattcaaaccctttttgagggttgacgtatttctcattgcttgtacctttgaagtaacggatatagaattctttcatttcttccagacggaaagtccagatggcgatgtgatgtattctcataagtcaatctgtttttgttttatacgatgcgtattcatctacggcttccattgcaggtgtaaaatgggaaaaggattccccgaagggtcggtttcatctcttccgatgagttggaagcccatgtgcagatagaaccggtgagctttttcgttttgctcattgacgtccactttatagatatgtttttcgtggagtgcgtattgcatcaactgcttgccatatccttttccctgttcatcgggatgtacaaagagcatttcaatgagttcgtcgctcagccccataaaggcagcgatttttccttcccggttacggatgatgtaaagctctacggcctggaaatattggttccgtaccaatggcttgtagaattgtatgttctcttctgtcaggaaatggtgggtactgcgaacggaggcttcccatacggtgagcagttcgtcataatcttgcggggtgggtcgaaggattttcatcggatacttgttttggggttattaatagtgattactgttggtataaacgtcagttgccggttataatcggttacttcataggttagaagtctgctttttgagtgatgcttattctctttccggtcaccggatgtgtaaactccagcatttcggcgtgcagatacaggcgttcggctttccgtccatagagctcgtcgcctatgatggggcagtgcagtccgagcgggtgggcggcatgcacccgaagctggtgggtacgtccggtgcggggataaaaggcgatacgggtacggttgtccttgcgttccagtacttcaaagtctgttacagcgggcttgccatatccggtatgcaccatttgccgggggcggtcgagtgggttcgggcataatggcagttcaaccgttcccgcatcttgagaaacgctgccttgaagcaacgcaatatagcgtttgcctacactgcggtttttaaactgcgcttgcaggttttggtggacttgcttggtttttgcaaccaccagcagtcccgatgtagccatatccaggcggtgtacaatcaacggaccgtccgcatcgggataccgctcgcgcatcatgctgtaaacggaaaccacatcttccttgccgggtacggacaacatccctgccggtttattaaccaccgccagccattcgtcttcgtagataatgtccaatgttttcttgccggactgcaactctttcagaattgggttctcgtctacttcaagaccttgcagcatatgtcccaatataggctcgcacttgcctttgcaggcgggatagtaatgtccgtgatgccgtatttccgttttgggggattctccccaccagaattctgccattgcaacaggcttccacccgtgcagataggcttgttgcaacagcttgggtgcggcgcactcaccggctcccgcaggcggggttttgtgtacggtctgtccgaagatgtcgcaaagcgtcttgacttctccccgataattcagcatcttgaattgttcgaacagtttttgctgcaaggcggcagaacgttgcttacgttcgcttttcaatacctgtatgccggcctcataatcggaaaccgtttgctgtaagggagcaatccgctctttccaggcacgttccatgcgtttgtattcggctttttggaactgactttcgcgtatcagggcgctctcttcctcaggcgtcattggagcaccgttgggtaaagccgcttcgcgtcttcgctcttcccgtttctctttggcgcgtttcatctgccgtttggcttcttccagcgtttcttgggcagtttgccgcagggcagccagttgttgtacctgtcgtttgtattcttcgtcctcttccaacaggccgatgcgcgtgttgatttgcgaaatctgttcttcctctatcttgaagaacccttgcggctgcaacaggtcgtagaccggcggtacgaaaaacggatgcacattactgcccgccagtatgccggagaatgctgccaggtatcctgtttcaccctcttgagtccttacaaccagaacaccgaacattttgccctgcgccaactcttctttccacgcttcctgcaaaccgagataggcttgcacctctttcgctgctgccacgcaaagcggatgaggtgtatagcaaaaagggaaagtaaatctttccggcaatggtatgtctgctacgggggtatggaaatggtgcaacatggcgagggaagttaatcgtcaatcaaattatcattgtccgtattgataatgtagggaatgttgtcattctcctcttccggaacggacaggacatcttccgcatccttctgttgcggcaagggatgcggatacgctgatttctttttcttctttccgtatttgcgttccctctcccaggcagctttgcgcgcctgatactgttcgtattggttttccagatagttgtcggccataatctgtcgtttataaagtattcaacttttgctttccaaatacagagaatcagggtatgctctgtattattttcttcatgctgttaaattttttacgtctctgtgttcagtctgtatagactccgaaaatctgtttatcgctcggtgggaagtgagaactcctgccagtcgtattgttgcccgtttccgtcggctacggccacccgtatggtgacatttcccgtctttatccgctcgcctgcgctgatggtggcggtgtatttcacgccgttgtgaggggcgatttgctccaccattacaggtggtgaaatgtaaatgcgcttcatacctgtggtttcggtaaccatcggtaccacattatatatagtctgtttaccttcgttcatgatttcgaaaattactttgcttttctcgcccgaactgattacgtggtcacggctgtcgtctatgaaacggatgttgcgtatccttaggttatcgaagacgcttggagtgggatacgtttcgtgctgcggcttgtagggctccgttctttctatccggtaaccgtatgcctcttgtttgggagcagacacagcatttccaatggctgctccggcaatggttccgataattgtaccgatggccgaaccccggtaaccgccccgccagccgccattattgtcgcctatcagaccgccgatggcaccgccgacatttccgccgatggctgcacctgcaaatattgcaccgggatcgcccgataccgtttggcttgtgccgcaacccgacaggatgagcaacgaagcggttaacactccaatctgtctcttcatatcgttaagctttggttagttgtacaaagatagtgaaatatatggtaaatagcctgttctcttttactcttttgtttcttcttaatacataaaaccctcaggtatcataaggctatattctaaatgttgtgccacttagctggcacaaatgtgcctattaataggcacaaccttgcctattaaaaggcaaaggttggcatgtcataatgtattgctccaataataatcttcaaagtaagaatcgaattcaatggagaaagttactccgcactctttgagtatgtttatgatattttgttgctcggcaggagataatgcccgttcgccattgcggacacgatagtaggtacggcggctggaattactgatgacccggttgatgaagaagtgtgtttgtttggcggtgaggttttccagaatcccgagaaagcctctggcatacctcacctgcttattggagcaaaagtaagggcactcattcttgaacttggctaaatgcttgggattgatggcactgcaagatataagctcttccggcgaaagcctttctgccaattgcctgaggcaagtttctgctttattgcattgccggttgatacaccataggaaattattgggaacatctgaaaatgcaagttctttttctttcattatgaattgcggtttatgtgaggactctgataactatctgcaaatgtagccattcttattcttattaggcgtgagatgtttataaaaaaatctattattgctcttttatcaaaatgttatgtttatattcgcaaaaaaacagaaactgattattaaggaaggatattatgcttgcatatacatacatcgaacatggaagattcggtctgttggacaagccaaagcccgaattgaaggactctcgcgacgctattgtccgcgtgacacttggtagcatctgtaccagtgatttgcatatcaaacatggcagtgtgccgcgtgctgttccgggaataacggtagggcatgaaatggtgggcgttgttgaacaggttgggagtcgtgttacttcggtcaaaccaggcgacagggttaccgtcaatgttgagactttttgcggtgagtgttttttctgccaacacggatatgtgaataactgtacggatgtgaatggtggttgggcattaggatgccgtattgacggcggccaggcggagtatgtcagggttccttatgccgaccggggattgaaccgcattcccgattcggtgagtgatgaacaggcgctttttgtaggcgatgtgctggctacgggattttgggcggcacgcatttcggagatttccggggatgatacggttcttgtcataggagccggtcctacggggatatgtactttgctttgcgtgatgctgaagaaaccgaagcgtatcattgtttgtgaaaagtcctctgaaagaattcggtttatccgtgaacattatcctgatgtattggtgacggagccggaagagtgtaaggagtttgtacttcgtaacagcgatcacggaggcgctgatgtcgtgctggaagtggcaggagccggagacactttccgcctggcgtgggaatgtgcccgtcccaatgcggtggttacggttgtggcgctttatgacaatcctcaaatacttcctttgcccgatatgtatggtaagaatctgactttcaagaccggtggagtggatggatgcgattgtgccgagattctctgtttgatagaggcgggaaagattgataccacgccgcttatcacgcaccgttttcccctgacaaaaatcgaagaagcataccgcgtattcgaaaacaggctggacggggtgattaaagtggcgatagcgggaaaataa

SEQ ID NO: 281 - DNA, 7021 bp, unidentified
  source 1..7021: mol_type = unassigned DNA
ctgcagataggccagcagattacggcggcggccgaccatcttgaacagaccacgacggctgtggttgtcgttcttgttggtcttcaggtgctcagtcaggtggttgatgcgtgcggtcagcagcgcaacctgaacttccggagaaccggtgtcaccctcatggatggcggcttttgcaatgatgggctgtttttcgatagcagacttctggctcatagtagtaatacctcgctttataatatttgcctacggcgcagcaaaaggcaatcaaggctccctgatgcagggcatacacccaaagccgggccgcggtaacatttagattatagcatatccggcatagcgtggcaagccgtaacagcaaaaaaactgcacagattttgccctgcttttccggcatgggtcacagggtcacgtttttcagattgcgcagatccccgctttcacggaaatcctcataatccaggctcaggttcgggttgtaataggggtcatgcaggatattctgcttaccgtgtacctcatacaggcgggcctgctccttggcaaagcgggcctttttggcggggtcttcctcgtccgaaccacgggatttgctttcgtggtggtacagctccgcatagggggtccacacaatacgccagcctttttcccgcaggcgcaggcagaaatccacatcgttgaatgcaacagtaaaggcttcatccaacccgccaacggcatcataagccgatgtgcgtaccagcaggcaggccgcagtgcaggcggaataatcctgcacggtggccaggcggaacatgtacccgctaccgccgcgcttgtggtacttgtggctgtggcccgcatacccacccaaaccggtgataatgcccgcgtgctggatggtatcgtccgggtaatacagcatggcgccgcaggccgccacgccgggctggctggcttcggccaccatctgggtcagccagtttccgctgataatttcaatatcgttgttgagcagcagtaagaacttgccgttggcaaacttgcggccaaagttattgatgcggctgaaattgaacccgccgctgtaagccaccacgcggcagttggcatagcggtccggcagcttttcataataagcctttgtggcggggtcggtggagttattttcgatgacaatcacttcaaacgcttcgtacagcgttttggagtacaggctgaacagacatttttccaggtcgtctacatggtccttgttggggatcaggatggacaccagcggttccggctccggcagttcccactgcacatggcaggtaccggggaagatgccctcctctaccctgccgctgcggccggttgccgccaggtggtccgccacggctttctgcgcggcttttaccacatagggcttggcctcggtgccgccggaggtggacgccgcatgaacccgccagtaatacagcacctgcgggatatgcagcggtgcggcgttggcgtctttcgcctgcatggcatcgatcagccgcaggaacagatcatgatcctgtgcgccgtcacactccgggcgctccccgccgatggcatcaaacagacttttgcggaacacggccaggtggcagatgtagttgcaggccatcaggtattccggcgcatagtccggcttaaagtgggccacatgggcggttttggggcttttgcggaaaagggcttcatcgctgtaggcgaaatcggcccccgttttttgcagttctttgcccatgcagtagatagcgtgcggggccaggatgtcatcatggtctgccagagccagatattccccctgtgccagccgggccgccgcgttggtgttggccgcaatgcccttgttttcaattttcacatagcgaatgcgcgggttggccgccacgtgcttttgcaccagctcccccacataggtgtgggcatcgtccgaagcatccgccaggcagagctgccagttgtgggcggtctggttttccacactatcgagaaattctgttaaaaagttttgcggcgtattgtacagcggcgttaaaatagaaatgatggggaaggtttccgccgcggggtcgctgcgctgggcttccagcgccatgttggacggccagtaccgcgcccgcttgccgaaaaagcgccgtttgaaaaagcccaccgcgcgcacgcacatggtgccaatgccctgttccttcgtcaaggtacgggcatagccaaatagttctttgatgcgcttggcctgctggttcataacgttacgtcctttcgggtgtcagattgttggggtttgttccggttcgggttcaggcagtccgtctgccctgtttgggggttggaatcgatgtacagccagatggtttcataatctgtctgggtacggatgacgtggtcatggaaggatttttgccagatggggtgatggaggtgtttggttacgcagctctttaattgttggacgatgttggaaaccgtaggggcgcgcattacgcgcccgtcgccctggaacaaaagcagcaaatgcacatggttgggcatgaccgcgtatttttccagatgcaccatttgggctgtaatcatatccctgcaaacggtttggcactcttgtatgatactgcatgccgttcaccaaacataaaaatcctgatatactttacccatccagcccgtttgcctggcgctccatgttttctacaatgatcttgtgcaaatcgccctggctggcggcgtattccagcaccttccagggagtatcggtgtggtaatgcactttcaccacttcctcatcccctaccacgatcaggcagtcgccctcggcgctggccatgatcccggcgcggatgtcatcctcgtccaggttgctgccttcgatcaaaaactgggtatcaaacttatttaccatagttttaacctctgccctgccttatttcagcccaaagttttcaaacaggttgttgaaatgcgggttatagtacgggtcataatgatcaatatattcgtgatacttcgtgtaaaagtttgccttttcgcgggcatagcgggcggcgttttccggggtggtgtccagaccgcggctcttgctctcgtaatggtaggcttcggcacggggggtgtacacattcagcaggcccttctgccacagcttcaggcagtaatccacatcgttataggccacggcgaacttggcttcgtccaggccgcccgccgcgcggtacagctccgttttggtcatcaggcaggcacccgtcacggccatatagtcctgcgtggtgacaaggcggtacaaatcgcccacagccttgcgcgggtagctcttgtggctgtggcccgcactgccgttgatgcccataatcacgcccgcatgctggatggtatcatccgggtaatagagctttgcgcccacagcacccacatccggccgctgggaatagctcagcagctcccgcagaaaatcatggctgagtacctcgatatcgttgttcagcagcagcagatgctcgcccttggcaaagcgcgcaccaaggttgttgacggcagaaaagttaaacggccccacataggtcaccatccggctgttggggtaacgctccggcatggttttgtagtaggcgaatgtttcctgctgttcagagttattttcaatgaccaggacttcaaagttatcatagcctgcgttggcgtacaggcttttcaggcagcggtccaaatcgtcaatatggtccttgttggggatcataacgctgaccagcgggtggccggtcagttcgtaccgcacctggaacgcaccgggcgcgttctccacctgcatggctttgccgggcaggttcagccgcttgagctgggcatcaatcgcgcgcacaccggccgccagagcatagggcttcgcctccatgcctgccgcggtggaacccgcatggccgcgccagatatagagcacctttttgatatgggcaattttatcccgcgtggtctgttcggtcaggcgcagcatcaggtcatggtcctgtgcaccatcgtactcactggattcatatgcaccagcacggtccagcaatgcgcgggagaacaccgccagatgggtgatgaagttgaccccgcgcagatagtccggcgcaaagtccggcttaaagtggtagccgcccagctgtttcaaatccgccgaaagcacgatctcatcgctgtacaccagctcggctccctggctttgcagggttttcacgctctcatacagcgcgttggggtacagcacatcgtcatggtccagcagggcgatatacgtccccgttgccagcgcaaagcctgccgtggtgttggccgcaatgccgccgttttccactttcttatacaggatgcgcggatcccttgctgcggccttgctggcatgggtgctgaacgcggcatgggctgcgtccgaagcatccaccagcaccagctgccagtgggggtaggtctgcttttgcacgctggccagcatctggccaaagaacttttccggcgtgttgtacagtggcactacaacgcttaccaccggtcccggcttgccgtctgcgtactcggcgcgctgggctttcagctcccggcgcaggggcaggtctgcccggtgctgccaggaatcatggtggaacgccagccccacgcggaaggtcacatcgcgccacagctgctcggcaccctgctctttcagggtggcggcgccgcggcgggcaaggtctgacaaatgggcggggttcagcaggcgtttggccatgccgcccacactgtccgcctgggccacatccgccgggcggttctggttcgtgtcctgtgccatgcgccttatccctccactttgtccgccttcatggcgtccttcttttcaaacttgcggtattccgccgtcacctctttggtggggccaaggcggcgcaggtgaccgtggtccagccaggccaccttattgcacatgcgctcaatctgctcaatagaatggctaaccagaatcacggtcgtgccgccggaaagcagctccgccatgcgcttctcacacttttcctggaacaggaaatcaccgaccgaaaggatctcatccgcaatcaggatatccggcttggtcatggttgccacggcaaaggccaggcgcgccaccatgccggaggaatagtttttcagcggcacatccaaaaattcctgcagctcgctgaactccacaatatcgtcaaacttggaatcaatatacttgggggtatagcccaggaccgtgccgttcaggtagatgttttcccgcgcggtcaaatccatgtcaaaaccggcacccagttcgatcagcggcgcaatggtgccgttcaccgtcactttaccggcgctgggcttgtagacgccggaaatcactttcagcagcgtacttttgccggagccgttcaggccgatcaagccgtaaaaatcccccggcataatgtcaaagctgacatccgaaagggcgaagaattcatcaaatcgcacaccgccgtgcaaaagggccacaaaatattctttcaggctttcgtgcttttctttagccaggttaaaacgcatcgaaacatggtcgatggaaataatgggctgttgcttttgttcgctcatcttgcagcccccttacatatacaggacaaatttgtcctggttctttttgaatacatacacaccgatccccagactgagcgcagaacacaggaaaggaatcagcaccatattcagggtcaggccggtgccccacatcacgcaggaacgcaccgccgtgatgtaccagtagatggggttcaggttgatgacagcctgcatccaggatgccatctgactggggtcatagaaaatggcactgccgtataccagcagggtgcagaagacctcccagatgtgcatgatatcgcgcacaaagacatacatcgtggacaggatcagcccaacgcccaggctgaaaacgaacagcataacaatgggatacaccgccaacagcaccgtgcgcagcgaaatatgggaccaggtaaccagcgctacaaagaagagcgccaccaggctgaaaaagaagttgaccagcgcaaagcagcatttttccagtggaaaaatgtacttggggatatagaccttgcgcagcagcgggccgtttttcagcacgctttccatcgccatgctggtggattcgcggaagaagttgaacatcaactggccaatgatcaaaaacagcgggaaatcctcaatgccatccccgcgctggttgaacagcgcgccgaacacagcccacatgacaaggcaggtcagcagcgggttgagcacgctccaggcaacgcccagcacgctgcggcggtacttgagcttaaaatcccgcgtgatgaggttttgcagcaggtagcggtatttccagaaacttgcaaacgagttttttaaattctgcacatcggttcccctgaatcagtatttttcaaagtattcaaacttctgctcggcaaagggcgtgtgctctttgtccttggcgctggtcttatgctcgcagccgcagtccggccactgaacgttgacggtcgggtcatcataggggatgccgccctctgcggtcggatcatatacgtcggtacacttatagcagaattccgccacatcagacagcaccagaaagccatgggcaaagccttccgggatatagaacatctttttgttctcggcggaaagggtcacacccacccacttgccaaaggttttgctgttggggcggcagtccacggcaacgtcgtacacttcgcccatggtcacacgcaccagcttgccctgggtatggttcttctggaaatgcaggccgcgcagcacgcccttggtggagcggctctggttatcctgtacaaagggcttgtcaatcccggcggcggcgaaatcgtcgatctgatacgtctccataaaataaccgcggtcatcgccaaacacggtcggttcgatcacaacaacgccggggatttcggtttcaataaaattaaacttacccattttttcatattctccttttatcgttcgggctttgccc

SEQ ID NO: 282 - DNA, 27794 bp, unidentified
  source 1..27794: mol_type = unassigned DNA
  misc_difference 2331: note = a, c, g, or t
  misc_difference 2332: note = a, c, g, or t
  misc_difference 2333: note = a, c, g, or t
  misc_difference 2334: note = a, c, g, or t
  misc_difference 2335: note = a, c, g, or t
  misc_difference 2336: note = a, c, g, or t
  misc_difference 2337: note = a, c, g, or t
  misc_difference 2338: note = a, c, g, or t
  misc_difference 2339: note = a, c, g, or t
  misc_difference 2340: note = a, c, g, or t
  misc_difference 2341: note = a, c, g, or t
  misc_difference 2342: note = a, c, g, or t
  misc_difference 2343: note = a, c, g, or t
  misc_difference 2344: note = a, c, g, or t
  misc_difference 2345: note = a, c, g, or t
  misc_difference 2346: note = a, c, g, or t
  misc_difference 2347: note = a, c, g, or t
  misc_difference 2348: note = a, c, g, or t
  misc_difference 2349: note = a, c, g, or t
  misc_difference 2350: note = a, c, g, or t
  misc_difference 2351: note = a, c, g, or t
  misc_difference 2352: note = a, c, g, or t
  misc_difference 2353: note = a, c, g, or t
  misc_difference 2354: note = a, c, g, or t
  misc_difference 2355: note = a, c, g, or t
  misc_difference 2356: note = a, c, g, or t
  misc_difference 2357: note = a, c, g, or t
  misc_difference 2358: note = a, c, g, or t
  misc_difference 2359: note = a, c, g, or t
  misc_difference 2360: note = a, c, g, or t
  misc_difference 2361: note = a, c, g, or t
  misc_difference 2362: note = a, c, g, or t
  misc_difference 2363: note = a, c, g, or t
  misc_difference 2364: note = a, c, g, or t
  misc_difference 2365: note = a, c, g, or t
  misc_difference 2366: note = a, c, g, or t
  misc_difference 2367: note = a, c, g, or t
  misc_difference 2368: note = a, c, g, or t
  misc_difference 2369: note = a, c, g, or t
  misc_difference 2370: note = a, c, g, or t
  misc_difference 2371: note = a, c, g, or t
  misc_difference 2372: note = a, c, g, or t
  misc_difference 2373: note = a, c, g, or t
  misc_difference 2374: note = a, c, g, or t
  misc_difference 2375: note = a, c, g, or t
  misc_difference 2376: note = a, c, g, or t
  misc_difference 2377: note = a, c, g, or t
  misc_difference 2378: note = a, c, g, or t
  misc_difference 2379: note = a, c, g, or t
  misc_difference 2380: note = a, c, g, or t
  misc_difference 2381: note = a, c, g, or t
  misc_difference 2382: note = a, c, g, or t
  misc_difference 2383: note = a, c, g, or t
  misc_difference 2384: note = a, c, g, or t
  misc_difference 2385: note = a, c, g, or t
  misc_difference 2386: note = a, c, g, or t
  misc_difference 2387: note = a, c, g, or t
  misc_difference 2388: note = a, c, g, or t
  misc_difference 2389: note = a, c, g, or t
  misc_difference 2390: note = a, c, g, or t
  misc_difference 2391: note = a, c, g, or t
  misc_difference 2392: note = a, c, g, or t
  misc_difference 2393: note = a, c, g, or t
  misc_difference 2394: note = a, c, g, or t
  misc_difference 2395: note = a, c, g, or t
  misc_difference 2396: note = a, c, g, or t
  misc_difference 2397: note = a, c, g, or t
  misc_difference 2398: note = a, c, g, or t
  misc_difference 2399: note = a, c, g, or t
  misc_difference 2400: note = a, c, g, or t
  misc_difference 2401: note = a, c, g, or t
  misc_difference 2402: note = a, c, g, or t
  misc_difference 2403: note = a, c, g, or t
  misc_difference 2404: note = a, c, g, or t
  misc_difference 2405: note = a, c, g, or t
  misc_difference 2406: note = a, c, g, or t
  misc_difference 2407: note = a, c, g, or t
  misc_difference 2408: note = a, c, g, or t
  misc_difference 2409: note = a, c, g, or t
  misc_difference 2410: note = a, c, g, or t
  misc_difference 2411: note = a, c, g, or t
  misc_difference 2412: note = a, c, g, or t
  misc_difference 2413: note = a, c, g, or t
  misc_difference 2414: note = a, c, g, or t
  misc_difference 2415: note = a, c, g, or t
  misc_difference 2416: note = a, c, g, or t
  misc_difference 2417: note = a, c, g, or t
  misc_difference 2418: note = a, c, g, or t
  misc_difference 2419: note = a, c, g, or t
  misc_difference 2420: note = a, c, g, or t
  misc_difference 2421: note = a, c, g, or t
  misc_difference 2422: note = a, c, g, or t
  misc_difference 2423: note = a, c, g, or t
  misc_difference 2424: note = a, c, g, or t
  misc_difference 2425: note = a, c, g, or t
  misc_difference 2426: note = a, c, g, or t
  misc_difference 2427: note = a, c, g, or t
  misc_difference 2428: note = a, c, g, or t
  misc_difference 2429: note = a, c, g, or t
  misc_difference 2430: note = a, c, g, or t
aaaacggtcgtttttttgcttcaccgccttcggagatccatcgccatgaacctgccgcaaatttccgtaatcattcctgttttcaatgtggaaaaatttctcccccaatgcctcgacagcgtcactggacaaacctttgccgacatcgaaatcatctgcgtcgacgacggctcgaccgacaaaagtccggaaattctctcccgatatgccgaccgcgatccccgcatccgcatcatcagccggacaaacggcggactttccgccgcccgcaacgccggcctcaaaatcgcacggggaaaatacatattctttatcgattccgacgactggattgaaccaaacaccctggaaaaactgtttgcaacggcggaaagcaccggcgccgacctgacctgcgtccactttcgcgcctttgccgaaaccgaaaacgataaacggcaggcaaacggcaaacaaagttatttcgaccagtccgaacaaacgccggaaggatgccggccgctttccgacaatccgctcaaaattcacgttgtcgttaacggaaaactgcacaaaaaaagcattatcgaaaaattctccctctcttttccccatgaacggctgatccatgaagacgagtactgggcatgggcatacggcattcactgccaaagctattcctatctgcctgatcccctttaccattaccgcattcaccggaattcgattaccggaacggaaaaaaactcgccccgtccgctcgacatcatcgacatcaacctgctgacggcggaagaaattcgccgctatgaccggctggaacaatatctgccgcagcttgaaaacatatttaacctgcacctgacttccgccctgcttaaaagcggcgccgaacattacggcgaagcccgccggaaaatggccggatatttgcaaattccgggcatttcaaaacaatttaaagaaaatatatccgctcttgcggaagcggaaattccgctttccgtcatcatcgccgtgtacaatacggccccctggctggcctgctgtctcgacagcctgctggcacaatccaccgacttgttcgaaatcatctgcatcaacgacggttcaaccgacgaaagcccggaaattctctcccgatatgccgcccgcgattcccgcatccgcattatcaatcagcaaaaccgcggactgccggctgcccgcaataccggtttggcagctgcccggggcaaatatattgcctttgtcgactccgacgactgggtcgaaccgcaaaccatggaaaaaattctgctccacatgcagcaccggcagctggacatattggccttccggctgcgcagatacgatccgtcgacgcaaactttccgcaccgattcctatcatgactttccctctgcgatacccgctttttctctttacagcggaaaaaaagaaccggaactgctcgccgctctgccgcaggaggtttgtaccaaagcatatcggcgcggctttctgaccgcaaacaaacttgctttttgcgaaagcctggtccagggcgaagacgaatttttcaatctgctttgcctgccttatgccgacagttacggtatattaaaagaatatctgtacaattaccgttaccctcgcgaaggttccatcatgtcaatcgtcaaaggacacgaaccggaaacgatcaccggcattttcggcctgctggacggcattgcccggctgtatcatgagcaaaaaagcgaaaaagcgaaaaacgctttggctgcccgttacctgctgcaaatccgcaacctttttaaaaattatccggtttttgaaaaccgtttctgtttcacccggctgcgccgacaattgaaaaaaaacaaagccgttttccgcggccgcggcaaacttcggccggaaacatacggacagatcaaaaaacttctccgccgcggttggttcttttaccgtttatcccgaggaattttttccgcctcgcaaacgccttgcggccgcgcgcttgccgccatcgggaattttgccaaagcctattttctgtttccctggtatgtctacaaaatctataaactgcttaaaaaaggcaaccctttttaacgccggcaactgctcttacgctgtattttctccgccattttttcccaacaaggttttacacttttcccgcagccttcccgccgccgcgccctgacacctgctttgtcatttttctttttttatcgggtcgtttccttgccccgaaaattccccgattacttgcgttttgtacttccccgtcgtttttcttccgcaacgcttatactttccctgtcattttcctccttcctgtgtcgtaccggcttttccttnnnnnnnnnnnnnnnnnnnnnnnnnnnnnnnnnnnnnnnnnnnnnnnnnnnnnnnnnnnnnnnnnnnnnnnnnnnnnnnnnnnnnnnnnnnnnnnnnnnngtaccggcttttccttaccccgaaaacgctccgattacttacgttttgtacttccgcatgcttaccgctcgctttttccgcttgctaccgaatgccggcataaacatcctcccaattttttccccccgccgcccaccccctttatacttttttatctcccttttttcctcccatcttctcccttttgccccttcttcaccgcccttttttctttctgctgccttttctgatactttctcttaccgccttcttttccaaccgtctgccctttttaccgccttcttctcctgcccttttccctttcagcacttttcttttcccgtccttctttctccctgccctcccccttttagcaccttccttcaccatcttcttttctaaccgccggagcttttaccgcctttttctcctgccgtcttctccctcttgatcgcctccccttttgccgcacttccaagcgctctcctctcgaaattatcttggccgccctcataaacacaaaaagacggaaagcggcttgctgaccgtttttccgtctttcatataggacgctttttataatccgcgactcttcagttcctcattcaccatttccaatgaaagcaaaacgtcttgtccgttcattacaaaattgtccccctgctgcagttcaagcaaatgttttttcgtttctttcagttcctcgtccgaagcctcttcaagcatatgctgctgcaaaagcaaagacaaataaacgatccccagaaacaacacacataccactgctgcacaaatcatataatttaacataatgcttaaagtttataattgataatgattatattatatcccattttgatctttttgtcaaagacagtgaacggaaagttttctcttcttcaaatgttccctcctcccaagttttcttccccgtctctggacttgcataatttacgcttcctcacccctaattttttctctcccgcattcttctctcatccaacctctttctctcccggaatttccttcaaaaactttttcccatccaaatttttatcccctgaacggttctgccattgccggtctccttcactcctaattttttctctcccgcattcttctctcatccaacctcctcctttcccaaaatctcccccgacttctcatcttcaaaaagtttttcttccccaaaagttccccccctctgaaaaagcgctctcacctcaaattccccttcccgacaacttttttttcacccgtaatccccttcctttccgccaatagagcttctttccttctttccttctttccttctttcctttctccctcttttctttttccttctctccttctttcttcctccccggcctttcccgctcctccgttttctctttttcgacaaacgaaaagccgccggttttcaccgacggcttttttgctttcagcttttttgctaacgaggcttactcagccggctgctgctcaaccgcgggggtttcgctttcagcactttcaacctgttcggcagccgcttcgcgcaaggccagaatttccttgtcgttctgcgcggcaacccgtttcaggttacgcagcacggtaccggtaccggccggaatcagacggccgacgataacgttttccttcaggccggtcagatgatcgaccttgccttcaactgccgcttcggtcagaacacgggtggtttcctggaaggaagccgccgaaatgaacgacttggtctgcagcgaagccttggtgataccgagcagaaccggatccgcctcggccggaacaccgccttcggcaatcgtcttctcgttttccgcctcaaagacgtcacggtcaacctgctcgccgacgaggaacgtggtatcgttcggaacgcggatctcaaccttgcgcagcatctgcgaaacgatcacttcaatatgcttgtcgttgatcttcacgccttgcagacggtaaacgtcctgaacttccttgaccagatattcggccagcttttcaacgcccagaacgcgcagaatatcgtgcggcgccggcgtaccttcaaccagcatgtcgcctttcttgaccacatcgccttcctgaaccaccagatgacggcccttcggaatcaggtactcgatcgcctcgcctttggccggaaccacggtaatccgctgtttggccttatagtctttgccgaattcgaccacgccgtcaatatcggaaatgatcgcctgatccttcggatgacgggcttcgaacaattcggccacgcgcggcagaccaccggtaatatccttggtcttggagctttcccgcggaattctcgcaactacgtcgccgactttgacttccgcaccgttttccaccgtcagaatggcgccgaccgacagataatagcggacttccttgccgttgtcgaacaggatcggattgcccttttcgtccttcagcataatgcccggtttaaggctggcggaattggcgcccgaatgccagtcgataacaacgttgtcaaccacgccggtggtttcgtcgacgcgttcttcaagcgaaatgttgttgatcaggtcaacccattcgacacggccggctttttcggtaatgaccggaatcgtaaacggatcccattcggcaaccttctgacctttcttgaccttggcgccttcggctaccagaatcttggtgccgtaaggaactttgtggcgggatttttcccgttcgctgccgtcaacgattacgatttcgcagttgcgcgacaatacgatcatatggccttcggagttggtaaccgtatggttgttttcaagtttcagaacaccggcaaacggtacttcgaccgtcgactgttcggccgatttggaggccgcaccgccgatgtggaaggttctcatcgtcagctgggtacccggttcaccgatcgactgagcggcaataacaccgaccgcttcaccgatattgaccggcgtaccgcgggccagatcgcgtccgtagcaggcggcgcagacgccgtttttgcattcgcaggtcagaaccgaacggatcttaacctgttcgacgccggctttttcaaccacatcaacatcgtcttcggtaatcagcttacccttcttaaccagcacttcaccggtttccggatgaacgatatcttcctgaatggtacggccgagaatacgctcgccgatggaaacgatgacattaccgccgtcaacgaccggacgaacgataatgccgcgttcggtaccgcaatcctgttcggtaacaaccacatcctgagcaacgtctaccagacgacgggtcagataaccggagtttgcggtcttcagagcggtatcggccagacctttacgggcaccgtgggtggagttgaagtactcaagcaccgtcagaccttctttaaagttggaaataatcggctgttcgataatttcgcccgaaggtttcgccatcaaaccgcgcataccggcaacctgacgcatctgcgcggcagaaccgcgggcgccggagtgagccatcatgtaaaccgagttgatatagccgttttcggtcttggaaatgtttttcatcatttcgtcggccactttgtcggtacaggctgcccagatatcgataaccttgttgtacttttcgcctttggtaatcagaccgttctggtactgctgttcaaattccttaacctgtttttcggtctcggcaaccagttccttcttggcttccggcacgataaggtcgtccttgccgaacgaaatgccggccttgcaggcgttctggaaaccgagcgacatcagacggtcaacgaacataaccgtttccttctgtccgcagtggcggtagatgatatcgataatttcgccgatttccttctttttgaccagtcgattgacaagcgagaacggaacgtccttgtgctgcggcagaatttccgctaccatcaaacgtcccggagtggtgtcaaccagaccgtatttggcttcaccgttgtcgtcgatgtagctgatgcggcacttgatcttgctgtgcagatcaaccgctttggcatccaacgccagcagcacttcgttataatcggcaaaaatcgagccttcgcctttcaaaccgtcggcatcataggtcaggtaataaatacccagaaccatatcctgagtcggcacgataatcggcttgcccgaggccggcgacagaatattgttggtggacatcatcagaacgcgggcttccagctgggcttccaccgacagcggaacgtgaaccgccatttggtcaccgtcgaagtcggcgttaaaagcggtacataccaacggatgcagatggatggccttaccttcgaccagaaccggctcaaaagcctgaatacccagtcggtgcagggtcggcgcacggttcaagagaaccggatgttcgcggatcacttcttccagaatgtcccaaacttccggacgttctttttcaaccatgcgtttggccgctttgatggtcgtagcatgtccgtacagttccagcttggcgtaaacgaacggcttgaacagttccagcgccatcttcttcggcagaccgcactgctgcagtctcagttccggaccgacggtaataaccgaacggccggaatagtcgacgcgcttgccgagcaggttctgacggaaacgtccctgtttacccttcagcatgtcggacaaagatttcagcggacgcttgttggtaccggtaatggcacgcgaacggcggccgttgtcaaacagagcgtcaaccgattcctgcagcatgcgtttttcgttgcggatgataatgtccggcgcatgcagttcaagcaaacgtttcaaacggttgttgcggttgatcacgcggcggtacaaatcgtttaagtcggaagtggcaaaacggccgccgtcaagcggaaccagcggacgcagttccggcggaataaccggcagcacgtctaagatcatccattccggcttggtgctcgagttcaggaacgcctcaataatcttcaagcgcttaaccagctttttgcgtttggcttccgaagcgttgtccttcagttcggcgcggatcgcttttctttccgcttccaaatcgatcgaagcaagaatttccttgatcgcttcggcgccgatgccggcacggaaagaatcttcaccgtattcgtcaatcgcttcctgatactgctcttccgacagcatttcatacatggaaagcggggtcagtcccggttcgatcacaatgtagctttcaaagtagagaacgcgctcaagcgacttgacgctgatgtcggtcagcatcgaaatacggctcggcagcgacttcaaaaaccagatgtgggcaaccggcgcggccagttcaatgtgtcccattctctcgcggcgaacgctggagagggtaacttccacaccgcacttttcgcagacgatgccgcggtatttcattctcttgtatttgccgcacaaacattcgtaatctttgaccggtccgaaaatgcgggcacagaacaagccgtctctttccggtttgaaagtacgatagttgatggtctcgggctttttgacttcgccgtaagaccaggaacggatttgctcaggagaggcaatggagattttgatttcatcaaaagaatctccgttggccggctgctgaccaaaaaatttcataatttcattcatattttttatctccaattctaaacggcttcgttctgcaattcgatgttcaggcacagggatttgatttccttaaccaaaacgttgaaggattccggcgcaccggcttcaaaaccttcttcgccgcggacaatcgcttcataaaccttggttctgccgttgacgtcatcggacttgacggtcatcatttcctgcagagtgtaggctgcgccgtatgcctgcagagcccaaacttccatttcgccgaaacgttgtccgccgaactgagccttaccgccgagcggctgctgagtaaccagagagtacggtccgaccgaacgcgcgtgcatcttctcgtcgacgatgtggtgcagcttgatcatgtaaatgatgccgaccgttaccttgcggtcaaatttctcgccggtgcggccgtcataaagatcaatctggccggaagtcggcagacccgccatcgacagcatgcggttgatgtcttcctcatgcgcgccgtcaaagaccggggttgccatcggaatgccgtttttgacgtttttgatcatctcgaccttttcttccgtcgtcagatcggcaatctcgcgtttatactgcttctcgccgtagatttccttcagcttgttattcagttcctccagcgttttttcgccgcgtttgtactgttcgcacatctcgttcaactgcttgccgagttctttggccgcccagccgaggtgcgtttcgagaatttgtccgacgttcatacgggaaggcacgcccaacgggttcagtacaatgtcaaccggggtgccgtcttcggtataaggcatatcctcaagcggcagtacgcgggaaaccgtacctttgttaccgtgacggccggccattttatcaccggtctgcatcttacgcttggtggcgataaagactttgaccgtcttcaaaacgccgggcaagagatcgtcgccgcgctgaactttttccaccttgtcgtcgaagtgcttctgcacgccggcaacacgggcatcaaaggccgccgcgaattcttcgatccgggccatgacttcttcgtctttgaccacgatcttacgccactgcgaagacggaacgtcggcaaaagattcttccgtcagaaccgacttcttggcaatgcccttcggcgcatcgataaccgtctggccgatcagcatttcctttaagcgggcgtcaaacactttgcggataatcgcgatttcgtcgtcgcggtcttttgccagctgggaaatttcctgctgttcgatcgccagcgcacgttcgtctttttcgacgccacggcgggagaagacatgaacgtcaacgacgataccttcaatacccggctgaacacgcagcgaagtatcgcgcacgtcggaagctttctcgccgaaaatggcgcgcagcagtttttcttccggtgtaaccggagattcgcccttcggcgtaaccttgccgaccagaatgtcgccggccttgacttcggcgccgatgtaaacgataccggcttcgtcaaggtttcgcagcgcttcttcgcccacgttcggaatgtcgcgggtgatttcttcctggccgagcttggtatcgcgggccattacttcaaattcctcgatatgcagcgaggtcagaacgtcatcgcgggaaacacgctcggaaagcaaaatcgcgtcttcgtagttcagaccgttccacggcataaaggcaaccaacatgtttttgccgagagccagttcgcccatgtcggtacacggaccgtcggccatgatgtcgccggccttgaccacgtcgccgaccttaaccagcggtacctggttgatgcaggtgttctggttggaacgacggaacttcgacagcttgtaaatttcgacgccgacgccgtccgaatttttgttcatcgaacgaaccacgatacggttggcatcaaccgcgtcaaccacaccgtcatacttgcagacgaccgttgcaccggaatctttggcaacggtggcttccataccggtaccgaccagcggggcttccgaacgcagcagaggtacgccctgacgctgcatgttcgatcccatcaaagcacggttcgcgtcgtcgttttccaggaacggaataagcgcggtcgcaaccgataccagctgtttcggcgaaacgtcgatgaagttgatgtcttccggcgcatggaattcaaattcgccggctttgcggcaggcaatggtatctttgacgaaagtgccgtcgtcgcggacttcggcgttggcttccgcaatgatgtacttgccttcctgatcggccgacagataaaccacttcgtcggttaccctgccgttaacgatcttgcggtatgggcattcgataaagccgtatttgttgatgcgggcgtaagtcgacagcgagttaatcagaccgatgttcgggccttccggcgtttcaatcgggcagatacggccgtagtgggtcgggtgcacgtcgcggacttcaaaaccggcgcgatcacgggacaaaccgccggggcccaaagccgacagacggcgcttgtgggtaatttccgacaacgggttgttctgatccataaactgtgacaattgcgaagaaccgaagaactcgcggatcaccgaagcaatcggcttggcgttgaccagatcctgcggcttgacattgttcaaaacttccgaactcattctttcgcggatggctctttccatacgcaacaagcccatgcggtactggttttccatcagttcgccgaccgagcggacgcggcggttgcccaggtggtcgatatcgtcgacttcgccgtggccgtcacgcagttcgaccagacgtttgacaatgcgcaggatatcgtctttgcgcagcgtgcgataagtatccggtgcttcttcaaacggaatgtccagcgcggtgttcatctttacgcggccgaccgaagacaggtcatagcgctcgttgtcgaagaacagcgatttgaacagggcgtcggcagtttcgtatgtaggcggttcgcccggacgcataacgcgatagatgtcaagcagggcatcttcccggctgtggttcttgtccacttccaaagtgttgcggatataaggcccgacattgacgttgtcgatataaagaaccttgatttcgttgattttggcttccttgatcttgtccagcagttcctggttgatctcggcgccggcatcggcgacgacttcgccggtctttttctcgaccagagcggtagccaggaattttccgagcagctggtcttcggccacgcggtagaattccagtccttcgtcaaccagcttctgggcggcgcgggccgggatcttcttgccggcttcccaaaccgtttttccgctttcggcgtcaatcaggtcaaaagcaaacttaaccccgcggaaacgttcgggtacgaatttgctcttccagccttttttgtcggcaacataggtgtcgacatcgtaaaagtagctgaggatctcttccttgtccattcctttgatttcggaacggtcgattttctttccttcttttgccagctctttcagtttttcttcggtttccttggaataaagggaataaaggatcgaagtaaccggcaacttgcggcggcggtcaatgcgggcataaagcagatctttggcgtcaaattcaaaatccagccacgaaccgcggtacggaataacccgggcggcaaacagatatttgccggaagcaaccgttttgcctttgtcgttgtcaaagaaaacgcccggcgaacggtgcatctgcgaaacgacgacacgctcggtaccgttgacgataaaggtacctttgtccgtcatcagcggaatatcgcccatataaacgtcctgttccttgatgtcgtggatcgaacgggagccggtggcctcgtcaacgtcccagacaaccagacgcagcgtggctttgaccggcgcggcataggtcatgtcgcgtttgatgcattcgtcaacgtcatacttcggctcttcgagttcatatctgacaaactcaagttcgccggttccggaaaagtctttaatggggaaaatggatttgaaaacttcttccaaaccgaattcgcaatttttgttttcgatgaaatcgcggtatgatccggtctgcacttcaatcaaactcggcatttccgacacggagtcgattctgccgaaattctttcttacacgtcttttgctcgtataagattctttcattttgcgtgattcctcatggttataattctgcgacaatgctatcaattacgcttgaatcccgaccgcagaaggttaaaaatgcttttttaaaaacgaaaaacctcaccaaaccctcggggagcaggcccctcttgatgagacggtaaaataattgcatgcaatcgccgcgattcgcggcttaaattcagggcggataatgactcacatttacgcttctggcaagcaaaaaatgcagcttcggacaaactttttctgtccttcccggccgcttcgcaaaaaagcccttctccggccgcatctgcttcgctttccgccggcgccgacgcggatcttgacaaaaaaacggtttcggactatcttaaaacaagttaaaaaattaaattaaacatattatggaaattatcacttatgctctcggtatcgcgtttataatcatgacggcagcttttgctctctggcattacaaatgggaatacgacagaaacttcaagggcaaaaaattgctggaaagaattgtcggcagtgtttcggtatgtgtcttcatatccctgacaatatgggtttcggaagaaacctcggcatttctttcaattttgctgggacttgtcgcagcaatgggatttgtcgctttttgtttcataatgggagctgttttttctcttcccgcaaggctgagatgaaataaaaaaatacggtttttcggtttgccggaaagccgtttttttgtttttcctccttttcgcataccgaccttttcatctttgcccgccgccgaaacgacaaccggatacatacagccgcctacagaaaagattcgccggaatccgtgaggcttacgaaatatcaattggtccgaaaaaacgaaaaaaacatgatcagacataccgtaaaacttccgatgccggccgtttttcatcggcataaagccgcaatacccggttcaaaatatcatcgggcaacagactgtccgcgtctttccgccccgccgccaactcggccggcggcgcccgttcgatcactttcggcggcggccgtccgcatcatcaaaacgccggctcctaatttctgtctgacggttgcacagcttttgacaaccggcttttgtccggcaaaacaaaaaactccccgccaaaacggggagtcttcaaaaaggcaatcgaattaaaaaaattacttcaattcaaccttggcgccggcagcttcaagtttcttcttgatttcttcggcttcagccttcggagcgctttccttgatcgtcttcggagcgccgtcgaccagatccttggcttctttcagaccaagctgggtaatggttctgatttctttaatgacgttgatcttgttgtcaccggcagctaccagaacgatttcgaactcgtctttttcttcttcggcggcagcagcggcaccaccggcggctacggctacggcagcagcggcggaaacgccccatttttcttccagcattttggaaagatcagcagcttccataacggtcagggctgacaattcatcgactaatttggctaaatcggccattttttttctccataaataaaattaaatcttttaaagttaaaaaccacaaacaagcgacagcttaggctgccatgtctttttccgagtaagctttggtaacccgggccagctgagcggccggagcctgcagcagaccgataatcttggcgcgcagctcgtcgaccgacggaatgcttgccagacgcttgatttcgtcaacggagagaacgcccgttcccattgcgccgccgacgataaccagtttttcgttaccttttgcaaattcgacacaagctttgcaggcagagatcgggtcattcgcaaaagcaattgcggtcggaccggtaaactgatctgccagatcggcaaacttggtgtctttcagagccagacgagtgatgcggtttttcgttaccttgaacccggcaccggctttgcggatgttgtttctcagttcggaaacttcggctacggtcagccctttgtagtgggaaatgaccacaacttcggaatcttcaaacaactgcttgagttcattcagtaattgtgctttttcgtcacgattcacttttctatctccaacaaaacatctcataaattcaagatgtcatattttacaatttcgcccttccgcggcaaaccgcggcggcgaggttaatctgtccgggagaaaaaaacgattataaaatcttattactccgtctgcgtaggaaattaaggcccggcagcaaattgaacacgccgccgttacggaccgcctacggtcttggacaggcagaacggcgctttccgcgcctttctcaggactgcttgataaactcttacgcattaaatgtcaagcataattttcctttttcatcgacaaaaacgtcttttgtttcaccggccggcctttttccggccgatacgccgtttgcggcagaccgacagcggaaacggcttattttcataaaaaaaacctgcgtttttcaacgcaggttttcaattgtcggcaaaccttacagattcgcaagatctacatgcacaccggcacccatggtggagctgatcgaaatctttttcagataagttcctttggcgcccgacggcttggctttgatgacggcgtcgatcagagccttggcgttttcgtaaatcgcttcttcgctgaagctgactttgcccacgccggcatgaacgataccggtcttctcggcacgatactgaacttcaccggctttggctttcttaaccgccccggcaacatccatggtaaccgtacccagtttcgggttcggcatcaggcctttcggaccgagcacgcgggctacgcggccggccagccccatcatgtcgggagtggcaatacagcggtcaaattcgattttgcctgccaggatcgagtcgatcaggttttcggcaccgacgatatcggcaccggcggctttggcctcatcggctttttcgccctgagccaaaacggcgacgcgtacggttttgccagtaccgttgggcagcgagcagacgccgcggaccatctggtcggcatatttcggatcaacgccaagattgattgccagatcaacggtttcgtcgaatttggcatttgcattttcctttaccagcttgacggcgtctttcagcgaatacagcttagacttgtcaatggttttgtatgcattttcgattctttttcctgccattgtcttactccacaacctttacgcccatagatacggcctgacctttaaccatgttcatggcggcttcgaccgtcgaacagttcagatccggcattttggcttcggcaatttccttgacctgagccatcgtaatctgaccggcaacgactttgcccggctctttcgaagcggacttgatcttggcggcctgtttgatgtagtaggctaccggcggcagcttggtgatgaaggtgaaggacttgtcttcgtaagcggtgatgacgaccggcaccggaatgcccggttccatcttctgggtcgccgcgttaaacgctttgcagaattccataatgttcaagcctttctggcccagagccggaccgaccggaggagaagggttggcctttcccgcggggatttgcagcttgatcaatcctaaaattttctttttagattttacagccatttcaatacctcactttagggtttgtggtaagattatggctaatctcccacaaattgtgataaacaaacgaaccctgccgccgaaacttccggccgcaggttcgccatctgtatatcacaaacgattcaatttgcaagcattttttgctttgctttaatttatttttattttcagcagcgcccggcactgttcatccattttgcgttcgacgttgacatagtttttgacaatgtcgtcaatcgtttcatcggtaaccgtcgttttgcgcaaatctatcgtttccggcgcttcttcgggattttcgtaataaacggaatagtagtcgtcaaatttcagatcaccgccgataatttcgtccgacagcacgatccgccggttgggaatgccgagcgcatcggcaaagatcagtccgtgcagcgaagacgacaaaatgcatttgcacgacagcatatcccgcgcaacctgtatcggcgtgtcttccacccggatgattttgatcccggacgctttaatgttgttcagacattcggaattcctgtcataataatgcggaatcacgccgacccggtcgcccggaagcacccggcttttgtcaaccatctttcgcagcagcaccgccggatcggccagcaccacgctctttttaaccggaatcagctcttttaacttttccagcgacagttttcctctcaaggcgtgtacgcgcaccctggcggcaaagtcttccggcattctgacttctctttgcatgcccgttcccataacgtcaagcgtctttccgttctcgtgcctgacttcaaacaaccgcgacaaaaggctgcccacgcaccacaggtccgcctctttccagccgggtacaacgcaccagcggaaaacataacgggcaacgtacaggttaaacatgtcgccgaaattgggaaatccggtccagcaggcgattttgcgttttttcacttttttgccgaagtttttatgcttcagcatatacctgcatttcagacgcgcaaagccccttccaatataccccctcccggtatattcaaggatcgcctgcacaaaacggcagccgttacgggcggcaaaattacggacagctgccaactgtcggccgtcatactttttgcgattgcggtaaacccggtaaaaaagggcatcatatttcttcagcagcgcttccctgtattccggcagataacgcaggttcatttccccaccgagcgcaccgtaaaggtctttgaccggcaggctttcgccctgataaattccgtcttcgctcatctggtacatatacatcgtttccggcagacaggccagccggccgaatttcatcatatacatcgtcagcgtcgtatcgttgacaaaattgtgagggaaatcatgcggaaaactaaaataaaagatattgcggaaaataatcgaaccgttatggatataacgtcccgaccgtatatacctctcgggagtaaaaaattccgtctcttcgcaaatgcgggcttctttcatcacccgttcgttggtataaaaaacatgcccgcacccgcagccgatgcactcgggatgctcggccaaaacatccatctgcttctgaaacttccggtcgtcgccgtaaaaatcgtcgccgtccaaaacggaaaagaactccccttccgccttttccagcagcgagttgcggttaagcgaagccttttctatgccgatcgtgtccatgccggcgaaagacattttataaagccggataaaatcatgtttatccgtatattcgcggatgatttcctcgctgccgtcgtaaacgccgtcaagcccgatgagaacttcaaagtcaaaattcgttttttgcgccagaatactgtccaaagcgcgttttatgtattgccgctggttgcagaacgtcaccagcacggatagtttaaccatagtcgctccatttagtatacaacgaaaagatacaaaaaagaccgcccggcggcaaacaaaatttttcttttataacaaaaaaatcattcgttacgaatttacaatcacggttgacaaaaaacgccttccggcatattctgaccgtacggttgaattatttttgctaactttaaaatctttttggtatgaaaacggagaaaataacttactgcgttgccgaaggggaaaccctcaacatcttcgcctcttcgctggcagcgctttccctgcgcggaaaaaccattatcgcaaaatttcagggaaccgtgatgtacatctccccgggctcgacgcaaacggaaatactgaaccgtttcgcccatgcggaatacaatgccgccgccatgcagctgaccggcaatttgtaaaccgccccgcttttaagcaaaaacgccgccgtcttttcgaccgcggcgttttttgtaacaagcccccgaccgagccggcagtttcaaaatgcttaaagctttacggataaaaagctcctttgccaaaataagttaaacggtccggcaaaagtccaacaaaagcaaagaagttttttatgaacgcacatacaatggcacacacgacataaaaccccaaaataccatgtcgtctttgcgccaaaatatcacagacaagccttttacggagacgtcatccggaaacagggcatactttagcagatggaaagaaataggcgtaatagaaacagagttttgtcctgactatgttcatatgttaacagagataccgcctgaattttcagcaagttcggtcatggactatctcaaaggcaaaaacagttcagccatatatgaacggtgggggaaatgcacgtcgaggatacatgcagacacaacagaaaaaatactcaaaaaaattacaaagcctatccgaaatcaactgaaaaaaacgcggggcaaagtcaattaacaacggatttttacccgtttacggtgaaccaagcaatcttcgccctgtcagatcatcatacgcctttaagacatttgccggcacatcaggtttacacccgcatacgaagaaccaccggccgggacgcggcgctttttcaacggttatgcgccttgccctgatccgataagctcaggcctccgaccgggtcttgggctttctccccctcttttttgccgccggcgcacccgcaaccggcgccggggcttccgccgacaggggctttcgccctcttttcttcgccgacggcacaacttccagttccgaagtgcaatgcggacagcgaatcgccgccaacggaatctgctcgcagcaataagggcattccctggtcgtcggcgacgccgcttcttccttgctgtccagcgtgctctgaactttgttgatgcctttaatcagcaaaaacacggcaaaagcgacaatggtaaaactgatgaccgcattcagaaaattgccgacgttcagcgtagtggcaccggcctgagccgcctgcgccagcgaggcgtaagcgccgtgatgccccggcacgtctttcaacacgaaaaacaggttggaaaaatccatactgccgatcagaagcccgatcggcggcatgataatgtctttgaccagcgagtcgacaatcttgccgaaagcggcgccgataatgataccgacagccatgtctatcacgttgccgcgcatggcaaattttttaaattcgttaaaaaaagacctcaacataacgattctcccgctgtttacccttcatctttcatccgcggcaaaaacaaattccgcctttcgttttctctccgccggaatacgccgacggcgccgcaggcctcttttttggtttccgcggcataagaaagccgcctttcaggcggctcttaacatattcttttcagctgactttttcaacctgattaaattccagttcgaccggagttgaacgcccgaaaatcgaaaccgaaagcttcagccgcgacttttcggcgtcaacgtcttcaaccaagccgataaacgaagcgaacggtccgtcgcagacgcgaacctgctcgccgatctcgaaattgaccaccgtttgcggccgctcaacgccttcttcaatctgcctgatgatacgattggcctcggcatcggaaatcgcctgcggcttgttgcgcgcaccgagaaaaccggtcacccgcggcgtgtttttaacaacgtgccaactgtcgtccgacatttccattttcaccagtacgtaaccgggaaagaacttgcgttcggaattgactctggagccttttttaatttcaacgatattttcggtcggaaccatcacttccagaattttatcttccatgtttttcagaaccgcctgttcgcgcagcgattcggcaacctttttttccgaaccggaataaacgtgtacaacgtaccaatgagcagccattgccaactttctcctaaccaaaaatcaatttaacgataaagccgaacacctggtcgacgcagaagaaaaaggcagcggcgatcgccaccagaatcaacaccatgatcgaagtttgaaccacttctttcctggtcggccacgtaactttcttaacttcctgttttacctgtctgaaaaacagaaccggactaacttttgccatcaacttcatccaatcatttaaaactgttgtttatctcatgagaagacagaacgccgcttgagccgttccggtccgttcctccgggaaacccggcaaccgacgaatactgcctgatttttcagcaacataaactattacttaaaagattgcaacaccttttttcaaaaagtccccgcgctttcggccggacgaaagcttccccgtttgccggctcatccgccgctgccgccgaaaccgtccgcccgcaacggccgccgcaccgtcatccgcggccgttcagtctttttcgtcacctttttcctcccggcaaatccgcacaacattaaacaatgcggcaataaccaaaaacgccgccaacgcccaatccggccagtgccaatacccgccgaaataccatgcccgttttatatttacgtaaaaaacaaacccggccgcaccgcagacaagcgtcagccaaaacaagccgataaccgttgaaacataatcggccgtacgttttcccttttttcttttttcaatcgccattttgttttatcgtttctcaacccatcaacattttatcatttctcaatccaccaatattagtatactgccaaactctccgcaagacaagataaaagcatactgacgccaaacgcccctgttctcctttgctgccggcaaaatccccatcgctgacgccaaacgcccctgctctccttcgccgccggcaaaatccccatcgctgacaaaaatacaaaaaaacacttgatttatttccgattgttgtgtatgaaaggaaacgcagttataaatgactgtcacataggggtatagctcagttggtagagcatcggtctccaaaaccgagggtcgtgagttcgaatcttactgcccctgccactcaaggcaaaggcgctgaaaagcgtcttttttctttataaatcaatagcttaactgagtccgtgcaaggcattatcaaagaggctgttttccgcttgttacacggaccatcccatataaaattctttattttacaagcatttaaaataattttgaagtaatgtacttgagaagaaaataaacgaattttttatttaataattataagattggtacaagtaaattttattctttaactttatgtttttagatataaaatactttttgtgattaatatttctaggataattggatgaaacctatattaacgataaaagagttgatttatgaggcaaagatattttgtgaaaaaatgtctacagaaaatcatatatgtttaataggaattacagatggtaaagcggttggaacatatgttgaacataaatttcaaacatatttatctaataaatatactatagatattgggtgtagtgcaaagggtatcgatttaccaggagagaatatattaactgatataaaggttacatcaataactcagcctcaatcgagttgcccgtttagcaatgcccgacaaaaaatatatggattgggttataatttgttggtttttgtttatgataaaaaagatagcatagattcgtgtgcgcttcattttgtatattgtacttttattcataaatcaagaaccgcggattttacaattacgactagattaagagaaatgataaaagatggtgctaacaaggaagatattatcgcttttattcaggatagaaatgtaccaggagatgaaattacctataataacttagcagatgagattataagaaatgttccacagcaaggatatttgactattagtaatgcattacaatggagattacaatatagtagagtcatttccttaaaaaataaagttcagggtgtcgtaaattatgagtggtaaacgtgaatttggtgattatcaaacccccgtaaattttgcggaaaaggtttgtttatatttaaagagcaattataaaatcaaccctacaatagttatggaaccaacatgtggacaaggaaattttttaaaaagcagtttgttattcaatgctgaaaaatattatgggatagaaattaatcctgtatattgccaatattgtagggacaatattcgtgatagcagagtgaagataattaattctaactattttgagtattcgtataaggaaatatttcagaataaatctgaggtattagtaataggaaatcctccatgggttacaagcagcactttatcaaccttatcgtctaataatttaccaactaaatttaatataaagaattttaaaggattagaagcagttacaggagcgagcaattttgatatttgtgaatatatcatattacatttaattaacaatcataaaaatacgaatacattaattgcaatgctttgtaagatgtctgttgctagaaatatattcaaagaattgaatagaaaaaatattaatttttgtttttgtgatattattgaatttgatgcaaaagaggtttttaatgtcaatactagcgcatgtatattggtgcttcaattatctgaagtattaggttgtaaagcgcctatatgtaatgtctatcacattgattcggaaagaaaattcaaatcgcgattgtattatttaaatggtaatatttgttatgacaataaaacgcaatctgtttttgatggaaaatcttgtttggaatggaggcagggtataaaacatgattgttcaaaagttatggagttaatacggcaaaataatattttgttgaatttagaaaaagaaattgtagatatcgaagatgatatggtatttccgttaattaaaagtagtatgtttaaaatgccagttattaataaattttcaaaatatgttattgtaactcaaaaaagagttagagaagaaactaaaagtattaaaaattattatcctagaacgtgggattatttatatcagcatatagatttatttgagcggagaaaaagttcgatatataaaggagctccattattttcaatgtttggagtgggagattattcgtattctcagtttaaagttggtataagtggtttttataaatctcctttattttctatattatattctgatgataaaaaaccagtaatgttggatgatacttgttattttatttcttttgaaaactacaacttagcatatgttgctatgttactgttgaattctaacgctgtgcaaacctttttgaaaaatattgcttttttagattccaaaaggccttatacaaaaaaagttttagaaaggatagattttagtaaaattgttagtgaattaacatattttgatttaaaaaacacagagaaatctttgcaattgtctcattatataacagaaaaagattatgaaacatttaagcagatgatagcagaaaaacagaataatcttttaatttgattattataaatagtccgtggattgtcttactgcccctgccaaggaaaaccaagggtttgcgagaaattgcaagcccttttattctgacttttttatgcaaaacacacgcacacagaatcaaacagttagcaaacctagtcagaatggaaattacagaacaagactagaataaataccgagtccttattttgcgttttgtctattgttttccaaaataatccggtctatttttacctgtttttctatccgttccctgattgtcgatacaacgcaggcggtattccgaataatcttcacgcagactatcgacaaagtcgataaatttatcctgcggggcgtaggttattgtcgggcaacgttcctgctgctttaaggccaaccgattggcatattgccggttttggtttaatataccgaccgtattgccggcaccgataaccccgtatccgagtgcatttttgaaatctccgccggtcaggacaacccccaaacctgcaccgaagccgccccaaagcgtacgccctgcatttgaatcggcaaagtttttgaaacgcccccttgcgcttttcggacggttctgctgtttttgccgcgcggctgcttccaccatccgcaaaacattgtctaccggcgtcggatcgttgacgtctccggtttcggcaattctgtacattctgcttaaatccatgagaaaaaactccataaaaaaaagccctgaaccccaatgggcgcaaggcttgacacagtattacttttgacttataaaagaaaagtccgttgctggaacaacggacaaattctcaaacctaaggggttaacctcagcttaacttccttatgaattaagaatactttattttaacttgcaagtcaagttataaataaacgaggttttcccctttcattttacgaaaggaaagattatgagaataaaaattattctgataattcggaaaatccgatttttcctgtcaataaaacgataggaaaagcaaaggacggagaaatccgccctttgttattacttaagcgcccagttggtcaaaggtccgcaatcacggcgaccgaaacgatttcgtcaggctgcgacaccatgccgttgacccccgttccgcgcttgatcatatccacatattccatgccggaaaccacttctccccaaaccgtatactgtccgttgagccacggcgcttcggcaaaacaaataaaaaactgactgtcggcggaatccggatccatcgcgcgagccatcgaaaccgtgccgcgcagatgaggccgacggttaaattcggctttcagttttttgccgctgccgccggttccggtgccgaaaggacaaccggtctgcgccataaaaccgtcgatcacgcgatgaaatttcaacccgttgtaaaatcccgcgcgcaccagttccttgatccgcgccacatggttcggcgcatcgtcggaaaacatctcaatcaccacgtcgccgtttttcagtttaagcagcaacgcgttctccgcgtctttaacctgatattttgccttttctttcttggccctcgccgggcttttggtcagctttttggtgtcggcggatttcaaccctttggtttcggccttgccgagcctggcggtttcggcgttcttcagcaattttgccatcttaaattctccttaaatttgtcatctgttacatatatagggatcggatcattcgatagcaagcggctgttttaaaacaaaatccacacgctcggcatagttcagcccgcggggataatgcttgcggatttttttcagcaaatcgcgcattccccgtccgttggcgatttgaattgccagccccggccgcgcattcagctccagcatcatcggcccccggtacttgtccaacacaatgtccgcccccagatagccgagaccggtcatttcatatcctttggcggcaatttccagatgttcacgccaaaacggcacctgcagttccatcaggtcggcgccggtatcgggatgataacggatcggccggtcatgggaaaccgccgccaccgcatgcccggttctgacgtcgataccgacgcccaccgccccctggtgcagattggcgcggccgccggactctttggttgccagcctcatcatcgacagagccggaaagccctgataaacgatcacccgcacgtcgggaatcccctgatagctgaaatcctgaaactggttggagaaatgcaccatttcctcaagcaccgctacgtcatacttgccgccgagggaataaagcccgctcaagatgttggaaatatgctgatacacttcgttataagtcagaaccttttccgaagcggtaacaaaacgctcggcatcatagcttttaaccaccagcacgcctttgccgccgctgccgtgcgccggcttgatgacgaattcgttatagccctcgaccagcgacaaaaaattgtccacctcgttttgcacgtcgatcacgccgatcagatgcggcgtattgatgccgacgccggccgccagctttttggtctgtaccttgtcgtccaccagcggataaaggcggcggtcgttgcttttggcaataatctcataattacggcggttcatgcccagcactccggcctccctcagctgcgcgggcgtggcaaaacgtttcagaaaatcaaacatgtttcccgtcctttttcgccagcggggcaaacctggtcagttcggtcaggcggtatccggtataggttccgagcagcataaccacaaacaaaatgaccagattgaactcgttaaaggcaaacatgatgtgccgaatgtcctcgttgacgatcacaaaataggtaatcaccgccaccagcacgctgtatatgatttccttggtcgcatttgccgcaccgtcctcttcccaggtaatcgaggcacgttcaataatccaggccatgatgatgatcgggaagaacagtgccgacgaggcgatttcccatttccactgataaccgacgattgccagcgcctgcatgatcagaattacgaaaatgacgaccgccgaaatccgcggcaccagaagcagattaagctttgacagccccgcccggatcagcagcccgacgccgaggataaccgaaaagcagatcagccccggccaaaaaccggtcttgaccagcgacatggcaatcagcatcggggtaaaggttcccatcgtctgaatgccgaccacattgcgcatcagcaccaccaccagaatggccagcggaaaaatcatcagccacttcagcgtgttctgttcattgagcggcagattgtaaatcgaatagtcaaaccagcttttgctgtgcgaaagctcggcccggtgaccggccatgcggaacgacgaacggatcgatttcatcaccgaaaacttggttgtggaatcagagccgccttccacgtcaaccagcgactgattgccgcgctgaaaaacgataaaatcgctcggcagtccctttttgccgctctccaggttataaatcttccacattccgtcgacataagcctcaagcatcacgtccggcaccagcgtttttttgccttccgacagtttgatgccgcgcgccattcgcgccggaacatcctttagcgccagaaggtcaatcaccgcctgcgcggtggccttggcggttctcggcgcgggcacgaaagactgcaccgtttcgtccggcgggttttggttaaacagggcaatcacctgctgaatcccgtcaccggactgctgcccggacatttccagcagctggcgggccaaaacggccgtctgttcgtccataatcggcttttgcggctttcccggtttttccgccttcgttttgccgcggctgtcgacgttgtcatacaaaagcacccggtaataaatgtcctgcagcttgtgccgcggcttggaagtcagctctatccggtccgtttccttttctatcttgtacttcggcgcgacgatgtcttcgtccaaaattttgaaaccggcggtagacagcggccgcgccatcgaaatgcggatgttttcgccgttcggcacaaaactgac

SEQ ID NO: 283 - DNA, 9739 bp, unidentified
  source 1..9739: mol_type = unassigned DNA
atgaaaaatattctgatgaacgaaaacaatatcgggatcataaaattatatgagaaaaaggagatttcaattatgtgtggaattattggatttacaggtaaattaaaagcccaggatgtcttattgacaggacttgcaagccttgagtaccgtggatatgacagtgcgggaattgcatactttaaagataccggaaaaatttcacttcggaaaactgtcggaaaagtaaaagatcttcgtgccatctgcgatgatgataacaattctacgtgtggaatcggccacacccgctgggcaacccatggtggcgttaccaatgccaatgcacaccctcataaggtcggacaggttgcattgatccacaatggtatcatcgagaactatcatgatctcgccaccaaatatgatctgacggatgaactgatttccgagacggataccgaagttgccgccgcattgatcaataaactctacgaaggagatccaaaagaagctctgcgcaaagcagtagccgaaattgaaggttcctttgccttctgcgttctgttcaaggatcatccgggtgaaatttatgcggtaagaaatgtcagccctatggttgcaacatactgtgatgacggtgcttttattgcatctgacctgactgcttttatcgcatacaacaagcgttatttcatcgtgccggaatatcatattttaactatgactgcggacggcattacgttagaagatttagacggtcattccgtagaaccggaatatatggaagtaaactgggatgttaccgcagcccagaaagatggttatccgcatttcatgatcaaagaaattcatgaacagccggctgccatcacaagaaccattaccccacgtatcaaagatatgcttccggatttttcggaagatgccattgcggattccttctttgaaaatgtaagcgacattacgatcgttgcctgtggtactgcaatgtacgcgggaatggtaggaaaaaccatgatccagaaccgcctgcatattccggttaccgtggcaatcgcatcggagttccgctatgaagaaccggtaatcaatgaaaaatccatggtgatcgttgtatcccagtccggagaaaccattgatactttggaagctcttcgccttgcaaataaatatacaaagaaaacactgtctattgtaaatgtaaaaggctccagcattgcacgtgaaagcagctatgtattatatacacatgccggtccggaaatcgctgttgcaagtacaaaagcatacaccgttcaggttgcttctttttacctgcttgcatgcaaacttgccatgacacagcaaaagatttctgtcgaagaggcacgtacatttgttggaacactgcaggaaattccaaattacatcgaggaagttctagcacaggctcctgatattgaacagctgaccaaacgcatgatcaatgccaacaacgcgttctttatcggtcgtggactcgattataccctttgtatggaaggtgctttgaaattaaaggaaatttcttatattcatgccgaagcctatgctgccggtgaattaaaacacggaaccattgccctggtcagtgaaggggttcctgtcattgccgctgctacccagaaacatgtatacagtaaagttatttccaatatccgagaagtaaaagcccgtggtgcttatgtcattcttttgtccaaagacaaagaaatcacagatccttctatctgtgatgtacacatcaatcttccggatgtatccgacgaatttacgatttttgaatctgttgtaattttccagctgattgcatattacacatccgttggaaaaggcttaaatccggatcagccacgtaacctggcaaaatctgtaacggtagaataaaaaaactgtcgcgcgaaaattcgtgcgacagtttttttgacatagagcctttctaaaacttttgaaggcaaaaaaagaaccccagaagctctctaaaagcctctgcggttgcccctgccaaggattctctcacccatgtaccggaatccttgtatcgtcggcgcgacaggatttgaacctgcgacctctgcgtcccgaacgcagcgctctaccaagctgagccacgcgccgtttcaactgcccaattatagtaacacattctccggtgtttgtctagtgaatttttttaatttatggtacaatacaaaaaaagaatggagaagaacaatgaaacatactgctttgattacaggtgcatcccgtggaatcggtgcagccctggcatgtcgatttgccgccgaaggctatcatctggctctttgctgccataactcttatgaaacgctgcaggcacttgccacaaaacttgaaacaacctgctccatacaggtgctttgcttccgtggtgatgtaggagactatacttttatctgtgacatggtgcaaaaaacactggataccttcggccagattgatgtgttaatcaacaatgccggcatctcttatatcggtctgctcaccgacatggatattaccgactggaatcagatagttgcgacaaacctcacatccgtcttttccacctgcagacaggtcatcccttccatggttcatgccaaatccggacatatcatcaatatttcttctgtatggggaaatgtcggagcttcctgcgaagttgcctattctgcatgcaaaggcgggatcaattcccttacacgcgctttgggcaaagaacttgcccccagcaatatccaggtaaatgccatcgcctgtggggtaatcgatacggatatgaaccgttgtttctccgaggaagaacgctctgcactcatcgaagaaattcctgccggccggatgggatccccggaagaagttgcttcactggcatattctcttgccacagcaagcagttacctgaatggacagattctcaccttagacggcggatggatttaatttcttatctttttggaaatctttttccatttatttaagaattaaaacgcgatacgcgttttctctgttttttatatcaactttctataaaatcatttgtatgaaaacgaatgataaaaataaatacaaagattttggtgaccatctgagtctgattatgtataaacaaaatatttccaatatccagctggcaaatgcaatgtttgtttcgccgtccacgatcagcggataccgtaccggccgtcgttctccgaccgttgcggatcttgcagccatcgtgcagattctgaatgtttctgcagattacctcatcggaaccagtgaaattacaaaaagacccgataccaccgaaaaaaagagttgagcacgccctgtttccagagcggtgctcaactcttttttataaatcatgttctgccagtaaaattaccgtagaacgttccggaacacgcacacgtgtctgatctccctgtgtctgggcttcaaaatctgccccatcctggtattcacagaaagtatttactacaagtttccaatgataagactccggcaacgaaggcaggcgcatctccaaaggctcccaatacgcattcattccgtaaaagatcatatcatcatccgtatcatcggcatttcttcccgcatacatgattccaattaaatgtgtattatagtccgtataattccggttcggctctccattatggatacttacggaaggtaacccgcagactgccggctttgtatcccttcgcagaatcggatgctttgcacggaaatggatcataaaacgggcaaaatcatgaatctcctgaaattcttccagtctgttccagtccagccaggaaataatattatcctggcagtatgcgttgttatttccatactgcgtattacaaaattcatcccctgcaaaaaacatagccggtccacggctgcataacaacgcggcaaatgcattttttacaagcctgcgccgcaggcccataaccgccggatcatccgtctcaccctctgccccacagttccagctcatgccgttgttatccccgtccgtattgttccatccgtttttctcattatgcttttcattatatgaatacagatcatacaacgtgaacccatcatgacaggtcagaaaattgacggatgcactatatccgcggcttgccggatcatacatgtcggaggatccggtgatacgtgtaattgcacgccctgctacgccactgtcgccctttaaaaagcttctcatatcatcacggtatcttccgttccattcggcccagcggttccaggacgggaaacttccaacctgatacaagccacccgcatcccaggcttctgcgatcaacttcatatcccccagaatagagtcaaatgcaagggcttccagaatcggcggattctccatcggtgcaccattctgatctcttcccagaatcgatgccagatcaaaccggaatccatccacccggtactctactgcccagtgccgcagacagtccgtaataaacctccgtaccaccggatggttgcaatttaagacattgccacagccgctgaaattgtaataatatccatccggtgtaagcatataataaatattgttatcaatccccttaaagcaaaaacatggaccgttttcatttccctctgccgtatggttgaataccacatcaagaatgacttcaattccattttctttcagttcgcggatcagacgctttaattcatcaccctcatgattatgctcctgatgaaatgcataacttgtattcggggcaaaaaaggaaaccgtattatagccccagtaattgtacaactgcacgccatccaccacacgggcactttccatttcatcaaattcaaaaatcggcatgagttctaccgcattgattcccagatctttcaaatacggaattttctgtcgcagaccttcaaatgttcccccaccttttacaccggaggacgcatctttggtaaatcccctgacatgcatctcatagatcaccagatcttcaaatttgtaattcagattccgataccgcccccagtcaaaatcactttgcaccacacgggctttatagacaaaatcctttccgccttccggtttttctccccagtttctctgaccggtaacagctttcgcatatggatcaagaagcgtatgttttctgttaaacagtaaccctctcgcctgatcggcaggaccgtccatctgataggcatactcaaaatcctctgcttttaagccaaaaacaaggatagaatacgtatttccaattttataactttccggaatgcggattcttgcatacggttcctgtgccgccggccggaataacagcaggacacagctcgtagctccatgggagcttacggtaaaacttaccccttcctctgtctgatatgcaccattcatctgataaaatcccggacgtacatcaaatccaccgatattatcgagtggatgaatgacttccccgagactttccatttcttcgtctatcggccagcttttctgttttgacggataattccaaaaacttgcattcatgtgctgattcctcttatcattattatttacttgccacataaaattatattatccccctactcttccctgatgattaccctgccatttgcgtcaaatccgattttactgtacttttccgaatactcattcatatgatcaataatcgtctgttttctgccgccttttgctatggcaggctgaaaattatttctttctgatgtggaagaaatgctgcatggtatcatatcggctgatatatctgtctgcagtaccccatccacaaaggtaaaggtctgttcatagatcgccgtatctttgtcttttggattcctgttccccccaaagcagaaatttccaagactgtagcagatcatttttccgttgtataattccattccctgcaatacatgaggatgtgtaccgaccagcagatctgctccccagtcaatcacctggtgtgccagcttctgctgataatcattcggataatgatccccctctatcccccagtggcaacaggcaattaccagatccgctccttcttcccgaagttctgcaatcccatcccggatataaccagcatgtgtttcatcagcggacagctggcttgcggagacaattccgattttgataccatccttcgtggtataggtatccacatgatcattgaatccgaagataatccctgctttatttaacacttctctggtatcatcaagtccctgctgcccataatcaaacgtatgattatttcccagacttgccccctccacagaactgtctgtcataataccaacatactccggttttccttttaagttccacgttttttccacacgctcggtcgcatttgacaacacacattccagattgatcagtgtaaaatcatcctgctcaaaaatacttctgatatttttaaaaaaataatcctgcccgtatttatcatagtattcatgaaaggaacctgcatacccatgcgtctgtgttgccccaagcgtacagtcacctgtcgccgtaatttttaccgtctgtatcaccggttcctgctgcgtttcagttgcagtcccggtttccgtttcttccagcgtacccggttcttccgtcatctgtgtctccgtgattttttccgtagaagagggcaaagccgatgacgttgctgcaggagaagaacatcccgtcagcaaaaatcctgccattaggattggcaatatccattttttcatacgttttcagactcctctttcacaagaatatccaccgtgtgaccgcttgcacccataagatccatccgttcacaggttgccagatgatactgcagaaacgcatcaaactcttcttccgtcagcgcatttaaaaacggacgcatataatttgctgcaccgtctgccgctatgatctgccggcgcctgacctctacctgccggtccaatgcttcaatatcttccagacgaaccatggaatacagaggattggcttttgaagtacagtgataatcctctgtgagcattccctcctgaagcgcctccagaatatgtttttccttaaacgcatacgtgataacggaaaattcattcataatatacgccacgagaatcctgcctccgggtctggtcaccctcaccgcctcccgcagcgcagcaagcttgtccttttcctcatgcaggtgatacatcggcccaaacaacagggttacgtcaaaggaatcatcggaaaattttttcagattcattgcatttccctgatatgcatgcactcctgcacccttctgtttcaggcgtcccagattatgctttaccagttccacggccgtcacatcgaacccttcctgtgccagcggtacgctgtatcgtccggttcccgccccgatatcaaggatatgaatttcctcttttgcacgttctttcacaatttcatccagacactgatggatataatgcatacttgtcacaaattccaccctgccgtgtcggctgtccagacgtttctcttcattaaatttattataataggcttctaagtctgtcatattttaatactaacacattttctttaaaatttcactcacaatcgctgatgcgacatccgctttgctcattatttccagttccctgcagtcatctgccgtaatcagcgtcaccacattggtatctgtaccaaatccggctccggctaccttcaggttattcgccacaatcatatctgcattcttttttgcaagttttgcacgggaattctccagcatatgttccgtctccatggaaaatccacacagaaactgtcccggttttttgtgcgcgcccagatacgaaaggatatcttccgtgcgttccatcgtaagggtggcatccccgtcttttttcttgactttctcatcgaccgggtgatccggacgataatccgccacagctgccgctttgataataatatcctgttgctctgctgtctcctttacggctgctgccatatccgcggcagatacaaccggaacgacctttacaaacggcggcggagtgattgccaccggtcccgtgatcagcgtcacttccgcgccacggcgcatacagttttccgcaattgcatagcccattttcccagtagagtgattcgtaatataacgcaccggatcaatcttctcctgtgtcggtcctgctgtgaccattactttttttccgaccatatccttttcacaggcaagatctttcataatataagaaaacagtgtttccggttccggcattttcccggctccggtatccccgcaggcaagataaccactcgccggatcaatgatatgaaacccataatgctccagctttttgatgttatcctgtacgatcggattttcaaacatattggtattcatggcaggggaaacatacttcggacattttgccgcaagaatcgttgttgtcagcatatcatctgcgattccgtttgccatcttgccgatcacattggcagaagccggtgctaccataaaaatatccgcccgttttgccagtgccacatgctcgacattgaactggaaattccggtcaaacgtatcgaccagacacttgttgcttgtgagcgtctcaaacgtgataggattaataaaattggttgcattttccgtcatgatcacatgcacatccgcatgctgcttgacgagcgcacttgccagataggcaattttataggcagcgatacttccggtcacaccgagtaccacacattttccttttaacattgtctcttactcctttgcagaaaaaatcacatcttctgctattttatcacactttttccctaaaacaattgaatttttgtcatctgttccagtatggaatctttgacagaatcgttcagatatgctggatttaattttctttttgcatatgcaaggtaagaaccatttgtctcttcaatcaaaactgccgtaaaaaaccgctcccagctaaaatatgttttgctttccacatattcccacggcttttccagcacctgatctgcccatttgctttttactacttttgcctttaatatcagccattcaaatgactccggcaaataaagcaccacttgatcttttccaccaatcaactgcatcactctgtcaatttcagaaccaaatgccgcgccgtctgcaattacaagtatgcgttcatttttatgcatatttaaataatggaaaacatttgactttccattcattgtctcacatttcaattgctgttgcctacatacagaattaaaaaactgataaccggaattactgtcttccgttattacaacctctggtttaatatccttctttaaagtctgtgctccatatattctgtaaaactcatgataacacggttttaatgttccgtattttcctgaagtacgaattccatagatttcctccacactatacggcaaagaaggcaaggattccctggaaacaatgacataataattatctgttttctgaatagtatctgcgaattctactgtcttgataaattcgtttccttcatcaataaatacaatactatcctgcattgctgataactgttctttccacagtgaaccttcgagcacataacattttttgtcacacgtcagttccacgggcgtaccggatggattatttacgtattcccgaatcatatctaccaatgtggttttgcctgtcgcactgtctccccggatgaccgtcagatttcttcgaatttcaaaatcatattttaagcgctttgttgatacaataattctatgttttcccttcat

SEQ ID NO: 284 - DNA, 12110 bp, unidentified; identical to SEQ ID NO: 15
  source 1..12110: mol_type = unassigned DNA

SEQ ID NO: 285 - DNA, 7375 bp, unidentified
  source 1..7375: mol_type = unassigned DNA
atggattcgaaacagattgatgtgatggtggccgacgcctcacatgaagtttacgtggataagattttggataccatccgagaagctgccaaggtgcgcggaacgggcatcgcagaacgcacacacgaatatgtggcgactaaaatgaaagaaggaaaagctatcatagctttatgtggagacgaatttgcaggtttcacctacatagagagctggggaaacaagcagtatgtggcaacatcgggcctcatcgtacatcccgattaccgcggcttgggactggccaaacgtatcaagacggcttctttccgcctggcacgcctgcggtggcccaaagccaaaatattcagtctgaccagcggagcggccgttatgaaaatgaataccgaactgggctacgtaccggttactttcaatgaactgacagacgacgaggctttctggaaaggctgcgagggctgtatcaaccatgacatactggtagccaaaaaccggaagttctgcatttgcacggcaatgctttacgacccgaagttacacgaggaagataaaatataattaattatagattttgaattatgaatgggaacacacggactcgtttacaagcctgattcccaatttataattcaacattcaaaattcataagtattatggaaaagaagaaaaaagtagtagttgcattcagcggtggtctggacacctcattcacagttatgtatctggccaaagagaaaggatacgaggtatatgcggcttgtgccaataccggcggtttcagccccgaacagctgaagacaaacgaagagaacgcctacaaactgggtgctgtaaaatatattactttggacgtaacgcaggaatattacgaaaagagcttgaaatacatggtattcggcaacgtattgcgtaacggtacttatcctatttccgtaagctccgaacgtatattccaggcgctggccattgcacgctacgccaacgaaatcggcgcagacgccattgcacatggttcgaccggtgcgggtaacgaccagattcgtttcgacatgactttccttgtcatggctccgggcgtggaaattatcacgctgacacgcgacatggctttgagccgccaggaagagatagattatctgaacaagcacggctttgcagccgacttcgccaaactgaaatattcctataacgtaggtctgtggggtacttccatttgcggcggtgagattctggactccgcacagggacttcccgaaagcgcctatctgaaacattgcaccaaagaaggcagcgaacagttgcgcctgaccttcgagaagggtgaacttaaagcggtcaacgatgaaaaattcgacgaccccatcaaggctatccagaaggtagaggaaatcggtgcggcttacggcatcggccgtgatatgcacgtaggcgatacgattatcggcatcaagggccgcgtaggtttcgaggcagccgctcccatgctgattatcggcgcacacaagttccttgagaaatacacattaagcaaatggcagcaatactggaaagaccaggtagccaactggtacggtatgttcctgcacgaaagccagtacctggaaccggtaatgcgcgacatcgaagccatgctggagtcctcgcaacgcaatgtaaacggtactgcgattctcgaacttcatccgctctgtttctctaccgtaggcgtggaaagcgacgacgaccttgtaaagaacaaattcggcgaatacggtgaaatgcagaaaggctggactgcggaagacgccaaaggtttcattaaggtgacttctaccgcactgcgtgcctattactcaaaccacaaagacgaagaaatctaaatgatgaaccggaagcaaaaattaacgcgcccccgaaacggaagaatgctttccggcgtatgtgcaggactggcaaactttttcggactcgacgtgtcactggtacgcatcatctacgtttttgctacgatcttcactgcgtttgcaggtacacttatatatatcatactattagttataataccagaagaacccaatagatattatcaacatgattaaagtaggaatcatcggcggagccggatacacggcaggcgaactgatacgcctgttactgaaccatcccgaagcggaaatcgtattcgtaaacagttcgagcaatgccggcaacaaaataaccgacgtacacgaagggctgtacggagagacggatctaacgtttaccgacgaacttccgttggacgaaatcgatgtgcttttcttctgcacggcgcatggcgacaccagaaaattcatggaaagccacaacgtaccggaagacctgaagataatcgacctctccatggactatcgcatcaagagcgacgaccatgacttcatctacggccttcccgagctgaaccgccgtgccacctgcacggcaaagcatgttgccaaccccggctgcttcgccacctgcatccagttgggcctgcttccgcttgccaagcatctgatgctgaacggcgatattatggtgaatgccatcaccggcagcactggtgcaggcgtcaagccgggagctacgagccacttcagctggcgcaacaacaacctgagtgtgtacaaggctttcgagcaccagcacgtgcccgaaatcaagcaatcgctcaaacagctccagaacagtttcgattcggacattgatttcatcccttatcgcggtgattttccccgcggcatctttaccactatcgtgataaagaccaaagtggcgttggaagagattgtccgcatgtatgaagagtattatgccaaagactccttcacgcatatcgtcgacaagaacatcgatttgaagcaggttgtcaacaccaacaaatgccttatccatttggaaaagcacggcgacaagctccttatcatctcctgcatagacaacctgctgaaaggagccagcggacaagccgtacataacatgaacctgatgttcaatctggaagagactgtcggtttgagactgaaacccagtgctttctaaagtatctttaatttgtaatcagttactgaaagaatgaaactattcgatgtatatcccctttttgacatcaatattgtcaaaggaaaaggctgccatgtatgggacgataaaggtacggagtacctcgacctctatggcggtcatgcagtaatctctatcggacatgcacatccgcactatgtagagatgctcggcaagcaagtagccacgcttggattctattccaactccgttatcaacgaactgcaacagcaactggcagaacggttgggaaaggtctgcggatacgatgattattcccttttccttatcaacagcggagccgaagccaacgaaaacgcgttgaagctcgcttcgttccataacggacggacccgcgtggtatccttctcgaaagctttccacggacgtacttcattggcggtagaagcaactgacaatcccaaaatcattgctcccatcaacaactgcggacacgttacctatctcccgctgaatgatacagaggcaatgaaagccgagctggcgaaaggcgatgtatgcgctgtaatcatcgaaggcattcagggagtgggcggcatacagttgcccaccgatgagtttatgcaagccttgcgcaaggcctgtacagagcacaatacggtactgattctggacgaaatccaaagcggttacggacgtagcggcaagttcttcgcccatcagtacaacggtatcaaagccgacatcatcaccgtagccaaaggcataggcaacggatttccgatggcgggcgtacttatcagtccgatgtttactcccgtttacggccagctcggaaccactttcggcggaaatcatctggcttgcagcgctgcgcttgccgtactggatgtcatagagcaggaagctcttgtagacaatgccgcccaagtaggcgcatacctgatggaagagctgaagaaattcccgcaaatcaaggaagtgcgcggacgcggactgatgattggcctcgaatttgaagagcctgtcaaagaactgcgtttgaggttactgaaagaacagcatgtctttaccggtgtcagcggcacgaacgtactccgcctgttgccgcccctgtgtctcggcatggacgaagcgaacctcttcctggaacgttttaagaaagcactttgacaatttacggataatcagccggcaaaagatacgaccgaaagaagaataccttcctgtttcggtcgttttttcattaaaatctttacctttgcccgaagacaactttttaaatgacaagatgatatgaaaacagcaattatcggtgcaggaaatatgggcggctccatcgcccgcggtctggcaaaaggaaccatcatccccgccagcgacatcattgtttctaatcccacgcaaggcaaactggatgcgttaaaggctgagttccccgctttgcaaaccacacgcgacaatcaggaagccgttaccggcgccgagctcatcatactcgccgtcaaaccgtggctgataaaaccggtggtaagcgaactcaagctgaaaagcaagcagatacttatctccgtagctgccggcatccctttcgaagaactggcacactacgtggcagacaaggagatgaccatgttccgcctcatccccaacaccgccatcagcgagatggaaagcatgacgctcattgcaagccgtaacgccagcaaggaacaggaacagcttttgctcgacatcttcaaccagatgggacttgccatgctgattcccgaagataagatagcggcaaccaccgccatggcttcctgcggcatcgcttatgtactgaagtatatccaggcagccatgcaggccggaatagaactgggcgtttaccccaaggacggcatgcgcatgatagcccagtcggtaaaaggcgccgccgaactgattctgaacaacgacacgcatcccgccatagagattgacaaggtatgcactcccggcggaattacaatcaagggtatcaacgaactggaacatcaaggattctcttccgccattatcaatgccatcaaagcaagtaaataaccgtactaatccacttaataaaaaccacatggacgaacagattaaacaaatagccgaacgcctgcgcggactgcgcgacgtattggaattgaatgccgaagacatcgcccgcgattgcgacatcccggcagaagagtaccgtcttgccgaaacgggagaattcgacatctccgtaagcatgctgcaaaagatagcccgccgttacggcatcgcactggatgccctgatgttcggtgaagagccgaagatgagcagctacttccttacccgtgccggcaagggaaccagcatcgagcgtacaaaagcctataaataccagtcactggctgccggcttcatgaaccgcaacgccgacccgttcatcgtcaccgtcgaacccaagccggataacgagccgatacactacaacagtcactccggacaggaattcaaccttgtactgaaaggccgcatgatgctgagcatcgacggcaaagacttgattttaaacgaaggagacagtttgtatttcaactccaaactgcctcacggcatgaaagcgctggacggaaagaaagtacgtttccttgctgtaatcatgtaacaacacataaatgaagaacggtgaatgaagaaattccaaaagttatggtagaaagatttttatcgcaaacgtcctttacatctcaagaggacttcatcaagaatttaaagattaacgtaccggagaatttcaatttcggttatgacgtagtggatgcctgggcggccgaacatcccgacaagcccgcattgctctggaccaatgacaagggcgagcacatccagttctcatttgccgacatgaaacgctatacggacatgacggcttcctatttccagagcctcggcatcggccacggcgatatggtaatgctcattctgaaacgccgctatgagttctggttcagcatcatcgcactgcataagctgggagccgtcgttatccccgccacacacctgcttaccaagaaagatattgtataccgctgcaatgccgcagacatcaagatgattgtctgtgccggcgaaagcgttattaccgaccacatcacggctgccatgcccgactctccgagtgtgaagaagctggtcagcgtaggcccggagatagccgaaggttttgaggacttccacaaaggcattgccgatgccgccccttttgcacggccggagcatcccaacagtaacgacgatatttccttgatgtacttcaccagcggcactaccggcgaacccaaaatggtggcgcacgacttcacgtatccattggggcacatcgttaccggaagtttctggcacaacctgcacgaaaacagcctgcacctcaccattgccgatacgggctggggtaaagccgtatggggcaagctgtacggacaatggatagccggagccaacatctttgtatacgaccacgagaaattcactcctgccgatattctgacaaagatacaggactatcacgtcacctcgctttgcgcaccgcctaccatcttccggttcctgattcacgaagacctgacgaagtacgacctctcttcattgcagtattgcaccattgccggagaagcgttgaaccccgccgtattcgatacattcaagaaactgacaggcatcagcctcatggaaggtttcggacagaccgaaaccacccttaccgtagccaccatgccgtggatgcagcccaaaccgggcagcatgggattgcccaatccccaatacgacgtagacctgatagaccatgacggccgttcggtagaggccggtgaacaaggacagattgtaatccgtaccgacaaaggcaagccgctcggtctgttcaaggaatattaccgcgatgccaaccgcacccgcgaagcatggcacgacaacatctattacaccggcgacgttgcctggaaggacgaggacggctacctctggtttgtaggccgcgccgacgacgttatcaagagcagcggttaccgcatcggcccgttcgaagtggaaagcgccctgatgacgcatcccgcagttatagaatgtgccatcaccggagttcccgatgaaatacggggacaagtggtgaaagccaccatcgtactgcccaaagactataagaaccgtgccggcgaggagctggtcaaggagttgcagaaccacgtaaagaaagtgaccgctccttacaaatacccccgtgtcatagagttcgttgacgaacttcccaagaccatcagcggtaagatacgccgtgtggaaatccggaagaacgacgagaaataa

SEQ ID NO: 286 - DNA, 14176 bp, unidentified
  source 1..14176: mol_type = unassigned DNA
atgatttatccgctgcctgccgtattggtgagctgcggaagcactccggaggaatataacattctgactatcgcatggacggggacgatttgtacgaacccgcccatgtgctacatctccgtacgccccgaacgccactcctacgacatcatcaagcggaatatggaattcgtcatcaacctcaccacgaaagatatggcacgggccacggactggtgtggcgtacgctccggaaaggactacaacaaattcgaggaaatgcatctgacaccggggaaaagcaccgtagtcagcgcgcctctcatcgaggaatcaccgctttgcatagaatgccgggtaaaggagattatggctctcggttcgcacgacatgtttatagcggatgtggtaaatgtacgtgccgatacccgtaatctgaaccctgaaaccggcaaactggaactggcggaaacgaatccgctggtctatgtgcacggtggatattatgagctgggagaaaagataggcaaattcggatggtcagtagagaaaaagaagtaataatgcgataaaggttttaagagatggagttgcgacgaatcttgatgggcttatatctgttggccttccccgccatgatgtggggacagactccggttgtgcccggtactgccgacgaagagcattccggacaccgcaaggaaactccggtcaatttcggtttcaaaggcggtttcacctcttccttgttccttgtatcccagttcagcgtcaacggagtgcccatcgacgaagtgcagaacaattacaagataggatatttcggctcccttttcatgcggataaacttcgatcgccacttcctgcaaccggaaatatcctacaacatcaaccggtgcaacatcaccttcgagaaacctctgcccgaagacgccgcatcaggagcccggctggaggaagcctccattacatcgtccatccacagtatagacatccccgtcatctacggatacaacttcatcaaggaggggccgtacagccttgccgtctttggaggacccaaagtgcgctatatatgggacaggaaaagtgacatcgacttcgagaatttcgaccaggtgaatatccgtgaaaggctgcgtccgctcaatctcagtttcaccgtcggcgtatccgtcaccatctcacgcgtctttttcgacttccgttacgacatggggctgcataacatctccaaaagcgtgacatacgatattccggccgacaacaacgctgcagacgaaaacacgaaaaacgaaatccgttttcaccgcagggacaatgtgctgagtttttctttcggagtgttcttttgacagtaaatttcttccttttctttcaatttattcatttatttcccgtaaatttgtgcgcttaataagagaacacagatttatcaaacttatctaataagcagaatgaaaagagatgatttaattttcgaacttatcgaaaaagaacaccaacgtcagctcaaaggcattgaactgattgcatcagagaactttgtaagtgaccaggttatgcaggcaatgggctcctgcctcaccaacaagtatgctgaaggataccccggcaagcgttactatggtggttgtgaggtagtggaccagagtgagcagattgccatcgaccgcttgaaacagatcttcggcgcagaatgggccaacgtacagccgcactccggtgcacaagccaatgcagccgtattcctcgccgtgctcaatccgggcgacaaattcatgggactgaaccttgcacacggcggtcacctctcccatggttcactggtcaacacttccggtattatctatactccctgcgaatacaatctgaaccaggaaaccggacgtgtggactatgaccagatggaagaagttgccctgcgcgagaaacccaaaatgattatcggcggcggttctgcttattcccgcgaatgggactacaagcgcatgcgcgaaatcgcggacaagataggtgccatcctaatgattgacatggctcatcctgccggactgattgcagccggtgaactggataaccccgtgaaatatgcccacatcgtgacctccactacccacaagactctgcgtggtcctcgcggtggcgttatcatgatgggtaaggacttccccaacccctggggcaagaaaactccgaagggagaaatcaagatgatgtcccagttgctggattcagccgtattccccggtatccaaggtggtccgctagaacatgtcatcgcagccaaagccgttgccttcggcgaaatcctgcaaccggaatggaaagaatatgccaagcaggtgaagaaaaacgccgctgtcctggcacaagccttgatagaccgtggcttcaccatcgtttccggcggtacggacaaccactccatgctggtagacctgcgcagcaaatatcccgatttgaccggtaaggttgccgagaaggcgttggtatctgccgacatcaccgtaaacaagaacatggttccgtttgacagccgctcggctttccagacttccggtatccgtctgggtactcctgccatcacaacccgtggtgccaaggaagacctgatgctcgaaattgccgagatgattgaaaccgttctgtccaacgtagacaacgaacaagtcatcgcagaggtacgtgcacgcgtcaatgcgaagatgaaagaatacccgctgtttgcttattaataagcaaacagaattaaaaattaagaattaaaaattaaaggctgcgcaatgttcgctttgaactgcgcagcctttaatttttaattctaaacgcgctccgcgcgtttagctcagcccttctatatttccgtccacaatatcaatgtgttcggcttgtggtttcttgggtaatcccggcatacggagaatttcaccggcgatggctacaatcatttccgcaccgttattgaccacaatatccttgatgtggaactcaaagttgttgactgcaccgtatatcttcgggtcggcagagaaggagtactgcgtcttggcgatacagacggggtaatggctgatacccatctgctctatcagtttgataaccttgcgggagtggagactgtaagtcactacgcttgccccgtagaggttgcaggctaccttttctattttacgttccacgcaatcgctctcttcgtaggtgaaggtcagcggttcggatggtttgttctcgatagtatctactaccagattggcaaggtcaacggctccctctcctcctttggcaaaggcgttgttcacggcaaaacctacctcaagcttttcttcgcaatggcggcggatagcttccacctcctcgtccgtatcactggcaaaacggttgaatgccacgatgacctgctggccgaatgaacgcaaattgcgtacatgtttgtccagattgccgaagccctctttcagtccttccatattgggttccttgatgcggtccagactgacaccgccatgcatcttcagtccttgtgcggtagcaacgattatcgtcagcttgggctgtaggccgctcttgcggcacttgatgttgtagaacttctccgcacccaggtcagctccgaaaccggcttccgtcactacataatcgccgaatgtcatggccatttttgtggcaagaatggagttgcaaccatgggcaatatttgcgaacggtcctccatgaacaaaagcagcagagccttcggtagtctgtaccaagttggggttgatagcatctttcaacagtacggtaatggcaccggctactcctaactccttcactgtgaaaggagtaccatcgaaacggaatcccagaataatattttcaatacggcgacggaggtcgtcgaggtctgttgccagacagagaatagccataatttcggaagccggggtaatatcgaagcccgactcctcagtaatgccgttggtgctcggtcccaatccggtgacaatgctccgcaaggaacggtcattcacatcaagtacgcgccgccagatgatttctttcagtccgaagccgtctgcctgatgctggtacaagtaattgtcgagcaaagcggaaatcatgttgtgtgcggaggtaatggcgtgaaagtcgcccgtaaagtgcaggtttatcttctccatgggaagcacctgggcatatcctccaccggcagcaccgcctttcatgccgaagcaaggacccagcgagggttcgcgtaaagccacaatcgctttcttgccaatcttgttcagccccaatgccagcccgatggacacggttgttttaccgatacccgctttcgtagccgtgatagccgtcaccagtatcagattgctcttcttcactttctcttcatcaatcagatgcgtaggaatcttggctatgtaacggccatagttctctacttcgtcacgcgggatatccacactttcagccacctgctttatcttcttcagctctatgctgcgggctatttcaatgtccgatttcatacagagtcttttctttaaataacaactttaatgttttgaaagttgcaaaagtacgaaagatgtggcaaagtacaaaagaataccgtattttcacctgaccacctgcatcttctatctatttgaaccgcgacgtatccactgcctcccgttgcttctccttatatccaccgaatttataggtgaacgatacgccgaattcgcggaagcatgagtaatgattcgtcacattctgcgtcttgaaacggatgcggggagaaatctgtcccgtctcaaaaatatcgttgcaatagaggttgagaatggctttgttcttggcgaagccgtagcgcagggcaatattcacattgcccgacgtaggcaggtcgtagatgccctgaatggctttactatgcacaaatccggtcaccgtcagcttcaagtcgggtttggtggagagagtaaaagtattgttcatctgggcaatgccatagcattgctttctgtcgaaaggaatatcccagaaatcaccatccttttcgcgatgccacaagccgatgagggtaaggcgagaattcaaccaatccttcaccttaaacgggatagaggcttgtattcctgcttgttgctgataatcaaaattgagtgtcttgtagatttcaaccagacgttcggaggattggtagagtgtctgtacggagtagtccttggtatggttgaaccaagcgctgaagatgtatttgcttttcaaaatataggtcattttcagctcatactcttgtgccggtttcagcaacggattaccatgcagctcagagtatccgccgccgatgtaagagacggcatcctgtaccgcccagtagtcgggatagtccttgtcgctgctcagagagagctgaaggatatgtcccggtgccggcatatagttcaagttgacgatgggataccagtcccactggttccagacgggagtcttgtaatgctccacagccaaagaagcgtccaaagcaagtttgtcgccgaaacttttgctgaaacctgcatagatattccaggtctgctcgcggcggcgggacttcatattgctcaaggcatccgatgaggtcagttgtccaccggtttcggggtcataataatattggtagctgttgtcgatgctggtagtatagatggctccgtaattcaagtcccaaccttttcccagactgtgctcctgggccagaaagaatttccatcggttgatgcgttggcaatcttcggtgtagaagtcaagttcctcatcctgcatgcggctatgcagcaactggtcggacggggaacggtagtaggtcagttcggcaccggctttgaggccgaaaggggtacgatagtccagacggccgttgtgcagccagtcggtgctattgccatgagttgtggacacctgcgtgcccgtcacgcccgtccagttgtgggaggtggaatagccaccgttatagacgaaactcagctgatggtccttggcgatgttatagtccgcccctaccctgaaattatgggtatggctgcggccacggcccacctcatatgttgtcatggggtgaaccgagccgtctgccagggtgtgcacagcctctttgtcggtagtagagtagccccggccatggctgtgcgagtaaagaaaatctgctgagaatttatttttgctgaagagcaggctggcgcgttcctcaaagccttcgttatgcttctggcgatacttggcatagagttcgccttgccaggagtctgggccgcctgccgattgtttcaaggtgatattgatcagtgcgccacgcacctggtagcgtgcaggggcgttgtacatcacttccgccttctctatgcggctggcagggatgctgcgcagcaaggaatagagctgctcggtgctgagggtggttactttgccgtccaggataacggtgactccctggcctgccaactgcagcccgccattcatctcgatgacgccgggaagctctttcacggcatcgtaggcattgtctacggggaggttccggataaggcggggcaggtcgtacaccagcttgccttgcgctgcctttacgatggggcgttcgccggtaatcatcacttccggcaaggtctgataaagactgtccagacgggcatcggtcgtgataaggctgtcggcgctgaggatgcggttgtcgtctgcaccggaggtggttgcagtgccgttgttctcttgtgccgaaagactgatgctcaaagcacagcatacaatagggagtaaatagaatcgtttcatgttcttctttttatttatgtttatattcttcttctgcaaatcttcgtctgcaaagtacggcagaatcagcagaaacttgtgttatcagcggcttaccaagtgttatccagtgttatcgggagtgttatttagtcttatcggatgatagggttcacaatattaatcttacctttgtatgtataaaagtaaccggaaacaaacatgaaactgccattcaaatatattgccatacttgtcatcgtctccctggccggcatcttcgcctaccaagcctactggctgacggggctctaccataccatgcacagtgaaatggaaagggacatcaccgaagccatgcgcatgagcgactataacgaaatgatgatacgcgtggataaaatgaagcaggacgacataaaccacggtgaagtcagcgtatcagccggatacagcgatgacggaaaatcatttgtccgtagcagtaccaccatctcccgtgaagattctttggacaacaccaccctgcacgaaaccttcatgcccaaaggagacagtgtttacgtgacccacccgaacgattcaacccgcgtggaagtcagtgtcaggaagaacgttcctttgctcaccaaagaggacagtgtgcttttcatcgaccagcatagagaaacggataaagtccgttggatgtctgccgattctgcccgagagcgtctggaagaagcagtcaaggactcagacagctctccccaatccgcattgagtgccaaagggggactggatgtgattttgcgcgaccaaaacagtatgctggaactcgccacctacctccagcgcggactgcattcgggactggacatcatttccgaccccgacgtagtgctttatgacagcctgctgacttcattcctgcatgaccgtaacatcaatcttccccataggctgctacatcttcacaaaggcagcaaatgggactctaccattctctatatagatacattggtaaacatcggtacccccggctatgtgcctacctcaaaagccgtggaatataattattctttcgacatcaatacaaatcaaagctaccgtctcatcatggaaccggccggcatgttggtcttgcgacagatgtcgggcattctcaccacatcattcgttattctgatcgtactcgctttctccttctggttcctgatacgcaccatcctgaaacagaagacactggaagagatgaagagcgatttcaccaacaacatcacccacgaactgaaaacccccatcgccgtagcatatgccgccaacgacgctctgctcaacttcaaccaagcggaggaaaaggccaaacgcgacaaatacctgcgtatctgccaggaacagcttcagcgcctcagtggactggttgaacagatactttccatgagtatggaacgccgcaggactttccgcctgcacccggaggagtttgcaatacgtgatattctggaaacgctcatcgaacaacacaagctgaaagcggaaagctccgtccacatatcggtggacatcgaaccggaagatttgagcgtacttgccgaccgtacgcatttcagcaacatcatcagcaacctgatagacaacgccatcaaatattcgcacggagaagccgaagtggccatccattgccgcaaggtaaccgtcgaagggcagaatgaacagaccgaaatctccgtcagcgaccacggtatcggtattgctcccgagaagcagaagcacatcttcgacaaattctaccgcgtacccacgggtaatctgcacgatgtgaaaggctatgggctgggattgttctatgtgaagaccatgatagagaagcatggtggcagcgtatcggtaaagagtgagttgggaaaaggaagtacctttacgataaggatatgataacattatttgttagggtactttacattacttgttaaggagctttacattacttgtaacaaaagcgacaattatggaaaagataactgtacttctggttgaggacgaacagaccctcgccatgattatcaaggacacattggaaggacagaacttcatcatccacaccgcagcagacggtgaagagggattgcgcaagttcttcgacctccgtcccgacgtgctggtggcagacgtgatgatgccccgcatggacggctttgaaatggtgcgccgcatccggcagaccgacaaacagaccccggtactgttccttaccgcccgctccaccatcaacgatgtggtggaagggtttgagctgggtgccaacgactacctgaaaaagcctttcggaatgcaggaactcattatccgcataaaggccctggtaggcaaagctttctcctttacagaggaaaagcccaaagaaactaccgtttttgaaatcggtgactaccgtttcaattccgtcactcaacgacttgcttttgcaggcagcaccccgacttcacctaacgcggatacggaagtggaactctcccaccgcgagtccgagatactgaaacgtctttgcgagaaccgtaaccaggtggtcaacacccagaatgtattgctcgacctctggggagacgacagcttcttcaactcccgcagcctgcatgtgttcatcaccaaactgcggcataaactggccggagacgagcgcatccgtatcgtcaatgtgcggggaataggatataaactaatagtgaactaaactaaaactaaactactatttatgagaaagttattattcattacttttatctgttcctcactctgcgcctatgcacagagcgagattccggaagacacaataaagaaccggcctcccgtaaagaaagagcagattcccttttctccaaaagagaacaagcgtacgggccttgatgaaagccagccccaacaaagtctgcagggcgaacagcaggaagagataaatctccatctccctccctccgactatgtggagcccctgccctggacggacatgaagaagatacactttcagaaaaacatctttgaatgggacttccagcgtttcgccgatttcctgctctcgccggaagtcgtactgacgatgtacggcagccataacacctatcctgcaatgggctccatcatgcaggctggcgcaggagttacttattacagtcccgacggacattgggaattgagcggaggggtatatgccgcccattattccatctcccaaccttcatccattaccggtgcccagtatgccaaaagggatgccccccgaggtactcaatgggacataggctacaatgcctccgtatcctaccgcatcaatccctacatgcgtctacatgccttcggccagtattcgggctacgggagaagtaactcctttcatggatatatgaacccgatgtatccgcaaagcggttatggcatggtactggaactgaaagtgacggactggctcgacctcaacggaggcctggaacggagctacgaccccaccaaaatgaaatgggtgacttcgcccgtcttcgcccctaccattcgtataaagaaatagaaataatacaaagatatttccggaaatagagggaaacgagtatctttgttcagtctgcccctatgcggcagacagcaactgaaattgtgaacaaagaactatgaaacgaatcttcttctgcatcatcattttacttgcaggcatatcgtccgtcagcgcacagagtgggatgcctgccgatacggtacgtaccgctgtacgtggcgaagcgtctcccgaaggcatgtctccgtctgaaaaggagcttctgccggacgtgaagaattacgacggcttcctgctggatatggggctgatgaatctgtccacccccactcttcccaaattcactttggagataccggatgccagcaaagactatagccgcatcttccagttgaacccgaacgtgacttattcacaaggtctttcgaacatattctcactcagcaactcccggtatttcagttcgaatcccttcggactgacgggcttctggggctctactgacaacctgcaaatgggaagtttcactttgaagaacggcatgcgcatccatacgtacggcgaatatgacaaggacggctggaaagtgcccaacccttccgcactgccttgggaaaagaacaatttcaaaggggcgttcgagctgaaatcagccaacggatcctttggcatacgcatcgaggtacagcagggcagacacgtgccctattgatgcccatcacttaacaacagaatcaatgacaagaaagaaaatactggtgataggcgccaacggttttaccggcagacgcatcctggatgatttgtcccacaacgtgttttatcagacaacgggctgttccctgcacgacgacatctgtccccattcgggcaactatcgctttatccgcacggatatatgcaaccgccaggcggtggaaaaacttttccaggaagtacagccggatgttgtaatcaatacctccgccctctccgtccccgattattgcgaaacgcaccatgcagaagcggatgccgtcaacattactgccgtggagcatctggcagaatgctgtgaggcgggaggcagccgttttatccatctttccaccgacttcgttttcggtggtgatacggaccgaccctatacggaggaggatattcccgctcccgttaattattacggctacaccaaactggaaggtgagaaacgtatcgctgccgtttgcagggattatgccatcgtgcgcgtagtggtggtgtacggtgccgccctgcccggacagcatggaaatgtgctccaactggtggcaaacagattaaggaacaatgaggaagtgttcgtcgtatccgaccaatggcgtacgcccaccttcgtgggagacgtgtcgcaaggagtggagaagctgataaatcacccacaaaacggcatctaccacctctgtggcagcgagtgcctgaccattgcagacatcgcttatcgggtagcggacgtattggggctgaatcgctcgctcatccgtcccgtcaccacgaaggagatgaacgaaaagacaccacgtccccgtttcagcgggctgagtatagaaaaggcacaccgggaactggggtatcagccgcgcacgctggaggaaggaataaagcagatgttcggatggtaaatgatgcagtcggatggtaaatgatgcaggttgaggatggcagcagattcgactacagcaactccggctctgccagtcctttctctttgcgatacacacgtaccatctccagaatcacatctccatatttctccgcccctttctttccgaaatacggaatgcgtacaagcatagccttatccgaagggagcagattgctgatacccagaattgccttctgctgaatgacggtgtatacgggcaaccccaacgcggaagcttctgcattgcgccatgccaccaagcggttgtaaagttccggatgcaacacatccgtgggtacttcaacagccgcagcatcgcgtttccgctcacgcggacgtttctctttatcagcctgcttactgcttccctgcccttctttggcagcggcacttctccctttgcctttacccttctgcaaagccgaatcatcaatggaaagcagtgctttctgcttcaagtattctgccacatggaaaccattctccagcacataatccagcaaatcagtcttcaagtcaaacatttcctccagctcctccatggcatcccggagcttcttcttcaactctttattatcagaagttaccgcactcgccatcaccgcatccagcggttgcaactgctcttgaaaataagtggcggcagcgtgtatgcgcccctgcaaagtcgggtcggctgcatagtcctgcgcagtatcaatcaggcgggtatactggataccgaacttctgggccactttcgtcactttgtcgtgaaaacgttccacttcctccttgcaggctgcgagttgcttgggaaagagcttgtacaagtgttcgtctatcagccgcacataccgccgcaaagcctgctccatgggctggaaatcgaacaggcccgacagcagttccaggaaataggtctgctgcaaggaacggaagcgtttctcgtccggctcgtttctccgtgcctccatcgtgaaggtttccaccgcattgtcattgattatggctcttgcagaaagcggagcactgagcaccactccctccagcgtcttgcagcggctcagggccacatacgtctgcccatgcgcaaaggaggcgctggcatcaatcacggcacgttcaaacgtcagtccctggcttttgtggatggtaatcgcccaagccagtttcaacggatactgccggaatgttccttcaatatcttctgtaatctccttggtttcctcatcaagcacatacttggcattcgtccactcttcctcctgaagtaagaaggtagcgtcacttcccttactgcgcacttcaattccatctgccgacacggctgtcacctctccaatcatgccattgtagtaacggtgttcgccggaggtgtcgttcttcacgaacattacctgggcaccgcgtttcagttccagcacctcatccgtgggataggaatattcgggaaactttccgtcaatcttggcacgaaaggcatacgagcgtcccggaagttgttccagctcatggtcattaatccgttgggcctgatagttgtgggtcaccaggcggatgtatccttcttctttatctggtacgaaattgggaatataccggcggttcaaggcttccagcacttgcccgtcacaacggttttcgcgaatgcggttcagtaattcaagaaaagtcccatcgttctgccgatagactttctttagttctatggtgcaatattccgtctgcttcaaggcctggctggagaagaaataaggcgtgtcatagtatttgcacagcatctgccactcatcgtctttcactacgggagacagctgctgtaagtcgccaatcatcagcagttgcacgccgccaaagggtttgttccggtcgcggaaccgcctcaagacggcatccaccgaatcgagcaagtcggcacggaccatactgatttcatcgatgaccaataaatctatgctgcgtataatgttgattttctctttcccgtaacgaaaacggtaggttgccttgccatctgcgctgaatgagctttcgggcacataaggagcgaaaggtacttggaaaaaggagtggatggtgacaccgcctgcattgatagcggcaattcccgtcggtgcaagtacaatcatccgtttcggactctctgccctcagttttcgcaggaaagttgtcttaccggtacctgccttgccggtcaaaaaaagatgagtgcctgtgttttcaatgaattgccatgcaagcgctatttcgggattattctccat

SEQ ID NO: 287 - DNA, 8904 bp, unidentified
  source 1..8904: mol_type = unassigned DNA
  misc_difference 1214: note = a, c, g, or t
  misc_difference 1215: note = a, c, g, or t
  misc_difference 1216: note = a, c, g, or t
  misc_difference 1217: note = a, c, g, or t
  misc_difference 1218: note = a, c, g, or t
  misc_difference 1219: note = a, c, g, or t
  misc_difference 1220: note = a, c, g, or t
  misc_difference 1221: note = a, c, g, or t
  misc_difference 1222: note = a, c, g, or t
  misc_difference 1223: note = a, c, g, or t
tcaaatactcgtatcctcgtatttatacatttcccactcccctccacgtctccggaaatagaaaacattggaatacccgttgccaatgccgttcactttaaggatcttcgtcctcgaagtatcctcattcttctgcccataattaatattggacaacctgtctgttggcaatgaagggcgaaaagcgtaccactgatttacatcaagggtcgtttccaatattgaaaattcatcgtcaggatcaatggtgacaaactgcagcggagtggtgatatgtttgctctgatatacgctgtccgtcacgaaacgggtatagaaatccacaaagttctcaccttctccttcctctatatggcgcagattaatggcttcaagcatccacatgccttccttacgttcaaagtagtacttcttcaccatacgcgttttcagataaatccactccacttgtacggatttcagtgttgtgtctcccaccatatccatgtcgttctcattatcaaaaagcagcgtatagtaattttgtttggtgaacaggtagtcatgtttccagaaacgctcttctatttttataggagtatccctattgtaataaggcaaaggaaataccgtcctcttccgttgcaaagcatcgtccgaagcatagttgaagataaaatcatcaaacagttcgtccgcttccaacggttggggctcttcctgcacttccacctgttgcagcgtatcggccttatggcttgccgaatccaccatttcggtaatggtagtaaagggatccattttcggcttcttgtttccacatgaaaccaaaaagaccagtacaataaatcccgctaataaatgtttcattccttaccgaccctctacggtcacttatttaattttgctcttaatttttcaagcatatctactgtcatggagtccagatcgaactgtggcatccaatcccactcctcgcgggcacaggagtcatccagcgaatcgggccaactatctgcaatagcctgctttaaaggatctatctgataggtcatttcaaagtcgggcacatgcttcttgatagcagcatagatcatttccggatcaaagctcatcgaagcaatattgaaagcattccggtgtttcagacgtgccggagcagcctccattagcgaaatagcagcattaatggcatcgggcatgtacatcatatccataaatgtaccggcttttannnnnnnnnnttttacagggcaaacgaatttctcgcctttcaccgctgaataaaaaatatctactgcatagtctgttgtaccaccccccggaggtgtcacattggaaataattccggggaaacgtactgcgcgggtatccactccatatttcgtataatagtaatcactcagcagttctgtcgtcaccttagttacgccatacatggtacgcggacgctgaatggtgtcttgcggcgtcttcacatgaggagtattttctccgaaagaaccgatagaactaggtgtaaaaacggcacaaccatactcacgcgcaacttccagcacgttccacaatccgtctatacctatcttccatgccatagccggacggctttcggcaactaccgacagcaaggctgccaaattataaattgtatcaatcttgaattgtcgagccaccacttcgatagattgacgatccgtcacatcggcgatagccgagggccctgaagcttttaattcaccctgcggcatagcactcggaatgtatccggctacaacatgatcatcaccatagcgcttgcgcaattccaatgttaactctgagccaatctgtcctgtggctccaattaccaaaatatttttcatacaacttatttataaggtattctttcgttaccgaagtgcaaatatacacacttttttttcatttttctatcaaaaagatattgtttattccaagaaaaatgatgtcctttgtagagcttcagccagcaatgtatcacctaattaaaataaaaagttatgtatggtaaaatgaaagagcatctcagcaaaactctcgctgaaataaaagaagcaggactctacaaagaggaacgcctgattgaaagtgcacaacaagctgctatcacagtgaaaggcaaggaagtactgaacttctgcgccaacaattacttgggtttatccaatcacccccgcctgatagccgctgcccaaaagataatggaacgccgcggttacggcatgtcgtctgtccgtttcatctgcggcacacaagatattcacaaagaactggaggcagctatctccgattacttcaagacggaagacaccattctctacgctgcctgttttgatgctaacggtggtgtattcgaacctcttttcaccgaagaagatgccattatctccgactcactgaaccacgcttccatcatcgacggcgtacgtctttgcaaagccaaacgctaccgctatgccaatgccgatatgaccgaacttgaaaaatgcttgcaggaagcgcaagcacagcgtttccgcatcatcgtgacagacggagtattctccatggatggcaatgtggctcctatggataaaatctgtgatcttgctgagaaatacgatgcattagtaatggtagacgaatcccactccgccggtgtggtaggcgctaccggtcatggcgtgagtgaactatacgacacttacggacgcgtggacatctataccggtacgttgggcaaagcctttggcggtgctttaggtggtttcaccacaggacgcaaggagattatcgacctattacgccaacgcagccgtccgtacctgttctccaactcacttgctccgggcatcatcggtgccagcctcgaagtattcaaaatgttgaaagagagcaattcgctacatgacaagttagtagaaaacgtaaactatttccgcgataaaatgacagccgccggattcgacatcaaacctacccaaagcgccatttgcgccgtaatgctgtatgatgccaagttatctcagatttatgcagcccgcatgcaggaggaaggtatttacgtaaccggcttctattatcctgtcgtacccaaagaccaagcgcgtatccgcgttcagatttctgccggacacaacaaggaacacttggataagtgtatcgcagcatttataaaagtaggaaaggaattaggaatattgaaaggataatataaaatgatagggtggcaaggcttgtcgcctttaccaccctatctctttattactttttctcttattttctttcacccagcttcgcatcaacaaagaaaattccggtagcaccggctttcttcaccatatctacgatgcccgatgcagtagcttcttcttctacctgctcacgaacaaatccccacaagaaatcttgagaagctttatccttttcagcagcggctacatctacaagagcatcaatcatctttgacacacgacattcatgttcataaacctgttcgaatacttccagcggagtaccgaagtcattaggaacaacatcaattttatccaattttgccttaccgccacgcttaataatatatgaggccagttcacaagcatgtccatgttcttcgaatgactgcttcttcaaccaagaagccataccacaataaccctctttctccatatagaaagacattgctaaataaaggttggatgaccacatctcagccgtaatctgctcgttaattgcattctgtaatttttctgttatcataattgtatttattaattaaattgaaatgattacaaatataacaagaacacatatagattgttcacaccgataacattatttagtaaaataagtaaaatctaaccttacaaatgttccagttacattacaggacagctaccggcagaactcataattcccggctgtaccttcaaaagagagaacaccctcggaagcccgcacctcagccagcggaataaaaacacgaccgtctttctttacctgccagttgcctgccttaaggtcagtgataacaaacttaaatattcccgtaccactcacagagaaagcaaagtcccggcataattgttcgctattcttagcaaaagttactacgcgatcagccaattgagcgcctacaaccagctcattttcaatacgctgtacggcatttagtttattgcattgattatcggcgacctgtattacattcaaaaagttgtcggtagcggcaggagcaacaggagacacctctactctccacgcaccacgctcattggcattgtcaagataaggggctacggcatcattgggataattggttccgaacacccaattttctttgccgggaccgcctaccttatcaatatgcatattgtccgcttggggcaaaagtacggtgttatgtaacataccgctatcaccatctttggtacgtcgcactgtgaaagtgttgctttcaagtgtaggttcctcaatactatgtaataaccaatatttacgataaccggaattggaagcaactactttgtcatagacaataagcgcagcaggcacctgctccgattgcaggttgaggaacacaaatgaacgtttggcctccttcaccttccgggtgtaggcttgagtaatatctcctttcaaataagaataatcgggcgtttgcgcatcaggaccaaacccatgcgccaacactttgcccaccgtatactcttcggacaagagactatcaagcgaattacaagttttccagccctcgccacacatacgctgcccgccgtcattggctgcaaaccgggtctttccacctcctccatagttccaacattcaaatttttcatcaggatcgtacaccaacaatgaattgtgggcaatggtacgtttaaagtagttcttgttgttgggactgttataaccacctgaactaccgctataagcgcctgcatcaattgccaaaggtcctttgtgataaatctggaagctacctccgtccatgtgctggtggttacccacaaactgttcatttatcttcatttcggcaattacactattggcatcccaccccgtacgggcaatcatccagccataaggagtaccggaatagcgggtcaaaggaagatcatcaggagctttacctttcagattatagtcacgccacagtaaatcgtatatcagacagtggttcatagattcattgcccgacttattcaaatgaggattacgctcgaactcataagcaagatattcatccttatagtaactggaagctaacatcattggcgtaggcatcgtgagcagtgcaggacgattttgcggataatcatcgcccgaaggcaacaacaccccgtcgggacgccggcgatagataatgtcataaagcacaaatcttgccgaagaatcataaatgctgcccgcccccattttctctaaaatccaaagaggaaaaaggtcacaggcaaaacgtacatgcacatagttagtaccctgatgatagttctgtcctccgtagaaatagttacgaaccggaatataatcacgatggagcatagtaatgacatggttgtacatatcgggatattcatcataaatagcaataccagccgacagcatatcacgcataatcatccattctgacggatggcccgctatgggctggttgttgtgcggcggataaccacactccatactttttgccaaccggacaaactctttgatataggcttgtttctccgaacttttcatttgatcgtagcaccagtcatataccatagcacccgttatcagcatagccccactggccctcgacatatcggaacgagtaccaaaactggcacgttgcaatgtgtcgagcatggcggtaatagccctacgagccaagcgtttatcaccatccaaaagataatcgagagcctgtaactgtactctcgtcgtgacaccgcgcatttcataataatagcgaaagccgcgatttgttacggcagcttcttcatcaggcgtacgatccttgcccaactccttcatgagagaaagggtttgttgtgcctgcggagttttcattcgctcctttaaaacaggtaaatcggacgaacggacgtacaaccgaggatgcgtttgaggtggaatcggtacattaaccccttctactttttgccaaaccacctctttcggcaattcctgtgacgaaagggaaaaagagcttagtatcagactgattgaaaagaaaattgatttgtgtttcataatggaatttatatcagatattactgttgtaaaaatacaataaaaaaatcaagtagctataaaaaataagcacagaaacaaaaagattgtttctgtgctctataattcctctataaacttgtacgcttacactaactcatccgatgtatagccctgcggcagctcacgacagttatagcccgaagccataatttcaccgtaggctccggcagaacgaagcgccatgaggtcaccacgcttcacgccattcaaatcaacagccttaccaaagacatcggatgactcacagatagggcccacaacatcataagtctgcagcggagcgtcggacgtaaggttctctatcttgtggaaagcctgatagagtgcagggcgaatcaaatccgtcatacctgcatccaaaatggcaaactgcttattagcaccttgctttacgtacaacactctcgaaataagcgaaccgcactgccctaccaccgaacgtcccagctcaaaatgaagcgtctgataagaacgaagtttcaggcaattgtcgtacgtttcaaaatagcttttgaaatcgggtatcgcctgacggttgggatgtccgtaatcaatgccgagaccaccccccacattgatatgttcaatgcgtatctgacgagcttcaagcctgtcctgcaattcattgacacgattgcacaaagctacaaaatcgcccatgtccagtatctgtgaaccgatatgaaaatgaagtccgatgaatttgacattcttcatttcctgcgccacatctatcacatggtccatatcctgcatactgatgccgaatttattttcagctaatccggtagtgatattggcatgagtatgtgccccaacattgggattgatacggaaagcgacattagctatcttacctttcgcctcagccagttcattaataatctccaattcgggaatggactctacgttaaagcagaagatgtcataatccaacccgagatttatttcccagtctgctttgcctactccggcaaacactatcttattggcaggaaaccccgccttgattgccgcacgaatttcaccaccgctaacacagtccgcccccaatccgctttctcggataatagtaaggactttggaattggcattagcctttaccgcataatgcaccgaataattatcgtagcgtgacgcttcagtgcggatgcaagtcaaagtatcacgcaatactttcgtatcgtaataataaaacggtgtacgcagttcgcggaatttatcaataggaaatgttcctttcatacaattattatgggttgttcgtcattcagttaaaaagagcgcttttatcaaaaggtaaaagcgctcataatctactatttctttatattattcattgaacagcgcatcactgagtgactgcaaagcctgtttcttatcacattcacgaatgaggaaagaaatgttatagttgctgccgccgaaagaaatcatacgcaccggaatatcacgcatggcatcaagagccttagcttcaaagcctacattttcccattcaaggtcacccactacgcagataatgcacatatccttatccaccgtcaccgtaccgtatttcttcaagtcatccaatatttcgttaagatgcttggtgttatcaatagaaacggacactcctacctcggatgtacaaatcatatcgatagaagtctggtagctttcgaaaatttcaaataccttacgtaggaaaccatgagcaagcagcatacggctggacttaattttaatagccgtaatattctccttggcggctactgccttgatcttacccttctccgtatcattggaaatgagtgtgcccggagctgtgggatccattgtattgagcagacgtacggggatgttagcgtacttggcaggctggatacaagtgggatgcaggatttttgcaccaaagtatgccaactcagccgcctcttcaaagtggagatgacgcacaggagaagtcttatctacaacacgcgggtcattattatgcataccatcaatatcagtccatatctgaatctcagaagccttgacggccgcgccgatcaatgaagcggtatagtcactgccaccccgttgcaaattatctacctcgccataggcattgcggcagataaaaccttgcgtgatatagatttcggcattgggatgcagttcgagctgaacctgaagtttatctttgatataaaccggatcgggctcggcatttttgtccgtacgcatatattctaaagccgggagtaaaactgacttcacaccacattcttgcagataatagttcatcatagcagtagaaatcaactcaccttgtgccagcacaactttttcctcgaacagtgtgaaaaggtctttggtataagaacggatataatcgaaatgagatttgataagttccaaacccttctgtttatattcaggagtagcatagagttcatcgatatgctggcggtattttgtttccagtctattgataatctcgttagcaccttccggatttttcttgtacagatagtccgaaatctcaaccaatgtgtttgtggtacccgacatggcggagagaaccacaatcttacgttcaccatcggtaatcaatttggctacttccttcattcgttgagccgaacctactgaagtacctccaaactttaaaactttcat

SEQ ID NO: 288 - DNA, 7385 bp, unidentified
  source 1..7385: mol_type = unassigned DNA
ccgccggtgccgaggttcgggcagggcaggcccatatagctcagggtcgcgccgtcggtgccgccgcggaccggggtctcgatgggcgcaaggcccgctgcgcggatggccttgcgggcgttctcgaccagatggaagtgaggctgaattttctccaacatattataatagctgtccttgatgtccagctccaccgtgcccgcaccgtagcggtcattcaggcaggcggcaatatgctgcatctgggccttgcgggcggcaaacttggcagcatcgtggtcgcgcacgatgtagcccaggtgcgcggtggtcacgtcaccctgcatactcgtcaggtggaagaagccctcacggccctcggtgtgctcggggcgggagaaggcgggcagcgcggcgtagaactccatggccacgttctgcgcattgatcatcgagttcttggcgctgccggggtggacgctgaagccgtgcacggtcacgacggcagcggcggcattgaagttctcatagctgatctcgccgacgtcctcaccgtcaacggtataggcgtaggccgcgccgaagccctcgacgtcaaacaggctcgcgccctcgccgatctcctcatcgggggtgaagccgatgcagagcttgccgtgggggcgattttcggcaatgatgcgctccagcgcggtcatgatctcggccacaccggccttgtcgtccgcgcccagcagggtcgagccgtcggtggtgatgagagtctggcccttcatctcgcgcaggaacgggaacaccttggggtccagcaccgtgccggtggcgggcagcgtgacagcctcgccgtcgtagttttcgtggatctgcggccggacgttctcaccgctggcgtcgtccgccgtgtccatgtgggcgataaggcccagcggcgcggcgctctcctgccccggggtggcgggcagcgtggcgtagacatagcagtgctcgtccacatgggcatcggtcaagcccagctccttcagctcctcaacgaggatcttcgccaggtcaaactggcgcagcgtgctggggtgggtgccgctgttggggtcagaggtcgtgtggacctttacatattttaaaagacgttcgtaggcgcgcatgggcgtgtcctccttgtaaaaagcattttgctgtgatttcttagctattataccacaaaaagcagcaatttccaaccctgtgcccttttcaagcagcgatttttgtgctaaaatgaataagattataaaggatcactgtgccttttgcgcagccaattataaggaggatattatggcagacagcatttttaaggataagactcttctcatcaccggcggcacgggcagcttcgggcatacggtgctcaagcatttcctgtccaccaacatcggcgagatccgcatcttctcccgcgatgagaagaagcaggacgacatgcgccacgagctgcaggccaaccacccgcagtatgccggcaaggtcaagttctacatcggcgacgtgcgcaacccgcagtccatccgggatgccatgcccggcgtcaactacatcttccacgcggcagcgctgaaacaggtgccctcctgcgagttcttcccgatgcaggccgtgcagacgaacatcatcggcacggacaatgtgctgcacgccgccattgacgcgggcgtagagcgcgtcgtctgcctgtccaccgacaaggctgcctatcccatcaacgccatgggcatctccaaggcgatgatggagcacgtcatctttgccaacgcccgcgtggccgccgagcgcggcggcacgacgatctgctgcacccgctacggcaacgtcatgtgcagccgcggcagcgtcattccgctgttcattgaccagatccgcgccggcaaccccatcacgatcaccgaccccaatatgacccgtttcctgatgaacctggacgaggccgttgacctggtcatgttcgcgtttgagcatgcaaacccgggcgatttgttcatccagaagtccgacgcctccaccatcggtgacctggctaaggccgtgcagcagctgttcggcgacaccggcacgaacattatcggcacccgccacggcgagaagctgttcgagaccctgatgacccgcgaggagcgcctgcgcagtgaggacatgggcggttactaccgcgtggccgccgataaccgcgacctgaactacgacaagttcgtcgtcaagggtgaggtccacacgatggccgacgactcctacacgagccacaacacgcaccgtctggacgtggagggcacggtcaggaagatcctgaccaccgaatacgtccaaaacgcgctgaaagagatggaggccgaaaaggcatgaagatccttgtgaccggcgctaagggctttgtggggcgcaatctctgcgagaacctgaaggctgtccgcgacggcaagaaccgtacccgccccgccttgcagatcgaggacgtgtttgagtatgacctcgacacgccccccgcagagctggaccacttttgtgcggaagccgattttgtgttcaatttagcgggtgtcaaccgtcccaaaaataacgacgagttcatgcagggcaacttcggcttcgcctccaccctgctggacacgctcaaatctcacgccaaccgctgcccggtcatgctgtccagctcgatccaggcgtcgctgatcggccgctacggcgagagcgactacggaaagagcaagctggccggtgaggagctgttcttcacctacggacaggagaccggcgcgccggtgctggtctaccgcttcccgaatctgttcggcaagtggtgccgccccaactacaacagcgccgtggcgaccttctgcaataacaccgccaacgacctgcccatcacggtcaatgaccgcgccaccgagctggagctattgtacattgacgacctggtggaggaaatgctcgacgcgctggagggtaagcctcaccgctgcgattacgacggtctgacgccggttttccatgacagtgggcgctactgtgccgcgccggtgacccacaaagtcacgctgggcgaaattgcggacctgctggaaaggttcaaggctcagcccgcaacgctcgtactgccggagattccggcgggcagctttgcaaaaaagctgtactcgacgtatctgtcctatctgcccaaagagaaggtcatctttgacctgaaaaagaacgaggacgcccgcggcagctttaccgagctgctcaaaaccgagagctgcggccagttcagcgtcaatgtctcgaagcccggcatcacaaaaggtcagcactggcacaacacgaagtgggagtttttcatcgtggtttcgggccacggtctgattcaggagcgccgcgtcggcagcggcgaggtgctggaatttgaggtgaccggcgacaagccccaggccatccacatgctgccggggtacacccacaacatcatcaatttgagcgagaccgagaacctcgtcaccctgatgtgggcgaacgagcagttcgacccggcccacccggatacattctttgagaaggtgtaaaacgggcgcattgtaggggtgagcagtgctcgcccgtgcccgtgtgcggcagcggcaaagttcccgggcggatatggaatccgcccctgcgatgtaggggtcgatgctcgtcatcgacccggaagtttgccccggtcgtaacgtttctgcgggcgaacgatgttcgcccctacatcccctgcacatattagctactaaggagaaaagtatgtctgactacagcagcatttcttttaaaaacaacggcaagctgaaattgctcatcatcgtcggcacccgcccggagatcatccgtctggccgccgtcatcaacaagacccgcaaatattttgatgttatcctggcccacaccggccagaactacgactacaacctgaacggcgtgttcttccacgacctgcagctggccgaccccgaggtctacatgaacgccgtcggcgcggatctgggcgagacgatgggcaacatcatctcggagagctacaagctcatggccgccatccatcccgacgccgtgctggtgctgggcgacacaaacagctgcctgtccgtcatcggtgcgaagcggctgcacatccccatcttccacatggaggccggcaaccgctgcaaggacgagtgcctgcccgaggagacgaaccgccgcatcgtggacatcatctccgatgtgaacatggcttactccgagcatgcccgccgttatctggccgacaccggcctgccgaaggagcgtacctacgtgaccggttccccgatggccgaggtgctgcaccagaatctggaaaaaatcgaggcatccgacatccaccagcgtctgggtctcgagaagggcaagtacattctgctgtctgcccaccgcgaggagaacatcgacactgagaagaactttacctcgctgttcaccgccatcaacaagatggcagaaaagtacgatatgccgatcctctactcctgccatccgcgcagccgcaagcgtctggagcagagcggctttaagctcgacaagcgcgtcattcagcatgagcctctgggcttccatgactacaactgcctgcagatgaacgccttctgcgtcgtgtccgactccggcacgctgcccgaggaaagcagcttcttcacgagcgtcggccatccgttcccggcggtctgcatccgcacctccaccgagcgccccgaggcgctggacaaggcctgcttcattctggcgggcatcgacggcgaccacctgctgcaggccgtggacgtggctgtggagatgaaccggaacggcgacctcggcctgcccgtgcccaactacgtggacgagaatgtctccgacaaggtcgtcaagatcatccagagctacaccggtgttgtcaacaagatggtgtggcgcaaatactaagcgacaggaacacgatatattatgcgcatactggtagtgacccagcatttctggccggaaaatttccgcatcaacgatattgtcgaaggcttcgtgcaggacggtctctccgtggacgtgctctgcggtctgcccaactacccgaagggcgaatggttcgacggctacagcgccgacggcccgtttgaggaagtctacaagggtgcgcgggtgttccgtgcacgggagatcccccgcaagggcaacaccggcaagacgatttttctcaactacgtcagctggccgctctacgcggcgggggcgttaaagcgtctgcccggcgggtacgatgcggtgttctgcttcaacaccagccccgtgctgatgtgctggcctgccatccggtatgcaaaaaagcaccatataccgtttacgaattacgtccttgacctctggccggagaatctgtacagcgtactgccggtcaaaaacaggtttatgcgctgggtcgcgcagtctgtcagcgacagcctgtacaggcgctgtgaccggctgatcgccatgagcgggccgctgcaagagcggctgtgcgcccgcaccggcaagagcacggcggacgtggcggtcattccgcagtactgcgaggatttctatgcagtgccgcagcatgacgcggcgctggaggcacagtttgcggggcggttcaacgtagtgttcaccggcacgttcaccccggcgcagagcctggacatggtgatccgtgccgtgctggacgcccgcgccgccggggcggagcacctgcatcttcttctggtcggcgacggcatgagccgcgaggctttgcagaaacaggctgccgacctgcacgccggggacgccgtgacgttttacggcagtgtgcccgccgttgatgtgccccggtttacggcgctggccgacgcactgctgatctcgctttccgactcacccgatctgggactgaccgttcccggcaagctggccagctacatggccgcggccaagccggtgctggcctcgatgaacggcgcgggctatgcggcagtcctggagagcggcggcgggcttgtcagcccggcctgcgaccaaaaggcgctggcggacaatatgctggcgctgtaccgcatgaccgacgccgagcgggccgcgctgggcgcgaaggcaaaggcgtattacaccgcccactaccgccgtgccgagctgctgaagcggctggaggagtttacggtcaaaggcgtttgagcggaaccgcgttgtaggggcgagcattgctcgcccgcagccgtgtgcagcagcggcaggttccccgggcagatatggaatccgcccctacgtttccttttgcaaatcgctctgcggttttctccctgcctccctctgggagggaggtggccccgcagggccggagggagagaaccttgccacggcccgaaatgtttcggataaccgcaaggttctctcccccaccgcctgcgggcggagcccttcgggcccgagcccctctgtcgctacgcgacatctccccacgcagtggggagtcaccctcgcagagggggccaagagatgtgacaactatccgattgagaggtacacccctttggataaaaaagttcttgttatcatcccgtgctacaatgaggaggataacatcgtcaatacggtagaaaatctgcgcgcggaatgcccggaggtggattttctcgtcgtgaacgactgctctaccgacagcagcgccgatctgcttcgcaagcatcattacccgttcctggacctgccggtcaatctgggcatcggcggcaacgtgcagtgcggctacctgtacgccgtgcgcaacggctacgatgtggccgtgcagatggacggcgacggccagcacgaccccgcctacctgatggagatcgtgcagcccgtgctggacggcgaatgcgatatgtgcatcggcagccgctttgtcaaaaaagaaggcttccagaccagctttatgcgccgggtcggcatccggttcttgagcgggctgattttcctgctgtccgggcatagggtgctggatgtgaccagcggcttccgcgcgaccaatgcgcggatgaccgcctattttgcccggcactacgccattgactacccggagccggaggccgcgctggccgcgattttggcgggcttcaaggtggccgaggcccccgtcatcatgcgggagcggcagggcggcgtgtccagcatccacagcttcaagagcgtctactacatgatcaaggtctcgctggcgctcatcattgaccgtctgtccatccgcaaaagcaaggggggccgcgcatgaccgcacaattacagctgtttatgattctgggcgcggtggtgctgctgctcatcatctttgcgtttttgaagcgcgggctgatgagcgtcaagtacagtctgctctggcttccgctgcccgtccggctggtcattgcggc

SEQ ID NO: 289 - DNA, 14073 bp, unidentified
  source 1..14073: mol_type = unassigned DNA
atgaaagaagactggaaacccggaacaatgatttatccgctgcctgccgtattggtgagctgcggaagcactccggaggaatataacattctgactatcgcatggacggggacgatttgtacgaacccgcccatgtgctacatctccgtacgccccgaacgccactcctacgacatcatcaagcggaatatggaattcgtcatcaatctcaccacgaaagacatggcccgtgccacggactggtgtggcgtacgctccggaaaggactacaacaaattcgaggaaatgcatctgacaccggggaaaagcaccgtagtcagcgcgcctcttatcaaggaatcaccgctttgcatagaatgccgggtaaaggagattatggctctcggttcgcacgacatgtttatagcggatgtggtaaatgtacgtgccgatacccgtaatctgaaccctgaaaccggcaaactggaactggcggaaacgaatccgctggtctatgtgcacggtggatattatgagctgggagaaaagataggcaaattcggatggtcagtagagaaaaagaagtaataatgcgataaaggttttaagagatggagttgcgacgaatcttgatgggcttatatctgttggccttccccgccatgatgtggggacagactccggttgtgcccggtactgccgacgaagagcattccagacaccgcaaggaaactccggtcaatttcggtttcaaaggcggtttcacctcttccttgttccttgtatcccagttcagcgtcaacggagtgcccattgacgaagtgcagaacaattacaaaataggatatttcggttcccttttcatgcggataaacttcgaccgccacttcctgcaaccggaaatatcctacaacatcaaccggtgcaacatcaccttcgagaaacctctgcccgaagacgccgcatcaggagcccggccggaggaagcctccattacatcgtccatccacagtatagacatccccgtcatctacggatacaacttcatcaaggaggggccgtacagccttgccgtctttggaggacccaaagtgcgctatatatgggacaggaaaagtgacatcgacttcgagaatttcgaccaggtgaatatccgtgaaaggctgcgtccgctcaatctcagtttcaccgtcggcgtatccgtcaccatctcacgcgtctttttcgacttccgttacgacatggggctgcacaacatctccaagagcgtgacatacgatattccggccgacaacaacgctgctgacgaaaacacgaaaaacgaaatccgttttcaccgcagggacaatgtgctgagtttttctttcggagtgttcttttgacagtaaatttcttccttttctttcaatttattcatttatttcccgtaaatttgtgcgcttaataagagaacacagatttatcaaacttatctaataagcagaatgaaaagagatgatttaattttcgaacttatcgaaaaagaacaccaacgtcagctcaaaggcattgaactgattgcatcagagaactttgtaagtgaccaggttatgcaggcaatgggctcctgcctcaccaacaagtatgctgaaggataccccggcaagcgttactatggtggttgtgaggtagtggaccagagtgagcagattgccatcgaccgcttgaaacagatcttcggcgcagaatgggccaacgtacagccgcactccggtgcacaagccaatgcagccgtattcctcgccgtgctcaatccgggcgacaaattcatgggactgaaccttgcacacggcggtcacctctcccatggctcactggtcaacacttccggtattatctatactccctgcgaatacaatctgaaccaggaaaccggacgtgtggactatgaccagatggaagaagttgccctgcgcgagaaacccaaaatgattatcggcggcggttctgcttattcccgcgaatgggactacaagcgcatgcgcgaaatcgcggacaagataggtgccatcctaatgattgacatggctcatcctgccggactgattgcagccggtgaactggataaccccgtgaaatatgcccacatcgtgacctccactacccacaagactctgcgtggtcctcgcggtggcgttatcatgatgggtaaggacttccccaacccctggggcaagaaaactccgaagggagaaatcaagatgatgtcccagttgctggattcagccgtattccccggtatccaaggtggtccgctagaacatgtcatcgcagccaaagccgttgccttcggcgaaatcctgcaaccggaatggaaagaatatgccaagcaggtgaagaaaaacgccgctgtcctggcacaagccttgatagaccgtggcttcaccatcgtttccggcggtacggacaaccactccatgctggtggacctgcgcagcaaatatcccgatttgaccggtaaggttgccgagaaggcgttggtatctgccgacatcaccgtaaacaaaaacatggttccgtttgacagccgctcggctttccagacttccggtatccgtctgggtactcctgccatcacaacccgtggtgccaaggaagacctgatgctcgaaattgccgagatgattgaaaccgttctgtccaacgtagacaacgaacaagtcatcgcagaggtacgtgcacgcgtaaatgcgaagatgaaagaatacccgctgtttgcttattaataagcaaacagaattaaaaattaagaattaaaaattaaaggctgcgcaatgttcgctttgaactgcgcagcctttaatttttaattcttaatttttaattctaaacgcgctccgcgcgtttagctcagcccttctatatttccgtccacaatatcaatgtgttcggcttgtggtttcttgggtaatcccggcatacggagaatttcaccggcgatggctacaatcatttccgcaccgttattgaccacaatatccttgatgtggaactcaaagttgttgactgcaccatatatcttcgggtcggcagagaaggagtactgcgtcttggcaatacagacggggtaatggctgatacccatctgctctatcagtttgataaccttgcgggagtggagactgtaagtcactacgcttgccccgtagaggttgcaggctaccttttctattttacgttccacgcaatcgctctcttcgtaggtgaaggtcagcggttcggatggtttgttctcgatagtatctactaccagattggcaaggtcaacggctccctctcctcctttggcaaaggcgttgttcacggcaaaacctacctcaagcttttcttcgcaatggcggcggatagcttccacctcctcgtccgtatcactggcaaaacggttgaatgccacgatgacctgctggccgaatgaacgcaaattgcgtacatgcttgtccagattgccgaagccctctttcagtccttccatattgggttccttgatgcggtccagactgacaccgccatgcatcttcagtccttgtgcggtagcaacgattatcgtcagcttgggctgtaggccgctcttgcggcacttgatgttgtagaacttctccgcacccaggtcagccccgaaaccggcttccgtcactacataatcgccgaatgtcatggccatttttgtggcaagaatggagttgcaaccatgggcaatatttgcgaacggtcctccatgaacaaaagcagcagagccttcggtagtctgtaccaggttggggttgatagcatctttcaacagtacggtaatggcaccagctactcctaactccttcactgtgaaaggagtaccatcgaaacggaatcccagaataatattttcaatacggcgacggaggtcatcgaggtccgttgccagacagagaatagccataatttcggaagccggggtaatatcgaagcccgactcctcggtaatgccgttggtgctcggtcccaatccggtgacaatgctccgcaaggaacggtcattcacatcaagtacgcgccgccagatgatttctttcagtccgaagccgtccgcctgatgctggtacaagtaattgtcgagcaaagcggaaatcatgttgtgtgcggaggtaatggcgtgaaagtcgcccgtaaagtgcagatttatcttctccatgggcagcacctgggcatatcctccaccggcagcaccgcctttcatgccgaagcaaggacctaacgagggttcgcgtaaagccacaatcgctttcttgccaatcttgttcagccccaatgccagcccgatggacacggttgttttaccgatacccgctttcgtagccgtgatagccgtcaccagtatcagattgctcttcttcactttctcttcatcaatcagatgcgtaggaatcttggctatgtaacggccatagttctctacttcgtcacgcgggatatccacactttcagccacctgctttatcttcttcagctctatgctgcgggctatttcaatgtccgatttcatacagagtcttttctttaaataacaactttaatgttttgaaagttgcaaaagtacgaaagatgtggcaaagtacaaaagaataccgtattttcacctgaccacctgcatcttctatctatttgaaccgcgacgtatccaccgcctcccgttgcttctccttatatccaccgaatttataagtaaacgatacgccgaattcgcggaagcatgagtaatgattcgtcacattctgcgtcttgaaacggatgcggggagaaatctgtcccgtctcaaaaatatcgttgcagtagaggttgaggatggctttgttcttggcgaagccgtagcgcagggcaatattcacattgcccgacgtgggcaggtcgtagatgccctgaatggctttgctatgcacaaatccggtcaccgtcagcttcaagtcgggcttggtggagagagtaaaagtattgttcatctgggcaatgccatagcattgctttctgtcgaaaggaatatcccagaaatcaccatccttttcgcggtgccacaagccgataagggtaaggcgcgaattcaaccagttcttcaccttaaacgggatagaggcttgtatgcctgcttgttgctgataatcgaaattgagtgtcttatagatttcaaccagacgttcggaagattggtaaagcgtctgtacggagtagtctttggtgtggttgaaccaagcgctgaagatgtatttgcttttcaaaatataggtcattttcagctcatactcttgcgccggtttcaacagcggattaccatgcagctcagagtatccaccgccgatgtaagagacggcatcctgcaccgcccagtagtcgggatagtccttgtcgctgctcagagagagctgaaggatatgtcccggtgccggcatatagttcaagttgacgatgggataccagtcccactggttccagacgggagtcttgtaatgctccacagccaaagaagcgtccaaagcaagtttgtcgccgaaactcttgctgaaacctgcatagatattccaagtttgctcgcggcggcgggacttcatattgctcaaggcatctgatgaggtcaactgttcaccggtatcgggatcgtaataatattggtagctattgtcaatactggtagtgtagacggctccataattcaagtcccagcctttccccaagttatgctcctgggccagaaagaacttccagcggttgatgcgctgacagtcttccgtgtagaaatcgagttcctcatcctgcatacggctatgcagtagttggttggacggggaacggtagtaggtcagttcggcaccggctttgaggccgaaaggggtacgatagtccagacggccgttgtgcagccagtcggtgctattgccatgagttgtggacacctgcgtgcccgtcacgcccgtccagttgtgggaggtggaatagccaccgttatagacgaaactcagctgatggtccttggcgatgttatagtccgcccctaccctgaaattatgggtatggctgcggccacggcccacctcatctgttgtcatggggtgaaccgagccgtctgccagagtgtgcacagcctctttgtcggtagtagagtagccccggccatggctgtgcgagtaaagaaaatctgctgagaatttatttttgctgaaaagcaggctggcgcgttcctcaaagccttcgttatgcttctggcgatacttggcatagagttcgccttgccaggagccggggccgcctgccgattgtttcaaggtgatattgataagtgcgccacgcacctggtagcgtgcaggggcgttgtacatcacttccgccttctctatgcggctggcagggatgctgcgcagcaaagaatagagctgctctgtgctgagggtggttactttgccgtccaggataacggtgactccctgacctgccaactgcagccctccattcatctcgatgacgccgggaagctctttcacggcatcgtaggcattatctacggggaggttctggataaggcggggcaggtcgtacaccagcttgccttgcgctgcctttacgatggggcgttcaccggtaatcatcacttccggcaaggtctgataaagactgtccagacgggcatcggtcgtgataaggctgtcggcgctgaggatgcggttgtcgtccgcaccggaggtggttgcagtgccgttgttctcttgtgccgaaagactgatgctcaaagcacagcatacaatagggagtaaatagaatcgtttcatgttcttctttttatttatgtttatattcttcttctgcaaatcttcgtctgcaaagtacggcagaatcagcagaaacttgtgttatcagcggcttaccaagtgttatccagtgttatcgggagtgttatttagtcttatcggatgatagggttcacaatattaatcttacctttgtatgtataaaagtaaccggaaacaaacatgaaactgccattcaaatatattgccatacttgtcatcgtctccctggccggcatcttcgcctaccaagcctactggctgacggggctctaccataccatgcacagtgaaatggaaagggacatcaccgaagccatgcgcatgagcgactataacgaaatgatgatacgcgtggataaaatgaagcaggacgacataaaccacggtgaagtcagcgtatcagccggatacagcgatgacggaaaatcatttgtccgtagcagtaccaccatctcccgtgaagattctttggacaacaccaccctgcacgaaaccttcatgcccaaaggagacagtgtttacgtgacccacccgaacgattcaacccgcgtggaagtcagtgtcaaggactcggacagctctccccaatccgcattgagtgccaaagggggactggatgtgattttgcgcgaccaaaacagtatgctggaactcgccacctacttccagcgcggactgcattcgggactggacatcatttccgaccccgacgtaatgctttatgacagcctgctgacttcattcctgcatgaccgtaacatcaatcttccccataggctgctacatcttcacaaaggcagcaaatgggactctaccattctctatatagatacattggtaaacatcggtacccccggctatgtgcctacctcaaaagccgtggaatataattattctttcgacatcaatacaagtcaaagctaccgtctcatcatggaaccggccggcacgttggtcttgcgacagatgtcgggcattctcaccacatcattcgttattctgatcgtactcgctttctccttctggttcctgatacgcaccatcctgaaacagaagacactggaagagatgaagagcgatttcaccagcaacatcacccacgaactgaaaacccccatcgccgtagcatatgccgccaacgacgctctgctcaacttcaaccaagcggaggaaaaggcccagcgcgacaaatacctgcgtatctgccaggaacagcttcagcgcctcagtggactggttgaacagatactttccatgagtatggaacgccgcaggactttccgcctgcacccggaggagtttgcaatacgtgatattctggaaacgctcatcgaacaacacaagctgaaagcggaaagctccgtccacatatcggtggacatcgaaccggaagatttgagcgtacttgccgaccgcacgcatttcagcaacatcatcagcaacctgatagacaacgccatcaaatattcgcacggagaggccgaagtggccatccattgccgcaaggtaaccgtcgaagggcagaatgaacagaccgaaatctccgtcagcgaccacggtatcggtattgctcccgagaagcagaagcacatcttcgacaaattctaccgcgtacccacgggtaatctgcacgatgtgaaaggctatgggctgggattgttctatgtgaagaccatgatagagaagcatggtggcagcgtatcggtaaagagtgagttgggaaaaggaagtacctttacgataaggatatgataacattatttgttagggtactttacattacttgttaaggagctttacattacttgtaacaaaagcgacaattatggaaaagataaccgtacttctggttgaggacgaacagaccctcgccatgattatcaaggacacattggaagggcagaacttcatcatccacaccgcagcagacggtgaagagggattgcgcaagttctttgacctccgtcccgacgtgctggtggcagacgtgatgatgccccgcatggacggctttgagatggtgcgccgcatccggcagaccgacaaacagaccccggtactattccttaccgcccgttccgccatcaacgatgtggtggaagggtttgagctgggtgccaacgactacctgaaaaagcctttcggaatgcaggaactcattatccgcataaaggccctggtaggcaaagctttctcctttacagaagaaaatcccaaggaaactaccgtttttgaaatcggtgactaccgtttcaattccgtcactcaacgacttgcttttgcaggcagcaccccgacttcacctgacgcggatacggaagtggaactctcccaccgcgagtccgaaatactgaaacgcctttgcgagaaccgcaaccaggtggtcaacacccagaacgtattgctcgacctctggggagacgacagcttcttcaactcccgcagcctgcatgtgttcatcaccaaactgcggcataaactggccggagacgagcgcatccgtatcgtcaatgtgcggggaataggatataaactaatagtgaactaaactaaaactaaactactatttatgagaaagttattattcattacttttatctgttcctcactctgcgcctatgcacagagcgagattccggaagacacaataaagaaccggcctcccgtaaagaaagagcagattcccttttctccaaaagagaacaagcgtacgggccttgatgaaagccagccccaacaaagtctgcagggcgaacagcaggaagagataaatctccatctccctccctccgactatgtggagcccctgccctggacggacatgaagaagatacactttcagaagaacatctttgaatgggacttccagcgtttcgccgatttcctgctctcgccggaagtcgtactgacgatgtacggcagccataacacctatcctgcaatgggctccatcatgcaggctggcgcaggagtcacttattacagtcccgacggacattgggaactgagcggcggagtgtatgccgcccactattccatctcccaaccttcatccattacaggtgcccagtatgccaaaagggatgccccccgaggtactcaatgggacataggctacaatgcctccgtatcctaccgcatcaatccctacatgcgcctgcatgccttcggccagtattcgggctacgggagaagcaactcctttcatggatatatgaacccgatgtatccgcaaagcggttatggcatggtactggaactgaaagtgacggactggctcgacctcaacggagggatggaacgaagatacgaccccaccaaaatgaaatgggtaaattcgcccatcttcgcccctaccattcgtataaagaaatagaaataatacaaagatatttccagaaatagagggaaacgagtatctttgttcagtctgcccctatgcggcagacagcaactgaaattgtgaacaaagaactatgaaacgaatcttcttctgcatcatcattttacttgcaggcatgtcatccgtcagcgcacagaacgggatgcctgccgatacggtacgtactgcagtacgtggcgaagcgtctcccgaaggcatgtctccgtctgaaaaggagcttctgccggacgtgaagaattacgacggcttcctgctggatatggggctgatgaatctgtccacccccactcttcccaaattcactttggagataccggatgccagcaaagactatagccgcatcttccagttgaacccgaacgtgacttattcacaaggtctttcgaacatattctcactcagcaactcccggtatttcagttcgaatcccttcggactgacgggcttctggggctctaccgacaacctgcaaatgggaagtttcactttgaagaacggcatgcgcatccatacgtacggcgaatatgacaaggacggctggaaagtacccaacccttccgcactgccttgggaaaagaacaatttcaaaggggcgttcgagctgaaatcagccaacggagcctttggcatacgcatcgaggtacagcagggcagacacgtgccctattgatgcccatcacttaacaacagaatcaatgacaagaaagaaaatactggtaataggcgccaacggttttaccggcagacgcatcctggatgatttgtcccgcaacttgtcttaccagacaacgggctgttccctgcacgacgacatctgtccccattcgggcgactatcgctttatccgtacggatatatgcgaccgccaggcggtggaaaagcttttccatgaagtacagccggatgttgtaatcaatacctccgccctctccgtccccgattattgcgaaacgcaccatgcagaagcggatgccgtcaacatcactgccgtagagcatctggcagaatgctgtgaggcgggaggcagccgttttatccatctttccactgacttcgttttcggtggtgatacggaccgaccctatacggaggagaatattcccgctcccgttaattattacggctacaccaaactggaaggtgagaaacgtatcgccgccgtttgcagggattatgccatcgtgcgtgtagtggtagtgtacggtgccgccctgcccggacagcatggcaatgtgctccaactggtggcaaacagattaaggagcaatgaggaaatgttcgtcgtatccgaccaatggcgtacgcccaccttcgtgggagacgtgtcgcaaggagtggagaagctgataagtcatccgcaaaacggtatctatcatctctgtggcagcgagtgcctgaccattgcagacatcgcttatcgggtagcggacgtattggggctgaatcgctcgctcatccgtcccgtcactacgaaggagatgaatgaaaagacgccacgtccccgtttcagcgggctgagtatagaaaaggcaagccgggaactggggtatcagccgcacacgctggaagaaggaataaagcagatgttcggatggtaaataatgcaggtgcggatggcagcagattcgactacagcaactccggctctgccagtcctttctctttgcgatacacacgtaccatctccagaatcacatctccatatttctccacccctttttttccgaaatacggaatgcgtacaagcatggccttatccgaaggaagcagattgcagatgcctagaattgccttctgctgaatgacggtgtatacgggcagccctaatgcggaagcttctgcattgcgccatgctaccaagcggttgtaaagttccggatgcagcacatccgtgggtacttcaacagccgcagcatcgcgtttccgctcacgcggacgtttctctttatcagcctgcttactgcttccctgcccttctttggcagaagcacttctccctttgcctttacccttctgcgaagccgaatcatcaatggaaagcagtgctttctgcttcaagtatcctgccatatggaaaccattctccagcacataatccagcaaatcagtcttcatgtcaaacacttcctccagctcctccatggcatcccggagcttcttcttcaactctttattatcagaagttaccgtactcgccatcaccgcatccagcggttgcaactgctcttgaaaataagtggcggcagagtgtatgcgcccctgcaaagtcgggtcggctgcatagtcctgcgcagtatcaatcaggcgggtatactggatactgaacttctgggctactttcgtcactttgtcgtgaaaacgttccatttcctccttacaggctgcgagttgcttgggaaagagcttgtacaagtgttcgtctatcagccgcacataccgccgcaaagcctgctccatgggctggaaatcgaacaagcccgacagcagttccaggaaataggtctgctgcaaggaacggaagcgtttctcgtccggctcgtttctccgtgcctccatcgtgaaggtatctactgcatggtcactgataacggcctttgcagaaagcggggcactgagcaccactccctccaatgtcttgcagcggctcagagccacataggtctgcccatgcgcaaaggaggcactggcatcaatcacggcacgttcaaacgtcagtccctggcttttgtgaatggtaatcgcccacgccagcttcagcggatattgccggaatgttccttcaatatcttctgtaatctccttggtttcctcatcaagcacgtatttggcattcgtccactcttcctcctgaagtaagaaggtagcgtcgcttcccttactgcgcacttcaattccatctgccgacacggctgtcacctctccaatcatgccattgtagtaacggtgctcaccggaggtgtcgttcttcacaaacattacctgggcaccgcgtttcagttccagtacttcatccgtgggataggaatattcgggaaactttccgtcaatcttggcacgaaaggcatacgagcgtcccggaagttgttccagctcatggtcattaatccgttgggcctgataattgtgggtcaccaggcggatgtatccttcttctttatctggtacgaaattgggaatataccggcggttcaaggcttccagcacttgcccgtcacaacggttttcgcgaatgcggttcagtaattcaagaaaagtcccatcgttctgccgatagactttctttagttctatagtgcagtattccgtctgcttcaaggcctggctggagaagaaataaggcgtgtcatagtatttgcgcagcatctgccactcatcgtctttcactacgggagacagctgctgtaagtcgccaatcatcagcagttgcacgccgccaaagggtttgttccggtcgcggaaccgcctcaagacggcatccaccgaatcgagcaagtcggcacggaccatactgatttcatcgatgaccaataaatctatgctgcgtataatgttgattttctctttcccgtaacgaaaacggtaggttgccttgccatctgcgctgaatgagctttcgggcacataaggagcgaaaggtacttggaaaaaagagtggatggtgacaccgcctgcattgatagcggcaattcccgtcggtgcaagtacaatcatccgtttcggactctctgccctcagttttcgcaggaaagttgtcttaccggtacctgccttgccggtcaaaaaaagatgagtgcctgtgttttcaatgaattgccatgcaagcgctatttcgggattattctccat

SEQ ID NO: 290 - DNA, 12722 bp, unidentified
  source 1..12722: mol_type = unassigned DNA
ttatttattattctgctgtctgcaccactggattgtctctacaatacccttttcaaatgtatattgtggttcaaagccagtatcagcctttaaatcttctatatctgcacacagatacataacctgattaggactataaggtatatccccgaatcctatttggatcgtactatctatgctttctcccattatattaatatattccttaagcggtcttgcctgaccacttcctatacaatatatttttccatctatgcccttctcaccaagcagtctcatagccagtgctgcatcttttgaatacagaaaatcccacatctgctcacccttcgtacatgaaggaacttctcctttaagaagtctgtctatcgtactcattaccattgttttttcgccatcatatggtccatatatactgagtattctcgtccagatatgcttaattcctttctgctggcacattatacgtgtcatctgacctgcgcataatttagctattccatatccattttctggaaatgttggggtacttccattaagttttccctcaaatcttccatattctgcctgtgagcctgctcctacgaatgttttacatcctaactttgaggcagcttctacagcatcaagtgcatatttaacattaaggttctgtcctttcatgttgttacggctgtctccgaatgttccatcccatccaaaatgataaaatacatctgctccatccggtattaattctggcaatttatcaagcttagaaagatcacacttaacacattttactaaagaactttcttttattctgtcagctcttttagaaccaggtcttacaacagcaacaacttcaataccattagcttcaagttcattaatcaaagcaatacctatagaacctgttggtcctgttattacagctcttttcatataaattgtacccatacctttcaaatatatcttattttactactttttaccaaaagcccatattttatttaagaaaaagttaattgggatgttgattataagattaataattggtgctatcattttgcttacatgtagtactgaaacccatataactgataaaacattatttaatattaatcctgtaaatccatatgatacatatgttttaaataatgctgcccatatatttctatgttcaccttcttctttcttaaacacaaacttattattccaataaaatgaccagagaacactaagcacccatgaaactacattagctataatatagtcaaatgtcactccacttttagaaacaagaacaagcgttacaacataaagtaaatatgatattacagtattagatacacctactaatccaaactgtagaaattctttaaatgtctgtctggttttatctgttaaatcctttctaataatcttaaaaagcaattcaacaaaaaacatgtatattttttctataaatccgtatatcatttttcccatatcaatatatacccttacatcattataatccagacattaaatataatgtctggattataatattatttatttttaatatatatcagactactgattaactgcttcctttatagtcttagccatataatctatcatctcatctgtcattcctggatatactcctacccagaatgtatctctcatgattctgtctgtattatcaagatttccaactactctgtagccttcctttgttgctctcatctcatcaaagcatggatgctttataagatttcctgcaaaaaggtttcttgtctgtactccgtggttttcgatatactctacaactgcctttctgtctatgccttcctttactgtgataaggaaaccaaaccagcttggtcttgagttatcacatggtactggaagtattaccttatcttcgatatcagcaagcgctgctcttaatctgtcaaagttatgtcttcttctttcaacgaatgaagggaacttctcaagctgtgcacagcctactgctgtctgcatatctgttgccttaaggttatatccaaagtgtgaatatacatacttatggtcatatcctaatggaagttctccatactgcttatcgaatctgtgtccgcagaggttatcctttcctgatgggcatacgcagtcacgtccccagtctctgaatgagcggatacacttgttaaggagtgcattgtttgtgtatacagcaccaccttcacccattgtcatatgatgtggtggatagaagctgcttgttccgatatcaccgattgtacctgtgaacttttcttcaccattgattgtatacttagaaccaagtgcatcacagttgtcctctactaaccagagattatgcttatcacagaattcctttactgctgataagtcaaaaggattaccaagtgtatgtgctatcatgactgcctttgtcttatctgagtaagcttcttcaagctttgttacatcgatgttatactgtggaatagtaacatctacgaatactggaacagcaccatactggatagctggtgttactgttgttgggaaaccggcagctactgttattatctcatcgcctctctttattcttctgtcaccaagaagtggtgatgtaagtgccataaatgcattgaggttggctgatgaacctgagtttactactgatacatactttacattaagatattcgccaagcttcttttcaaactcatctgtataacgtcctgatgtaagccagaactcaagtgctgagtctacaagattcatcatttccttgctgtcatatacgcggcttgcataaggaattctgtccccttccttatactttttctggttatgatacttcttgcagtattcatcaacaattccaagaatttcttctcttgcttctaattcgttcttgttttcaaacatacttttctccattctatatttgttatattccaaaatttttatatttccgcatttttatttctaagataatatattgatgtcggggtcgaaagaaagctaataatatatctttttagcttaatcattaaagaattcatcaatttccttatcaagacatgcaacaacgtctccgccagatgcatatacttttgaccattctactgacttttctatagccatatcaaaattccatcttggcttccagccaaatgtcgtctttaacttagaacaatcaagctttaagaaattagcctcgtgtggacctccatcatacttgtttatccacttaagtccttctccccacttgttacagaatgtatcaacaagtgttcctgttgttatacagtcactctcatccggacctacgttataaaagcctgcatacttcttatcttcgtactgcttcatggctatcataagataagctgcaagtggttctaagacatgctggtatggtcttgttgaatgtggattacggacaactatatcctctttctttacagcagcccttacacagtccggaacgattctgtcgttggcaaaatcaccaccacctataacattgccagctcttgctgttgatactgcaacatccatatcattaaaaaatgaattgatatagctgtgtgttacaagctctgaacatgacttgctgttagaatatgggtcatatccgtccagaggctcattttccctgtagccccaagcccattcgttattgtggtataccttatctgttgtcacgttaaggaatgactttacacatgagttaagccttacacattcacatatattcactgtacccatgacattagtctcatatgtgtatactgggtctttataagaatctcttactattggctgtgctgccaggtgaagcactatttctggctgtgtttcttcaaacacattttttaaatgttcaagatctcttatgtctcctattactgagtttatgttgttctctacatctgccatagagaaaagattaggtgttgtaggtggtacaagtgaatatcctgttacctgggcacctgcctttacaagtatcctgcagagccatgaacccttaaaacctgtatgtcctgttacaaggactttctttcctttataaaagcttaaatccatctttgtatataacctttctgcttatcaactatcttaaaacatataaatattcatcttatataattctatataatctgccacctgtgaatttaccacttcttccaaggagctgttcctgtggcaagatacttctcaagcatatccatctctcttttgttatccatgcactgccagaagcccttatgcatgtatgacataagctgtccttcttttgcaagcttttcaagtggttccttctcaaagactgtatcatcaccttcaatatagtcaaatatttcaggatttaacaccatatatccggcattgattggagctccatccatgtggctcttctctctgaatgacttaactgcattgtcaccaccgatatcaagcacgcccttctgctgctctaacataactgctgtaagtgtagcaatcttgccatggttcttatggaaatctacaagctttgatatatcaacatcacatactccatctccataagtcataaggaatggttcatcgcctacatacttctggattctcttgattcttccacctgtcatagtgttaagtcctgtatcaactacagtaaccttccatggctcacagtgctgctcatgaataatcatatcgttagttcccttagtgaaatcaaatgtgatatcactgttatgaaggaaataatctgcaaaccattcttttattacatactgcttgtaacctgcacatatgataaattcatcaaaaccatagtatgcatactccttcataatatgccataaaataggctttccacctatctcaatcattggctttggcttaaactggctttcctcacttattcttgttccgaagccaccggctaaaagtactactttcattcttctcctccagtctattcatatatttaatatctctttggcactttattaatcaacacttctccaatattcaagtgtttctttaagagtctgttttaatgaaatgaccggctgccagccaacttctttcctaatcttatctatatcaggctctataatcggaacatcaacaggacgaagctttttttcatcaattttaacttcaatatctctgtctgacattgctataatctcgtcaagtatctgtctgatttcaatggcatgtcctgttccaacattgtatgtttctccgcgtctgccatttttaacaagaagtgcataagcctttacaacatcccttacatctgtgaaatcacgttttgcacttaaatttccaacatatattactggttcctgttttcctttttctatatctgcaacctgcttacagaaatcagcaaccacaaacataggtgtctggtttggtccaatatgattaaatgcccttaccatcataacatcaagtccatatgcatctgaatatatctttcctaacatattctgacatgactttgttgctgcatatatatttccaggtcttaacacattatcttctatgataggacattcatctttctttatatgtccatattcctcacctgaacctataagaagcactcttggctttttatcagcatcctttaccgcttctaataaattcacacaaccctttatgtttacatctactgtcagtgtaggattcttccatgaataagcaaccgaagactgggctgcaagatggaataaataatctggtttttcctcactaagaagctctgatatctgattcttatccagaatatccagattccttacaactgctgaatctattgtaagagtttctttctccgtcttggtaactgtcacatcatatccaagatctttagttaagtgtcttacgagatatggtccgacaaatccacccccgccaactactaatgccttcattaactacctctcttctgctacattaaatattgtcaggacagattaatcattctctgccctgactataaacatcattatatttattaattattagcagcttctttcttaacaagttcaagatcattcttaaccattctttcaactaattcctggaatgatatttctctcttccatccaagctttgactctgccttagctggattaccaataagaagttcaacttctgctggtctgaagaaatctggattaaccttaagtacaaccttgcctgttgccttatcctttgctatttcatcaacaccttcaccctcaaactcaacttcgattcctgctgctgcaaatgctgtcttagcgaattctcttactgttcttgtctcattagtagcaattacataatcatctggctcatcctgctgtaaaagtaaccacatagccctaacataatcctttgagtgaccccagtctctctttgcatcaagattaccaagttctacacaatcctgaagtcctaacttaatatgtgctacagcattagtaatctttcttgtaacgaactcttttcctcttctttctgattcatggttgaaaaggattcctgaacaagcatacatattgtagctttctctatagttctttgttatccaatgtccgtaaagcttagcaactccgtatgggcttcttggatagaaaggtgtatcctctgtctgaggtatagcctgcaccttaccgaacatctctgatgttgatgcctggtagaatctgcactctggctttacgattcttatagcttcaagcatgttagtaacaccaatagcatcaatatcagctgttgtacatggtgtatcccatgatgttgcaacaaatgattgtgctgcaagattatatacttcatctgcctgtgatatcttcattgctgatataagtgatactatatcctgcatatctgcgtagataaagtgaatcttatccttgatatgatctacgtttccgtaatccacaacactctttcttctcataagaccatatacattatagcccttttcaagaagaagctctgctaaatatgaaccatcctgtcctgttatacctgtaattaatgcgtttttcataattaatctccatttctataaataaaaatatacgctttaaactcgcacaaaacaccttaccacaaaatcatattacctgtgtctggcatattgcaagtattttcacgaaagctaaattaacttttatagtttccacacttaaatcattatatatttaccaaattataaatactgattctttccctcttctctaagcttagcaagtactttctttatctcacctgcgttctccttagtagaaatgagtgtagcatccttagtatcaacaactatcatgtctcttaatcctacagttgcgataagcttgtctgcaccttcaataacacagttctgtgtattaactgtaacaacattgccattcacaacattaccttctgaatcattttctttgattcttcctactgcaagccatgagccaacatcatcccagccaaaattaccagcaagcgtgtatatatcagaagccttctccatgataccatagtcaactgactgtgattcaagattagggaattccttttcaagagtattctgataatctgctgtaccaactgattctttgatctttaataatccttcatatgttgaagtcatatacttcttaaagcatgaaagtatagtcgataccttccatacaaacatacctgagttccaaagataagaaccatctgcaagatatgccttagctgtatcaagatctggcttttctacgaacttctctactgaaaagctctcaccctctttattatccttgttatactttatataaccataacctgtttccgggtaattaggtgtaataccaacagttacaaggttctcacccttctctgctatatcacatgcattaacaaatgtatccttaaatatatcattgtgctttataagatggtctgatggaagaactatcataaccgcatcatcatacttgcttgccacatgaactgcaccaagtcctatacatggagctgtatttcttccaataggctcacataaaatattctcctcaggaagacctggaagctgctgctttacaagttccttataattagcattcgttgcaatatatacgtccttaatatcaactaatggactgattctctcaaccgtaagctgaatcattgtctttccatcatctgttaatgataaaaactgcttaggaaggttaactctgcttcttggccagaatctttccccttttccacctgccattattaacgctgttttcttcatgatatacctcatttcttatataaataaatatattaattgccatttctgcgcaccttttgtgcatatcgagtttgtatcaaatatatgtagacttcacacatatacgctggaaaattatatctcatactgctcattttgtcaattaaaccggctcaaacggtattataaacaacacaaaattataaaagctgtaattcattttacacataaactacagcttttatcattaacaaatattttttaattattcaaaagataatcagagtatatttctgccattttgcgccaattaattaaagcttctcctatattggcaccacacagctcgcgataaattgcccatacaaaccaataatatgctattattgcaacataggccatgtaatgaaatcttgttttctcactatattcttcctgaagatactcttttataaattcttctgccttatcaaaatcatacattgcatctacaatataataacctacatcaattccaggatctgaatatccaccatactcccagtcaataagtataacacttccatctggttttatcatccaattaggtttatatgtatcaccatgacaaaagcatttatctactccatcgccaagtgtcatattataaagcttttctatctttaattttaactgttcatattctttaaagcaatcggaatcttttttcttaatcaaagcttccatctcaagagcatcttcccatggtttcataccataatcaactttaatatctgccttatgcaattttcttagcactgaaagtatctttttagaatcttcaaaagaattatagtctggttcacggaattctggtataaatacagaaattttccatccttcattcacatctgcatatatatatgttggatcaattcctatttttttagctaaaataagtgattttttttcattttttctattaattatactttctgttccatcacctggatgcctgtatatataatccactccatcaatcttgaatatgaaagatatattagtcataccttcacttacatttctaaagtcaactatatcttcttcatcgcatctgaatacaagcttaatatttcttattatttcactatgtgtataacctaaatattgcgaatcaaactttcttaactcttcaaaataatcaaattcaaatatatttccttttttatactctctcacatacattgatggtaaatcagaaagcttatcttttaaaaggatttcccaataagaattattatattttccatcatctctgatatcttccattacattaataaatgaatcagaaaactcttttttccaaaatgaatgtcccataagaatataaccattatctattggtttattatccatgcagactattttaccatctgagtcgacatcagcatatatctcttcagtaataagatttccacgataacctgagtaatatgtaatatactcatattgattaaatggattctctatatagtaactgtcacttacacatatgtatgtattctttaattcttcttttgcaagatacaggctttctatattattcttaatattaaatgaatcattaataataagtttaacgccatacttatcctcgagatagaaaaacatttccttcttatatccaagaactatcgtaatattcttaattcctgcattttgaagttgttctatctgtctttcaataagcttttctccccttacttcaaacaaacctttcggctgttccagtgataaaggaataaatcttgttgatgaacccgctgcaagaataactgcattattaaccttatatggctctaaagctttaatacctaattcagtaagacatccactctctttatcaatatatcctgcatgaactaatctgttatatgctctggtatcagataaggctctgacacaatctaatgcatacgaacaatccgcacggcctatacttccgttatataaactgttcaatatataaaattcattttttttcacagtgaatacctccaatgtaattcaacttttattcctgtcccggataatctttatatgaagaatccagctgcacaagttcatagaaattatctatttccattatatctgacttctcacatggtcttacttcaacattatatctttctttgcgtaataccaatggtataaattcccagaaataatccttaccatcttgttcctcttcatacacctgtttaaaatcatttcgtaattttttactatcatctttattccaatatgatataccataataattaaaacaaaacgtattaccttttttgtaatcagttatataaccgttatcaagtttataactccaatcatctgtttctattgagaatgatccaagaatgttactgctatactgatacttactaattatatccggattagatatatataagtctgcctcacataaataacattcatcaatattctcaagagcagccatagctgatgatatattgtttgttttatcatacacatcattatcaacaaacttaataaaaggatatttatcagtaatttcatcaaatttttctttcttgtatcctcttaccagagttatatcttttattccgactgatactaatgcatctaaaagtgtatctattattctcacgccattgactttaaccattggttttggcctgtccagtgttaccggaaccattcttgaaccaaaaccagcagccattataaccgccctttttactctatatggctcaagcatatcaagacctttagctgtaatttctaacaggttttcatctcttaatattgcacctatattggtcaactcatcaagtgccttactaacctcagtacctgatatttttaatttatctgaaagtgttctgattgcataaacattctttccatttttttcaagaaatgcaagaacttcaaactgataacgattcataataatcctcatttctgtacacactattttacatataacttatttaactatcataggtatgatatatatgcccaatgctatacatgtaactataattgtacatactttccaaatattgtattgtttatccatcttcttttttgtttcttcatctggttcttcaataataccgatttcttcttcaatagatggcatcttaaattcttttttatgtgaatataaataatagaatattatacatgcaaccgttattattccagatgtaagaagtgccattttgtctgcgaatataagcataaaaacatataaaactatagtaacgacacatccaacaaccccaagtggtgccttatatggtcttttcatatcaggatattttttcttaagacctatatatgataagcatccaatcatataacatatagccagtgaaataagcgaaacagaggctatatagtcaatagatcctgtagcaattaatatgaaattaattactccaactgcaattactgctatataaggtgtcttatactttggatgaatcttacccaggaatttaggcaatgctccatcctcggccatagtatatatatatctcgctggtgcagcaattcctggattaattgtagataaatcaccaccgaatgctattcctatacaaagcaaaattatagggaaacctattaatcctactgcctttaacccttccgcatatggtgcattagccactgcaagcacaccgtaaaactcttttggtacaagaccaactaaaaaccactggaataatgcattaagtgcaaataccataaatacagaaattttcaatgctcttggtaatgtatactgtggatatttagtctctgcacccattgaaacacatgtttcaaaaccagtataacaccaccatacaagaccaaatatatacatcatttcattaaaaggtggtaatgaattcatagcaattccaccaaaatattcgagatgtaccttaggaatcatatataaaaaccaacacactgaacatccccagaagaaaaacataaatgctgtctgtgcttttccagactgctcaatccccctgaaattcaatacaagaaatactgcaacaagaataatggcaataattcttgaatccaaccatactatatcaactccaagctgatcaagtaatattttaaaataattagcaaatgctaaggtttcaccagctcctatagcaactaccgatactatataatgccatccagcaagattagcccatattctgtttaatcctcttttagcataattataagttcctcccgcacatggaagcgctgctgacatttcaccatagataagacatggccatattgatattaatagtgctataaatgtaaatgctataatccatgagcctacacttcctatctgtgctgaaccacacgtaaataatccaactccaactaccgttcctatagtcatactaattgcttcttttaacccaagagccctgaccaatttgttatctcccat

SEQ ID NO: 291 - DNA, 8141 bp, unidentified
  source 1..8141: mol_type = unassigned DNA
atgaaagtattaatcgtaggtggcggcggaagagagcatgcaattgcacaaagtgttgcaaagagtgagaaggtcgataagatttactgtacaccgggaaatgccggaattgcagcactggcagaatgtgcacctatcggagcgatggagttcgataagattgtagcctttgctaaggaaaaagaagtagatcttgtaattgtaggaatggacgatccgcttgtaggtggccttgtagatgaactggaagcagcagggattcgtgcattcggtccaaagaaaaatgcagcaattctggaaggctccaaagcattttcaaaagatttaatgaaaaaatacaatatcccaactgcagcatatgagaattttacagatccggatgcggcaattaagtatctggagacagaggcaaaatttccaattgtattaaaagcagatggactggctcttggaaaaggagttttgatctgcaatacactggaggaagcaaaagatggtgtcaaaaagattatgctggataagaaattcggttctgcaggaaatgagatggtcattgaagaatttatgacaggtcgtgaagtttccgtactttcttttgtagatggcaacacaattaagaccatgacaagtgctcaggatcacaagcgtgccggagatggagatactggactcaacactggaggaatgggaacattttcaccaagtccattttatacaaaggaagttgaagatttctgcaacaaatatgtatatcaggcaacagtcgatgccatgaaagcagaaggccgcccattcaaaggaattattttcttcggactcatgctgacaccagacggaccgaaagtactggagtataatgccagatttggagatccggaggctcaggtcgtacttccaagaatgaagaatgatattattgaagtcatggaagcctgcattgatggaacattggatcagatcgaccttcagttcgaagacaatgcagcagtgtgtgtcgtgcttgcaagtgacggatatccggtaaaatatgacaaaggtctgccaatcacaggattggaggaatttgataaacacgatggttactattgcttccatgccggaacaaaatttgacggagaccagatcgttacaaacggaggacgtgtccttggtgtgacagcaaaaggaaaggacttgaaagaagcgagagctaatgcctatgcagcaacagaatgggtaaaatttgacaataagtatatgagacatgatattggaaaagctattgatgaagcttagtttactattatcggaagtttgactggaagtaaaaacttgacaaatcatttcaaaaggataagataaaatagacaagatgtaagtcttgtctattttcgtataggaaaaggcattttgttaaaaagaacaagtacaatagaagcaggagggcgtcatatggattacatacacgagattgggaagcgtgcaaaatcagtttctgcacaggttcagcatctttcccaaaatcagaaaaatgaaggacttcgaagagtagcggaagaactggaaaatcagaaaagctatcttatggcagaaaatgaaaaggatattgaaaaagctaagaaagacggtatgaaagcatctctgattgaccgtcttcgcctgacggaagaaagaattgccggaatggctgaaggtctcagacagattgctgatctggaagatccaattggtgcaacattgtgggaaaaggtcagaccgaatggccttcgtattggaaaaagagtggttccacttggggtggtcggaatcatttatgaatcgcgcccgaacgtaacggctgatgcatttggactttgctttaagacaggaaatgttgtaatcctgcgtggaggttctgatgcaatccattccaatcttgctgtgacaaaagtgattcaggacggtttgaaaaaatgtaatcttccagaggatgcgcttcttcttgttgaaaatacagatcgtgcagttgtcaatcaaatgatgaagctaaataaatatattgatgtactgataccaagaggaggagcaggactcattgcaaatgtagtgcagaacagtacggtcccggttattgagacaggaaccggaaactgtcacatttttgtggacgagactgcagaccttgacatggcagtcccgattgttgtcaatgcaaagacacagcgtctcggcgtatgcaatgcatgtgaatcacttgtggttcatgaaaaaatcgcagaacaggccattccggttatttataaagcgctttgtgaaaaaggcgtagaagtccggggggatgagtgtgctcgcgagattgtaccggagattgtgacggcaacagaagaagactggggcacagagtacctggatgcgatcatttctgtgaagattgtttcttccatagaagaggcaattgcacatattaacaaatacaataccggacattccgagtccattattacaaaagattatacaaatgcactaaaattccaggacgagattgacgcggcagcagtttatgtcaacgcatcgaccagatttacggacggatttgaattcggattcggagcagagataggaatcagcacacagaaattgcatgcaagaggaccaatgggattagaagcacttaccacgacaaagtatgtgatttttggagatggacagattcgcccgtaagaaacagaaaaaactatgaatttgcttacgaaagtatttgagccgtcactccgttgcacaaagcattccgacaagcctgacagaacaaaaatcatgtcagcaaaggctaccatgatttttacagtcttgtctccataatgcaaagtcggacggtcataatactttcgatagcaaatatagagttctacgaattttgcaagtttcttagagggaattaagaggtagactttgggacgaaagtttatcatatgtcgcacttttacaggcagaaggataaagagtaaagattaaaatatgctgtgaaattgtgcaaaagtattcatgagattggataatatgcataatattaaaaagttatgcataaacacttgaatattatacatataagttgtataatcatgcacatggattgaagtgtatacaatgataattttagattttacaatataaggaaggtacaaaaatgataaaagtaggaatcatcggagccacaggctatgcaggtggagaactcgttcgtattttaatgggacataaggaggcagaaattgtgtggtatggctcaagaagctatattgatcagaagtatgcagatgtatatcgcaatatgtttcagattgtagatgcaaaatgcatggatgacaatatcgaagcattggcagatcaggtagatgtgatttttacagcgactcctcagggatttctggcttctgtcattaacgagaatattttaggcaagacaaaaattatagatttaagtgcagattttcgtatcaaagatgttaaggtatatgaaaaatggtatggtatcgagcacaagagtccgcaatttattgaagaagctgtttatggactttgcgaagtgaaccgtgataaagtaaaaggcgcaagactgatcgctaatccgggctgctatacaacttgctctattctgacagcatatccgctggcaaaagaagggatcattgatatgagaacactcattgtagatgcgaaatccggtacttccggagcaggaagaggagcaaaggttccgaatcttttctgtgaagtcaatgagaacatgaaagcttatggtgtagcatctcacagacatacaccggagattgaagaacagcttggatatgcgtcaggtgaaaatgtgaccatcagtttcacaccacatcttgttccgatgaatcgtggaatactggcaacagagtatgctacattgaaaaaagatgtaacaggtgaagaagtaaaagcaatttatgataaatattatgcagacgagaagtttgtgcgtgtgcttggtgaaggcgtatgtccggagacaaaatgggtagaaggcagcaattatgtagatatcggattcaaattggatccaagaacgaaccgtattgttatgatgggagctatcgataaccttgtaaaaggtgcggctggacaggcggttcagaatatgaaccttcttttcggacttccggaaagcgaaggactggaacttgttccgatgttcccatagaacaaatctgaggggagaaataaaatgatacgaacaatgacaattgaagattatgaacaggtgcataatctttggatgaaaatacatggttttggaattcgaagtgtggatgattcaaaagaaggtgtggagcgtttcttaaagagaaatccaacaacgagtgtggtggcagttgaagatgataagattgttggtgctattttatgtggacatgatggaagaagggggtgtctctatcatgtctgtgtggatgaagcataccgcatgcgcggaatcggaaaagcaatggttgtatttgcaatggaagcactaaaaacagaaggaatcaacaatgtttctttaattgcatttacaaagaatgatataggaaatgcattctggaaagagattggctggaagaagcgggaagatttgaattattacgactttatattaaatgaggcgaatatcactgcatttattcagtaactgagaatgaggcaagtgcgaagtgcagagcaatctgcaggcatcataagaatgcagaggcattcttgaatatgaagaaaatgctttgtaaaacaaatgaataaatagaaggaaacttcaggaggaatatatgaaacagataaaaggcggcgtaacagctgcgaagggatatgaggctgcaagtacagccgcagggattaaatatcagggacgtaccgacatggcattgatctatagccaggtgccttgtgtatctgcaggaacatttacaacaaatgttgtaaaggcagccccggttaaatgggatcgccagatagtagacagtggcgcaggcgtgcaggcagttgttgtaaactcaggaattgccaatgcatgtaccggtgaagaaggcatgggatattgcaaagagacagccgaggcagcagcgaaagtgcttaatattgatgcagcaggtgtcctggttggttccacaggagtcatcggaatgcagcttccgatgcagaagctggtggacggaatccaggtgctggcaggaaagaaagcagaaggtctacagagcggacacgatgcagctcttgcaatcatgactactgatacagtagaaaaagagatggcagttgagatagagattggcggcaagacagtcacaatcggagggatgtccaaaggttccggtatgatccacccgaatatgtgcacgatgcttgcatttatcacaacagatgctgcaattacaaaagaggcactgcagaaggcgctgagtgaagacgtagaagatacttataacatgatttctgtagatggagatacatctactaatgatacagcaattcttcttgcaaatggtctggcaggcaatcaggagatcacttacgcaagtccggagtatgagacatttaaagaggcacttcacatggtcaacgagacacttgccaagaaaatggcaggagatggagaaggagcgactgctttatttgaggtgaaagtcgtaggagcagagagtataaagcaggcaaagacacttgcaaaatcagttgtatgctccaatcttacaaaggctgcaattgccggacatgatgcaaactggggaagaattctctgtgcaatgggatattccggtgtacagtttgatccggaaaaggtggatctgttctttgaaagtaaagctggaaagcttcagattattgaaaatggtgtggcaacagattatagtgaagaagtagccacaaagattttatctgagcctgagatcacagcaacggcagatatcaaaatgggcgattacagtgcgaccgcatggggctgtgatctgacacatgaatatatcaatattaacgcagattatagaagttaaagtacagataattgttagaaactagtagttggacgacagaagggaagtttttggacatgaataaagatatgcagcaatatttggataaagcagaagtactgattgaggcgcttccatatatccagcgttttaaccgtaagattatcgtagtaaaatatggtggaagtgccatggttgacgaggaactcaaagcaagagtcattcaggacgtcacacttttgaaactggtaggcttcaaaccgatcattgttcatggcggcggcaaggaaattagccgctgggttggaaaagttggtatgaaaccggaatttaagaatggacttcgtgtgaccgatgaggcaactatggagctggctgagatggttctgggcaaggtaaataaaagtcttgttcagcttgtagagagcctgggagtccgcgcaatcggcatcagtggaaaagacggaagacttctctctgtaaagaaaaaatatgcaaatggtgaagatatcggatttgtcggtgatgtgacaaatgtaaatgcagatattctttacgatcttctggaaaaagatttccttccgatcatttgcccggtaggattggacgatgacaacaatacatacaatattaatgcagatgatgcagcatgtgcgattgcaaaagctatgaaagcagagaagcttgcatttctgacagatattgaaggagtctataaggatccacaggattcatccacactgatttctgaactgacagtatcagaggctcataagctggtgggagatggatatatcggtggcggaatgcttccgaagatcaacaactgtatcgaggctattgagagtggggtatccagggttcatattctggatggaagaattccacactgcctgctgcttgaaatctttacaaacaaaggaattggtacagctattttaaatgacagtgagagaaggtattatgatggagaataatcagacaaatacatatatggaagagacaaactcagaactggtccatacatataaccgttttccggttgtcttagatcatggtgagggtgtttatctttatgatacagaaggaaagaagtatctggattttgcggcaggaattgcggtatgtggacttggatacagtaatgaagagtataagactgcattaaaaaatcagatcgatcttctgacacatacttcgaatttatactataatacaacttgcggaaaagcagcaaaagcacttttgaaagcatgtgagatggataaagtattttttactaacagtggtacggaggcaattgaaggtgcattaaaagctgccagaaaatatgcttacaaaaaaggtaccggacgttatgagttcattgctatggaagattcttttcatggaagaagtatgggagcattgtctgttaccggaacagagcattacagaacgccatttgagccactgataccgggcgtgaaatttgcaaaatataatgaccttgacagtgtaaaagcactggtaagtgataagacatgcgcaattattctggaagctcttcagggggaaggcggaatcactccggctactgatgaatttatgaaaggactccgccagatttgtgatgaagaaggaattcttctgatttgtgacgagattcagtgtggtatgggacgtacaggttctatgtttgcatggcagggatatggtgtaaaaccggacatcatgacaatggcaaaagcaattggaaatggagttccggtaggagcatttgccatgacaaaagaagtggcagaatattctcttgagccgggagatcacggaacaacttatggtggaaatccgctggcgtgtgcagcagttgccaagacgctggagttatttgaaaaatacgatctcacagctcatgtgcgtgagattggcgcgtatctgacagaaaagctagatgaacttgttgcagcaaatgacgcagttctggagagacgaggaattggacttatccaggggattaaggttaagaagccggtaggagagattagctcggaggcactgaaagaaggacttcttattatcagtgcaaaggggaatgtacttcgcctggttccgccacttgtgattgaaaaagagcatgtagatgagatgctggagattttgaaaaaggttctgtaa

SEQ ID NO: 292 - DNA, 8195 bp, unidentified
  source 1..8195: mol_type = unassigned DNA
ttacttttcattcctgtcaatctttaaatctttgtaatattgcattggagtaacaccatattctttcttaaatgctctaaaaaaatgattataccctccaaatccaccaagctcatatacctcatgaatacttttcccctgctctatataatggcggcataaatcaagtttgctctttacaatgtatgaatgaggggtctcacctgtcaattttttaaactctcttactatatgataacggcttatataaaattcattttccaagcgctccaacgagatatcttctgtcaaatgttctctgatataaataaaaatatcatccattacaacgtgttttttcttcttcgtcttgatctgtacatcatcctgaacagatgagcgaagtgcaagtacaagaatcatagttaataggcttttctcgtataatgagtgggcaaatttaggcggctcattattcatcgaatagagcttttttgatatattctttataagcatagccaattcagtctcagaatgaacaatcttaacttgatacggaacaaaatcaaacgcttcatcaagtcttgtttcttcatctgacaatttccttaaaagttctccacctatataaagaacataaacttcaagaggatacttatttttacgatattcaagctttactttattacctggcttaataaatatcaaatcctccatagtacatacaatattatcgtcctcctggtgcatataccctatcccaccagctataaatacaattgtatagctctccttttgcccaaagcttcgctgggcactatccaatattttcaaatattccattttgtagccttgctttttcatatgtctattttgtacactttcctattatattttttgttcatttcgtcaaaatatacaatatatcaatttttcgtagtttgcaagcaatatttgtatatggatatcagcataaccccaatataataagattgtagctactaaaacaatataaatgtttggaggtaaattatcatgaaagaaacaagacctttttccatgaaggacaaaattggttacactcttggcgatttgggatgttgctgtactgagcagttccgtgccatgtatcttgctattttttatacactggtatttaaaagttaatccagtacacgtaggaatccttatgcttgttacaaagttttgggatgctataaatgaccctttaattggtgcacttgttgatagccacaaaaacaaaggaaaaggaaaatttattccttggattaaattctttgcttttccaactgcagtactctgtatattaggatttgttaacgtaagcaatttcgcttatggtgcacgtattgcttatatgttcattacatatattgtttacgaaattatgtacacatgtgtcaacgttccatttggtagtctttcaagtgtaatgactgatgatgttaaccaacgtactgacctttctcgtttcagaagtcttggcggtacaatttttatgacagttatcgttattgttggaccattattcttatataaagataaccagccagtacctagccatttccttattatgtcagcaatctgtgcagttattggattaatctgtcttatgtttacatctcattggtgtaaagagcgtattattacagagccagttgttgagaaaaaagaaaagtttaactacttccaggtaattaaagatattactaaaaacaaagcattactcggagttatgttatcaagctttatcggtattgttggagcaggtatggttaacggattaaatacttatttattccgcgattattttggaaatgttgccatcatggcattttcaggtatgttaagtgtactctggtcacttattgcattcgtaggtacaaaatttgttgctaataaatttggaaagaaagaatggattatgtacagtgcaactttctcagttgttgtttatgctattttattcttcttcccacttgaaaatcctatgctctttattatcatcaacggaatctgctatcttggagtaagtggtttccaagtattagtttgggcacttgtaaatgatgcaattgattatcaagaacttcagacaggaaaacgtaatgaaggaattgtatattcggcatatacattcttccgtaaacttgctaatgctgtatcaggaagtatgagtagttttgcacttgcaattgctggattccaggttaatgaagctgtccagaatgaagcattctcaggacatctttggaaaacatatacaggtttatatgttgtaggatatttattagctgttctggtattaaaatttatctaccctcttacaaaagagaaaacagctgaaatgttacaggatttagctgacaagcgaaatgctacaactgcagaataaaattagaaatggaggtattttaaattgacaaaacaagtagaaatcacaaaccgtgatggacacatcttacgcggaatagttaacattccagaagatggcacaagatttcctgctattgtaaatgtacatggctttacagggaataaaagcggttacaaaagtatttatacgcacacagccagattattagctgaacatggatttgccagtgtccgttttgatttatacggaaatggtgaaagtgatggtgaattcgaggacatgacctttacaggtatcctacacgatatcgaggatattataaactggactaaaacacaagattttgccaatccagataagattatcttatctggtcagagtatgggaggatacgcagctgctactgccgctcctattgttaatccttatgctctcatgcttatgtgtccaggtgctggaatgtggtttggatgtaaggatcgtgctgaagccatggaagctaaggggatcaccaaggccgatattgaaggactcactttcccaacatcttttaattatgatttatttaattatgagccattctcgtcagcagaaggatacaacggaccagtcctccttataagaggaactgcagatgatttggtagatgatgcaacatgccataaatatgagtcactttacaatggaaaatgcaattataaaacaattgaaggcgctaaccacaattttgccagtgcttttgcaagagcagaattagacaaattaatgttagagtttttaacaccacttaaatagtatattcaatttgaaaggaagtatgaacaatgaaattattagagcctataaaagttggaaatattgagtttaaaaaccgtattatgttcccaccacttacaacaggatatgaggaaaaagatggttcaattggagaacaaagttttcgtttttacgagcgtctcgcaaaaggcggtgtcggatatatagtaattggagatgttgcaccacttccaacattctctcctacaccaaagctttattcacctgagcaggttcaaagcttcaaaaaacttgctgacgcatgtcatgaaaatggtgcaaagcttggaattcagttattccatcctgactacaatgttaaagctttaaacgatatgtttcatcagggcaaaatgcaggaagcaagagctaaacttcaccatgatatgcagcactttgtaaatgaagtaactgcagaagaacttgatgaaataataaagcatatggaaaactgtgctatcttagcacacgaagctggtgttgattgtattgaagtacatggagaccgtcttgttggttctctctgctctcctattttaaatcatagaactgatgaatatggcggtgacctggctaatcgtacacgttttgcattaacactcgtaaaaagattaaaaacaattgtacctgacatggttatcgactacaagcttcctatagttactcctcttggagaaaatagttttagaggaaaaggtggtcttccacttgatgaagcttgcatttttgctaaagaattagaagcttgcggtgttgacacattacatgttgcacaggctaaccatactggaaatatgggtgatacaatccctgccatgggaacacagccatacggatttatggtttcttattctaaaaaaatcaaagagcttgtatctattcctgtatctgtagtaggccgtatcgttacaccagaagctgctgaagcagttattacaaatggttctgctgatattattggattaggtcgttctcttctcacagaccctgactttgcaaacaaatgcgcagatggacattgctgtaatgtcagaacatgtatgatgtgtaataaaggatgtacagataatattcagaatcgtgctttcttaagttgtgtacttaatgctgaaaatggttacgaaggatctcgtcagattactcctgcagcatcaacaaagaatatagcaattattggtgctggtattgctggacttgaagctgcacgtgtttccgcattaagaggacatcatgtaactatatttgagaaatcacttcagattggtggtcagttacttattgctagtgtacctccaagaaaagaagaaatgatgagaagcattaattattatacaaatgtacttcctgaattggatgttactttcaggcttggtcaggaattcacatcacaggattataattcattcgatgaagtaattgtggcaacaggagcaaacaatgcaataatccctgttcctggcaaagatcttccaactgtagcaagtgcatgggatgtacttgccaagaaagaaatcgtattcggtaatgtttctgtaatcggtggtggtcttgtaggtgttgaaaccgctgaatatctggcttcacgaggatgtaaggttacaattattgaaatgatggatcagattgcaaaagaagaaagtaacactattttacctactctaatgagggaattagagcattataatgttcaaatagtaacatctgcaaaattatcagaaatcaaagatgattctgtagttgttgaaaaaacaatagacgacaatacatcaacagaagaaattgcttcagactttgttgtaatggctgttggtgcaagaaagaaccttccagagctttctgattgtcctcttccacttcactatattggtgattgtgctggagaacgtccaagtaatattgatcatgctattaaatcagcatatgatgtagcatgtgaaatataaattattaattaccctattaccacaaaggggctgccgcactaagaatgatgtgtggcagctttttttagattgtgttgaaaaattttgattaatataaaaatattatataacaataatgaggcgtacaatagttgtgacagtaaataatatgaaatttgacttgctattttgtgttggtgtatgcggtaaaatagtgtataattattaacaagatatgaatgtgaaatgcatttatattattaggaggaaaatgatatgaagtggggaattctggctacaggtaatattgcaagaaaatttgcatcaactataaatcagatgagtaaggaaaatgaacagcttgcagcagtaggctcacggcacatggatagtgcaaaagcttttgccagggagcatgacattccacgatattatgattcttatgaagcattggtaaatgatcctgatgttgaggctgtttatgtagcaacaccgaatagtttgcattatgagaattgcagactttgtcttgagcatggtaagcatgtactttgtgaaaaaccatttacaataaatgagaaacaggcacaggaactgtacaggctggcaaaggataagcatctttttattatggagggattatggatatggtttctgccattgtataatcgtctgcgtaatatcctgcttaagggaacaataggagaaattaaacatatttcctgtcagtatggatttgttgcaacgggtgccagaaaagagcgtaaatttaactctgcacttggtggaggtgctctgttggatataggaatttacaatctgggatttttgcgtattgttacagggtgtgatccgcagaatgtagaaactacaaaagtacatattaatgagaatggaacagatgattacagttgtctcaaactgacatataatgatggatgtattgcagaatcagtccagacaatagggcaggagttaaaacgtaatgccagaattgagggaacaaagggaagtatatttttaccggatttccaacacgcaaagaccttgatacttgaggtggatggtaaagaacctgaaacaatcgagtacccagttgatataaatggatttgaatatgagattcgtgaagcaggcagatgcatagcatcaggaaacagcgccagtgctatttatacaccggaagatagtattgcacttacaaggctgatgtatgatatccgtatgagctggaatatgatatttgatggtgagatacaggcataaaccgacaaatagcttatttcagataaattgacaatgcaaaataataaagaagaatatgggggatatgtgtattctatgtgtcattgcgccaataatcaaaaagattacaggatatgacaaaaatattaataaatgagtaaatgatgtgagtatgttatactctagtttgtaaaaatagaaaaattggagttgtgtgcccagacaaagggcgagtagtctaacaggtggaatacctgtctggtaaggtttaaccaacagccagtagcataagcagatgccgttattcagacaagtgaagatgaaatgaaaatgttttgtgatagattaaacaaaaagtaaaaattatatcaaatgataagaatttacataacttaataacttatggtcttgattgcgtatgcttaaatactgcttgtaaaagatgaggttgtaggtggtgataaacttacctatgatgagtatcttgagattatgaagaattccggaaaagagagcaggcattattttgaaatggtatatagaaactgtggacttgaatttaaaggccgcatagagaagaaaaatcatcaaaatatatgttttgagagaatctatgtatccggaatgtacatggatggtgtttgctttgacgataaagaagaacatctcattgcagctaatggcgaccatatattgaatctttctgtggtttatcatctgttactggttcaataaggaaatctaaaaccttacgctgttcacatctatattgtaaaatccccaatatcagtaataatttttttaaacatttaaaatcataactcaaatattgtattataactttatttgagttataatacataaaataagttatgaatggaggcatatatatggaatatctccaaaaagttctaggattgaaactgacctatataaatgatgacattaaacatatacccaattttattggaacaagatatgttctgcgtaatgtactattggatagacaaaaagctgtttttatatatcctaaaacggaactagagcagattgaaacgttaaaaaaacatatttcaaagataaaaagcatagtgaatttacctgttgttatgattctggacgaaatcacatatcgtcagaaggaatatttgcttcgggagaagattccatttgttgtaaataataaacagatatatctgccttttatggcgttatatttacaggaacgttgcaatgcagaaacatttcctaatgaggaaatacttccttcagctcaggttctgttgttgtactttatatataatgggactgttgaaataacaacgagtcaggcatcaaaagaacttggactcacgcctacatctatttcaagggcttctcgtcagcttgaaaaattaggattaatacagaccatgaaaacaggtaagcagaaaattatacattctgatagctcacccaaagagttatttgagagaactcagcagaaattacttaatccagtaaaaaaaactgtatatatacctaaaaattgtgtaacttctgaattgttagaaagcggatatttcgcattagctcattatacaatgataaatgttccacaaatcaaatgttttgcaatagatagtatttcgcgttggaaggatgttatgacaaataatttacttgattcagaaaatcaaatggcagttgaaatgtggagatataatcctcatttattatcaaaagaagataaggtagatgaactttctctagcattgtcattgagagatgatgcagatgagcgggttgaagcagcagtagatgagatgttggaaaaattatggggaaaaatataa

SEQ ID NO: 293 - DNA, 17158 bp, unidentified
  source 1..17158: mol_type = unassigned DNA
atgatgactaataagaagcccgatgaacgcctggatgatctccaggtgaagggctatgagattatacagaagcccggtcggttctgctttggcatggacgccgtgcttctgtcttcctatgcaaaagtaaaacgtggggaacgtgcactggatcttgggaccggaaccggaattcttccgattttactggaagcaaagaatccgggacttcattatacaggtctggaagttcaggaagaaagtgctgatatggcaagaagaagcgtggcacacaacgggctggagaacaagatagatatcgttaccggtgatatcaaagaggcaagtcacatatttggaaatgattcgtatgaagtcattgtatccaatccaccgtatatgattggagaacacggcctgaaaaatgataacgaggctttgtatatcgcaagacatgaagcgttatgcacattagatgatcttctgcgagaaagtgcaaaagtactgaaaatgaaaggacgtttctacatggtgcaccgtcctttccgcctgccggaaatctttacaaaaatgtgcaattacggaatcgagccgaaacgtatgcgtctcgtccacccatatgcagacaaagagccaaacatggttcttatcgaaggcctcaaaggcggaaaaccacgcctcgccgtagacccgccgctcatagtctatacgaaagacggggagtatacggaagaagtactgaaattgtacgggatgaaataaaaggagaattatatgtcaggaacattatatctgtgtgcaactccgatcggcaacctggaggacatgacatttcgttgtgtccgtattttaaaagaagttgatctgatcgcagcagaggatacccgcaatagcattaagcttttgaatcattttgatattcacacaccgatgaccagttatcatgaatataacaagattgcaaaagcgcatacgttgatcgagcacttggaaaatggtgaagatattgcactgatcacggatgcgggaacaccgggaatctccgatccgggtgaggagctggtggcaatgtgtcaggaagcaggaatcactgtgacagcagttccgggggcagcagcttgcatcacagcgctgaccatttccggattgtccacaagaagattcgcgtttgaagcatttcttccgacagataaaaaagaacgacaggcagtgctgaacgaactgatggaagagacaagaactatgattatctacgaagcaccgcacagactggtccggacattagagcttctgcttgcgaccttgggtgacagaagaatccgcatttgccgggagcttacgaaaaagcatgagaccgtctttgcaacaacgatcagtgcggcagtggaatattataaagagcaggaaccaaaaggggaatgcgtgcttgtcattgagggtaagagccgtcaggaacagatagaagaagaacgccagaaatgggaagaaatgtccattcaggaacatatggattattatatggatcaggggattcagaaaaaagaagcaatgaaaatggtcgcgaaagaccggggagtcggaaagagagacatttaccaggcgttgttgtaaaaaagtaatgatggataaaaagcctgaattacagtagtcaggggaagacaaagaaaggggctgatcagatggcaagtctgacattaaaacatgtagatcgcgcatttccgaatggatatgaggcagtaaaggatttaaatttccagattgaagacggagaatttgtaatattgactggcccatccgggagtggaaaaagtgctgttatgcgcatgatcgcaggtcttgatgaagtgaaaaacggagagatatggattggagacaagctggtcaacagtcttccaccggaggagcgtggaattgctatgatttttcagaattatactgtgtatccacgaatgacagttctggaaaatgtagaactgggcttaagacttcgcggcatagatgaaaaagaaataggaaaacggacactggaagtgatggaacttctggatcttgtagaagtccgatttgcaaaagtaaaaaacttgtcagatctgtggaaacatcggaccgcgctggcgcgtgccatgattttggagccagatgtaatcctcatggatgagccgcttcgcaatgtaagtcccaaattccataatcagttgactcaggagctggtggaattgcaggagagaaccggagttacaatactgtatgctacaaaaaatgtggaagagatggcactattggggaaacgaaaagtgatggtgtaaaataaaagaaatatattattaaaaagggttggaatctaggtttcaacctttttctatgtaatgctttacttctagagaagagtatgctatgatatgtccaattcaggaggaagtctagtctccgaatattcaagccgtaaggtgttcatttcggcgtttcgaattctgaaacaattacccgatatgaaaaatgtaacttgtaaacgtaggaagttctattgaaaacaggtaccaaaaaaattataatgagaggagaattagatggacaaaagaaaaatcatagaatggcacccggcatttgaagcatctattcagattgaatttgaaaatgaaattgaaaaaatgacatttgaaccggaacatttattatcgaaacagccaatgcggattgatgaattggtgattaaaattcgtggtgaagaaaagattcaaaagaacataggacggatattccgaaagcacaatattattgaatataaaagcccggacgattatctgacaatcaatgatttctataaagtatatggttattgctgcttttatcagtcggatacagagcatgtgtgtgaaattaaaccggaagaattaacgattacttttatttgtaatcattatcctgtgaaaatgctccggcatttacaagagtttcgcaaactgcaaatagaatgtgttgaatctggaatctattatataacaggagatgcatttcccatacagttactcattacaaaagagctggataaagaggaaaaccgctggctctgtagtctgaggaatgacatcacagatagaatggaaattgaaaatctagtgagacaatatgaagaaaagaaaaactctaaattataccaggcggcaatggaagttatcacgcgagcaaactggaaggcaatgaaggaggtaaaatcgagtatgtgtgaagcattaaaagaattgatggcagaagaatttcaagaggtaagagatcaggtaacagaagaagtgacagaacaactcatttgtaatgcgtataaaaatatcggtgatttggaaaaggtttctgagatactaggagtacctgtggaaactgttaagaaagcagttgaaaaagaaaagtaagaaaaggtctgacttttaaaaagatttaagtaacaaaaggggaagatttcataagaaggatttgtggaatcttcctctttagggtatttggttaatatttttaaaataatattttgtgtttttagtagctaaaatgtaaggcgttttgacattttaaatttgagacagtaattaattaaaggtaaagctttcgttatgaagagttagatattccagtagatgaaaaaatcagggaggaattgaatgatatgtgtaatttatcagaaggtattgaagaaaagggaatgaaaaagggtgaataaatggttggacatatgtcatgtgatgtgctaatatatacatgtatacaatctggaaataaaggtaattattaagaagaatataattacaggtaatcaggaggactagacatgttgaaattatatgacggcggtgcgtatctggtaaatggcaccgagatcattacggacgaagcagaagtaaaggcaaagacaggccgtgaggtatccaaggaggaagccagaacgcagacaatggcttacggaattttagaggctcataatatatcagataatatggagagactgcagatcaaatttgataagctgacatctcatgacattacatttgtcggaattattcagacagcgagagcttcaggactggagaagtttccaattccatatgtattgacgaactgtcacaactcactctgcgcggtcggcggaacgattaatgaagatgatcacatgtttggactgacttgtgcgaagaaatatggcggtgtctatgtaccgccgcatcaggcagttattcaccagtttgcccgtgagatgctggcaggcggcggcaagatgatccttggatccgacagccatacccgctatggagcacttggaacgatggctatgggtgaaggcggaccggaacttgtaaagcagctcctgaataagacatatgatattaagatgccaggtgtgattggaatttatctggacggagagccggtcaaaggcgtcggaccacaggacgtggcacttgcaattatcggcgcaacatttgcaaatggttatgtaaacaataaagttatggaatttgtcggaccaggtgtggagaagttaagtgctgatttccgtatcggaatcgatgttatgacaacggagacaacatgtctgtcttctatctggaaaacagatgataagattaaggagttctatgagatccacggcagaagtgaagattacaaagaactgaatcctggtgcagttacatattatgatggtatggtctatgtgaacttaagcgagatacgtccgatgatcgcaatgccgttccatccgtcaaatgtatatacaatcgacgacgtacgtaagaatctgaaagacgtgcttcacgatgtagagcagaaagcactggtgagcctggatggtgctgtggattattcacttcaggataaagtgattgatggaaaactttatgtggatcagggaatcatcgcaggatgtgccggtggtggatttgaaaatatctgcgcagcagcagacatcataaaaggtcattacattggctcagatgaatttacatttagtgtatatccggcaagtacaccaatctatatggaacttgtgaaaaacggtgcagttgcggatcttatggaagcaggaacaattgtaaaaacagcattctgcggaccatgctttggagctggagatacaccggcaaataacgcattttctattcgccactctacaagaaacttcccgaaccgtgaaggttccaagcttcagagtggacagattgcatccgttgcacttatggatgcccgttcaattgcagcaacggcagcaaataaaggcttcctgacacctgcaacagatatggacgtagaatacaagggacagaaataccactttgaccagaagatttatgcaaatcgtgtatttgacagtcatggtgtggctgatccggatacaaagatcaagttcggaccgaatatcaaagactggccggcaatgtcagcacttccggagaatctggtattgaaagttgtatcagagattcatgatccggttacaacaacagatgagctgattccatctggagaaacatcttcttacagatccaatccacttggactggcagagtttgcactttccagaaaagatcctgcatatgtaggacgtgcaaaggaagtacagaaagcacagaaagcaatcgaagcaggcgaatgtccgttagaggtattggaagaattaaaaccggttatggcaaagatccaggagaaatatccggaagcgggaaaaggaaatatcggagtcggaagtacgatctttgcagtaaaaccaggtgacggttcagcaagagagcaggcagcttcctgtcagaaggtgctcggtggctgggcgaatattgcaaatgaatatgcgacaaaaagatatcgctccaatctgatcaactggggaatgcttccatttatcacaaaagaagacgacaagaaattaagcttcaaaaatggcgattatatctttgtaccggaaatcagaaaagcagtggaaaacaaagatgcagagatcaaagcttatgtagtcggagatacattgaaagaagtcacatttacacttggagatatgacagacgcagaaagagagattattctcaaaggttgtctgattaattattataagggctaaataatccgataggtaaaattcacgttctatgttccgttgcactgggaattacgctgaattttatcttgcgcagtattttcggcggtaatataattgaataaacgaatgtaaataaaaggcggcacttatgaaaaaaagtgacgcctttttgtaacacttgggatattttgggactcttatatgtagaagaagtaataatactttttacactgggtattgggaacggcagttggataagtcaatggaggagtgtggagaacttcttgaaaaaaacaaattgaggaggaaaaagaatgaaatgtgatgtaaaagcattttcaaagctatatgagcaggtctatcaagacctctatcgctacgcgctttgtctgatgcgtgatccgcatgaggcagaagacgcggtgagtgcggcagtgttatctgcttatgaacatatacataaacttcgaaaagaagaagctttcaagagctggatttttacaattttgtcaaatacatgtaagaaaagattgaaacaggtggcgaaagaaggaatacagcagacagaagattttttcccggaaggacaggtggaaggaattcatgaagaagatgtgggacttgcgatggatgtgagaaatgcattttttattctttcagaagaagagcaaatgatagtcgggctatcagtgtttggcggttataacagcacagaaatcgggaagatcctaagcctgaagccgggaactgtccgggtaaaacgaagccgggcgctggagaagatgcagtgtgtgttggatgggaggacattttatgaataagaatgagcaggacatgattcggaaaataaaggaaaagtcagaacaggttccggtgccgaaagcgcttgaaccgagacagattgaagcaaagcttgcaggaaagaagaaaaaagtgtggactccggcgagaatcggtgggctggcagcagcatgcctggtgctgatcgtgggagtgatggtatatcagaattattttaaaatggaagacgcgactcgagatgataagatagcatgcagtgatgtgacgatcagtgacagtacgaaagtagaaagtgcggcggagtataaggatgtctatgcatatttggaaaaatataagaaagatcaggaaagagacagtgcatacacttcaagcggggcaagatcattgaatgatataagagtcgatgaatcagctgacagtaaggcaagcggagatgcagcacagaatattgaagaaagcagtactgcagcagcggacaccggaatggcaagcggttcttattctgagacaaatgtacgtcaggaaggtgtggacgagggggatacagctaaaacagatggaacatacctttacgtgttaaaagataagagcgatcagattgccattatagatacccgcgataatcggatgaagcaaacggctactataacagtggaagatgtttctgaaatccaggaaatgtatctggacattgagagaaatcaattaatcgcagtgtgtgacggttatgtgggcggtaaatggaatgatgatgattatggatatggtcagagggctaatacgaccgcagtaacttatgacatttcagaccgggaaaatccaaaagaagttggcagggtcagtcagagtggatattacaattcttcaagaattgcagatggatacttatacttattcagtgattattatgtaacacttgatggtataacggcgaagaatccgaagtcctatataccacttgtaaacgataatctgatcaaagaaacagatatctgtcttccgtccatttcaaaggcagatatgtattcgatcatcacatcagtttctctggaaaatccaaatgagacagcgcacagtaaggcacttttggcagacggtggcaatttatatgtgagcaacgataatatttatttttatgaaaatgtgtggcaatattccggaaaagatgtgacgacaatccgaaaagtttcttatgaaagtgggaaattgacggctggggcacagtgcaaaatagacggctatattaatgattcattttctattgatgaatatgatggatatctgagagttgtagtgaccgatggcgacacgaacagtgtttatgttttgaatcaagaactgaaagaaactggctccatcaaaggtctggcagaagatgagagggtgtactccgcaagatttatgggaaaggcaggatactttgtaacatttaaagagacggatccgttattttccgttgatctgtcggatccgaaaaatccaaagatcataggagcgttgaagatacctggattttcagattatctgcatccgtatgggaaaaataagcttctgggtattgggatgaatgttgatgaaaagactatgtcaacagatggcgtgaaattgacgatgttcgatatttctgatccggaaaatgtgaaagaggagcagacctatgtcattgaaaatgtgtactatacagatgtttcttatgattataaggcagctttagtagatgcagagaaaaatctgattggttttgctgcagacagcgaaggcggccgggagtactatacattttcttacgacgaaaaacaaggatttacatgtacgatgcatgaggaaatcaatggaaataatatgaggatcacaagaggtatttatatagaagatacgctttatgttatccagggaaatattatagaagcgtatagcctgaaagatttcaaaaaagtggacgatatcattttgtaacatttttgtaacaaaatctcgtatgtttttgacaataagactggtgtatgataaacttgtatctgtagaattgtcaaaaaatttgaggtgagaatattggataaatatgaatatcgggtaaaaaccgagcagatgctcgaacattacgaaaagaaacaatttagaaaagcaatggaaattgccgatacaatagactggagaagggtgaagagcccagcaatgttaaatacagtaagcgaaatctacgagaataacggggagtttcagaagagccgtgatacgcttatgatcgcatttgacagagcaccgtccagcagaaaggttgtgtatcgtctggcagtacttgccctgaaactgaatgatctgaatgaggcttcggactgttatgaggaatttgtaaaactggcaccgagagatccgaatcaattcattttgaaatatcgaattttgaaggcacaagggtccgatctgtcagaacagatttcggcactggaagaatttaaaaaggcagaatatattgaaaaatgggcgtatgagctcgcaaagctatatcatgaagcaggcatgacctcaaagtgcctggaagaatgtgacgatttgatcttgtggttcagcgaaggaaaatatgtatatcaggcaatggaattgaagatgaagtacaaaccactgacaccactccaacaggaaaagtacgatgagtataaaggtgtaccgaaaaaagagcctaagaaagcagtggataaaaaacctgagcgagctgcgcttaaggatgtaaagagtattccacaggatactgtatcaattccaaaagaacagattaaagcagcgcaggaagcagcagaagctgcggaggcagaacagcaggaatcaggagccaatacaacagaaactgtggatggtctggatgcaacgagaagaattccgacagcagagcttggagaagcattgaaggcaatggaagaaaatgccaaggcagacaaagaagttccgatagaagaaccggttttagaagaaccagtttcagaagagccagtttcagaagagccggaagaagctgtttcagaagaaccagaagttgtagaaatggaagcaccagtcattgaaccaatcggaaaggaaactccggaagaagctcggaatgtcagagagttagaaggaattcttcagcatgcggcagaaggaccaaaaaagtctattacgacagttgtgaagggtgcgacacttcaagaagcactggctaatggtgtagctatggcgagtggaattaatccggaagaccagaagaagatggaggaacgagaagaagaactccgcattgaaggtcagatgaagattgaagacatcttgatggaatgggaagctaagcagaaggtaaatgctgaggcgattgcaaagcaaaaagcatccgatgaagaacgacttagaaaagagagagaagcactggaagcccgccgagaggcagaaagacttgaggcagagagacgcgaggtagaagaaatagcaagacggaaagcagaagaaaaagcccgtcaggaagcagaagagaaagcacgccgtgaagcggaagagaaagctcgccttgaagcagaggagaaggctcgtcgtgaagcggaggagaaggctcgtcgtgaagcggaagagaaggctcgtcttgaggcagaggaagcaagaagaaaggcattgctttctgatgatatcagacagcttgtggaagaactggaagatcgtgtgacagcacaggagaaagaagaggaaaattttgatatagaagaggaactggagcttgcaaaagcagaaggggaatctgttgaagaagaaattgtagatcagtttatttcggaagaagagctggacgatattgtggaagaacctgaagagtctgaagaagaacctgaagaagagattgttgaagcagtttcggaagaagaggagacggaggacgaggattctgaggatgaagatgatttcgaagaggaagagtttgaagacgaagactttgagggtgaggacgaagagtttgaagcagaagatgaagtcgacgctgtagaagaaatcgaagaagtacaagaagatgaagaaattccggaaacagaaaaccaggatgattcggaagacaattccgaagacgaggatgatttcgaagacgaggaatccgaagaagatgattttgaagaggaagatggattcgacgaagacgattttgacgaagatggttttgtagatgaattcccggaggaagatgaggaagaagtagaggaattcgatgcagagtggaatgaattcccggaagatgaatccgaggacgaagacgatttcgaggaagaggatgacttcgaggaagaggacgactccgaggaagaggacgacttcgaggaagaggatgacttcgaggaagaggatgacttcgaggaagaggacgatttcgaggaagaggacgacttcgaggaagaggacgactccgaggaagaggacgacttcgaggaagaggatgactttgaggaagaagacgactttgaggaagacgatgacttctatgaagatgattatgtagaagacgacgattacgaagaggatgactttgaggaagaggacgacttcgaggaagacgatttcgaggaagaggacgacttcgaggaagaggatgattttgaggaagatgatttcgaggaagacgactttgaagatgagcttcctgagattccggatccggaagaccttgaaggagacttggaaattgaagaaccatctgaggaagagattcagcgcagaattaagaagtcaaaaggaagcggagttccatttgataccggatttgttgtaacaggaagatatgacttaagtgcaaccagtgagattggactgaaagccggactgacagaggagcagaagaaattattctcttacttcgtaccggtcagaggaatgagtgaacagattgttgcagtacttgataatgacagacgtgcccagagagagggaacttcaagaaccggtaacttaatgatcattggccgtaaaggatctggaaaaacagtacttgcagtagatattgtaaaagcaatccagaaacaaagaaatctgaaacagggtaaggttgctattgttacaggtgaatcgctgaataagaaggaacttggcaatattatccagaagcttcgcggtggagcgatcatcatcgaaaaggctggtaagttgaattctagaacaatcaaggaactgaatgcattgatgtcaagaaagaccggagagcttctctttgttcttgaagatcagagaaaacctctggagagaattatgacagctaatccggatttcaaaaagaaattcacttctaagcttgaacttccggtattcatcaatgatgagttagtaacatttggtcagacttatgcgaaggaaaatggatataagcttgatgaaatgggaattctggcactttacagccgaattgatgtaatgcagcgtgaagatcatgcggttacagttgcggaagtaaaagaaatcatggatgaagcaattaaacattcacagaaagcaaatgtaaagcatcttgcaagacgtgtatttggaaaatctacggattcgtcagatcgcattattctgaaggaagaagattttaaaatttaatgatatagtgaatgtaagtgatgaagcagggatacaattgtagaaaattgtatccctgttttttgtctggaatcgagtgacatagattgaattttgtgttccgctaaggtatacttaagatattgaaatccggatgaaatgtgagggaagtttatggagaaagaatggaaagcttatgaaatcggagaattagatcagtaccttttcggacagggaaatcactacgaaatttataagaagctgggtgcacatatggtggacgacgaagggcagaaaggagtttattttgctgtctgggcaccgaatgcgaaatcagtgtctgtagtgggggaattcaatgactgggatcgcacaagaaaccctatgacaagggcggaatatatcggaatttacacatgctttgtaccgggagtaaaagaaggcatgatgtataagttctgcattgagacgattacaggggagtatcatatgaaggcagatccgtatgccaattatgcagaacttcgtccgggtacagcatcaagaataacgaatattgagaatttgaaatggaccgatagttcctggatgactgcacgggaaaaatggaaccacaaaaaagaaccaatgtctgtatatgaggttcatatgggttcctggaagagacacccaggcacagaggacgagggattctatacttatcgtgagtttgcaaaagaaatcacaaagtatatgaaagatatgggatatacgcatgtggagatcatgggaatcgcagaacacccatttgatggatcatggggatatcaggtgacaggatattatgcgccgacaagccgttatggaacaccggaagattttgcgtggatgatcaattatctgcatagaaatggaatcggtgttattatggactgggttccggcacattttccaaaggacgagcatggacttgccgagtttgacggaacagcaacttacgagtatgcagatccaagaaaaggggagcatccggactgggggacgaagatatttgatcttggcaagaatgaggtaaggaatttcctgattgccaatgcacttttctgggtggagcatttccatattgatggacttcgcgttgatgcagttgcttctatgctgtacctggattatggaaagaaagacggagaatgggttccgaaccagtatggaggtaatgagaacctggaggcagtagatttcttcaagcatctgaacacagttgtacttggaagaaatccgggtgcacttatgatagcggaagagtctacggcatggccgaaggtaaccggagatgtagaagacggaggtcttggatttagccttaagtggaatatggggtggatgcacgactttacggaatatatgaagctggatccgtatttcagaaaagacaatcatcatatgatgacatttgccatgagttatgcgtacagcgaagattacattctcgtactgtcgcatgatgaggttgtccatttgaaatgttccatgatcaataagatgccaggacttggatttgataaatatgcgaacctgaaagcaggatatgcatttatgatgggacacgccggaaagaaattgttgttcatgggacaggattttgcacagcttcgcgagtggtcagaggaacgtgaactggactggtatctgttggaggagccggagcatcaggcaattcagtcatggatgcgtgatctactccacatgtataaaaagaaacaggcactttatgaactggatcagtcatgggaaggattcgagtgggtcaatgcagatgatgcatacagaagcatttacagctttatccgccattctaaagatggaaagcataaccttctgttcgtgatcaacttcacaccgatggcaagagaagattaccgtgtaggcgttcctagaaagaagcagtataagctgattctgaacagtgacgatgtgaagtatggcggaaatggcgagaagagacagaacatttatcatgccgtgaagaaagaatgtgatggaagaccatattcatttggatacaaattgccgccgtatggggtagcagtttttgaattttaaaatatataataagagaggccagctcgaaaatataacgagaatcactcaatgattttatcaccgcctggtgctacttttattatgtgatttacgccgggaggtgtggaagagaaacagggagatggaatttgagtattccatctccctgctaaagttatgaattaattttattctgcgtttgtagaagtgtcgttatcagcattgttgtcggtgctgcctgtatcggtgttgttgtccgtattttcttcgactgcgtcagtgctatctgtattatcggagttttcggtatcatcgcctccgaacagatctttgaaaaatcctacgattttatcccaaagtccttcctcttttgcctgatttacggcatcgtttgctttggcttttacggcatctaatgtgctgtcgatgattgcatcatttccgagtgctgcatcatctgtattgttaataattccgccgttggagtcatctccgccaaagaagcctttgatggaggaccacaagttgctgaagaatcctccggatttcccgtccaggttgtcgagagtctttttcagtgctttgacatcgtagtcgtactgggaaatagattccatcagacttgtgattttcgcaagctggtcatcggtcagtgtaattccctgcttatcggctgcgtcagaaatcgcgtcctgaatatcggatggatcagtcagtttgtcttcaataacggattctttgacatcgttgatcagatcagatgctgtatcctgaccgagatccttggcgaggtcaccggttgttaccagctcttctgttgcagttgctttctggtcttcggaaagttcttttccactggctttttcgtaagccatcataatacctgtcagtgcaccggttccagatacttcaattggagatccggcaacaacgttacagttctcaacgccggaagtcaaaagtgtactggcaatcatagaacttgttacaaatgtcaggtttgcgacttttacctgaattccgccgctgtctgtcggctcaacataagaacagctatatgttcttgtaccaatctgggattcggtcgcgatcccttccatatattttctttcgtctgtgttcgtgacttcgatcgtgtctacctgatcggcggaagtaccgaagtatttgtacatagaagctttctgttcgtcggataagttcgctccgagagtgactacttttgcgctgtcagccagggcagttaccggcaggcttacagatgccagaatgattgccaggctaaacggcagaaccctttttaattttttcatactcataattatcctgtggtgtcagacgccacatctcctttctgtacacccaataatagcatacttgtgtaaaagtaaaaagtaaaaaattcttaactatttcgaaagattttgttacggcttgtgtacatctgtggactaagacaggatttccagcattctggattcaaatgtgtgttcatccaccattccacccatgacactgactgcctttttatctttgaagagaacaaatgtcgggacgatttccggagcgtattctgcggcgagtactgcagattcttcaatttcgacttcgcagaacttgatctttccggcgtatttcttttcgatatcctccacgaccggcttcatcatggcacatttcccacaccagatagcgtagaacataacgacgaccgggagagaggtatcttttacttctatttgaaaattttttgcagttaaatgtaacatcaaatcaacctttctgatcagtgccttcggcagtcagaaccgtggttcagaatatcatatacttctttcagggattttctgaaacaaccgatccacctgtgcagacaccgatttcgataagtgtattcaaaaaacttttgtcggaagttttttttgttatgacaatttcggctcatggcgaacagactccgaaggctttctcattaataatatatgcgctgtagcgctaagaaagtcacagcagacatcttcttttagcaatgagcttgcaaatcgggtgatccatggatgaaaatttctcttcatattctgtcataatatttccaacgttcataatttcatcatggtgcaggtcataagtacattcggaaatgccccatgtttcggattcccctaaagactcaacggaaaaatcaaaaagatcacggttatctgtcttgaattctacctgtccgtcctggacaagcaccttgtcgtaacgtgcaaaaaaatccggtgacgtgaggcgccttcttgcatggcgggctttcggccatgggtcggagaagttcagatagatccggtcaacttcattttcagcgaacacatttgctatgtcctgtgcatccatacaaatgaagcgaatgtttggcagagtgctttcgttttcttctatatatatgtttaacttttccacagcacggagaaggacgcttgtgtagcgctcgattccgatgtagttgatctgtggatttttctgagccagtgccatgagaaaacggccttttcccatgccgatttcaatgtggaccgggtagtcattctggaatacatcagatgcccagtgatcacggaattcttccggagtctcgataacctgactgcactcttttaacacgccttcggcgcggggtatatttctaagtcgcat

SEQ ID NO: 294 - DNA, 11230 bp, unidentified
  source 1..11230: mol_type = unassigned DNA
ttggaaaccgaaacagtcacaggatacgttgatcatataatatacagaaatgcagaaaacgggtatacggtacttgttcttgtagtgaacgaggaggagctcacatgtgtgggcactttttcggacattgctgagggtgaaaatatagaggcgcatggtgagtatacagagcatgccacctatggcagacagtttaaggtagtaggctttgaagagaaggagccggaggatgagatggctattgagaggtatctgggctcaggagccatacatggtataggacttgcactcgcagcacgtattgtcaggcgattcaagaaggataccttccgcatcatagaggaagagccggagaggcttgctgaggtaaagggcatcagccagagaaaggctatggagattgcggaccaggtcaatgcaaaaagagacttaagggaagccatgatttttttgcagcagtacggcatcaatatgaatctggctgtgaagatatataataagtatggcggagagatatacagcgtgctcaaggaaaatccgtaccgcatggcggatgatatcgacggagttggttttaaaactgcagatgagatagcggcgcgggttggcatcaagactgattctgattttagaataaaaagcggtatacagtatgttttgcagcaggctgccatggacggacacacatatctgccgatggaggagcttacgaggcgtgctgtatatctgctcggagtggaaagctcgcaggttgaggcacattacatgaatctggccatggacaggaagattgtcatgcagctaaaggatgatataacccagatttatgctaataccttttattatatggaggcaaacacggcagccatgctaaagcagcttgatgtgacgtatgatgtgccggatatcgagatagaggctgcaatcagaaatatagagaaaaagacagagatggagctcgatgagcaccaggtagaggcggtgaaggaagcagtcagaaatggccttttagtcattaccggaggacccggaacaggaaaaaccaccaccatcaacactattatcaagtattttgagctggagggcatggatatttttctggctgcaccgacaggccgtgcggcaaaacgcatgagtgagacaacaggctacgaggcgcgcacaatccaccgtatgcttgagttaaacggcggcatggacacaggaagcgcagctggctttgagagaaatgaaaggaatccgctcgagacggatgtaatcatcatagatgagatgtcgatggttgatatatcactcatgtactcattgctaaaggcggttgtggcaggtacgagactcatacttgtaggagatgtgaaccagcttccgagcgtgggaccgggcagcgtgctaaaggatattattgattcaggtgccttccacacggtaaagcttacaaagatttttcgtcaggcgagcacgagcgatattatagtaaacgcccacaagataaataatggagaagaggtatcgttagataataagagcatggatttcttttttctaaagagatatgatgccgacaagataataaatgttacattacagctgataaagcagaagcttcctaagttcgtaaatgctacagagtatgatatacaggtgcttacgcctatgagaaaggggcttctcggagtggaacgtctaaacggtatattgcaggcgtatatgaatccggcagacaagagcaagcgcgaaaaagaatacaggggcacgattttccgcgagggcgacaaggtgatgcaaataaagaacaactatcagatagagtgggaaatcaggacaaaattcggactttgtgtggataagggcatgggaatcttcaatggagatacaggtatcattgaggaaatcaacgattttgccgagaccatgaccatatcctttgacgagggcagaaaggtggagtatccgtttaagcttttggaggagcttgaacttgcatacgcggtcactatacacaagtcacagggaagtgagtatccggcggtcgttatacctcttttgagcggcccgagaatgcttatgaacagaaatttgctctatacggcggttacaagagcaaagaaatgtgttaccatagtgggtgacgaacagacattttacgagatgatacaaaacaactcacagcagagacgctatagcgggcttagagacagaatagtggaggagactatctgatgaaaataagaaaacttacaaatgaagagataaaaggggcatgtgcctttgcggtaagtatatacaatatcgcaatcagaggctgctttcggacacaggactgtcatcgatattttgatgaatatatggatgcagacaggctgacggacgaggaaaggaccggtgttcttgtagtgtttggtgcgtttgatagcaatgtgctgtgcggagtatgcggcatgacaaacgaggggcatatcaccatgctgtatgtacatccgcagtatttaagacgtggaattggcaaaaagcttctggagagagtcaggatatatgcgcgcatgcagcttaagctcatgcaggtgtctgtaaatgcaatgccggcatacacggcagactacttcaggcgtgtgggctttaagagtgcatatcagggaggcttttgcaatggacaaggcgatatgtacgttcctatgacagcaaaaagcatatatcaggtggagtatacaccgcgacatatagctgataagacttttattgcaatttcagttggcttcacatgtcttgtatttttctcaggcgtgatatatgcggtatgcgcgggacttactccgtaacgctaagatgcagttttaatgggctgcaatagttgccggtcatactttggtgtgaacagtaactaacattgtatacataaatatgcatatttatgtaacaaaaaacagttgaaaaatcggctgtattatgatacactttttacaatttaagcagatatactatgcaactacactttataagaaaaagagacgccctctttttttttgcgcagacgtaaggttagttgcagctaagaagcttatggttacaaagtataacacgaaagggcagggtaaagatgaaagcatttttaattcttgaagatggtaatgtatttaccggaaccagcattggttcaacaagggaagtcattagtgagatagtatttaacacatcaatgacaggatatctggaggtacttacagatccttcctatgcaggacaggctgttgtaatgacttatccacttatcggaaattatggaatcacaccggatatggagtcagaaagaccatggccggatggatatatagtaagagagctgtcgcgtatgccaagtaatttccgctgcgagggtactatacaggatttccttaagaaaaacgatattccgggagtggccggcattgatacacgtgcgcttacaaagattctcagggaaaagggtactatgaacggaatgattaccacaaatgagaattacaatctcgatgagattattccaaagctcaaggcatatattacaggcaatgtggttgacaaggtcacatgcactgagaaaaaggttttaaagggacaaggaaagagggttgccctcatggatttcggtgccaaaaacaacatcgccaaatcactcaatgaaagaggctgtgaagttacaatttaccctgcacacacaaccgctgaagagatacttggtgacaatcctgacggaatcatgctctcaaacggacctggagatccaaaggagtgtgtagatattataaaggaaataaagaagctttatgacagcaatgtgccgatttttgcaatctgcctcggacatcagctcatggcacttgcaacaggcgcagatacacacaagatgaagtacggacacagaggtggaaaccatccggttaaggatcttgcaacaggccgtgtttatatttcttcccagaaccatggatatgtggtggacacagataaacttgaccctaatgtagctgagcctgcatttataaatgtcaacgatggcactaatgagggacttaagtatgtgaacaagaatatcttcacagttcagttccatccggaggcatgccctggaccacaggattcagcatatctttttgaccgctttattaacatgatgggaggtaaccagtaatgccaagaaataatgatattaaaaaagtattagttatcggttccggtccaatcgtaatcggacaggccgcagagtttgactatgcaggaacacaggcctgccgttccttaaaagaggagggcattgaggtatgtctggtaaactcaaacccggcaactatcatgactgataagcagattgcggatcaggtatatatcgagccacttactcttgagtcattaaaagagattatcataaaagaaaagcctgacagcatccttcctacactcggtggacaggcaggactcaatctcggcatggagctcgctgagtgcggcttccttgatgagcagggagtaaagcttatcggaacaacagcagagaccatcttcaaggctgaggaccgtcaggccttcaaggataccatggagaaaatcggtgaaccaatcgcggcttcacaggttgtaaagaatatcgaggacggtattgcatttaccaacaagattggttaccctgtagttcttcgtcctgcatttacactcggcggctccggcggtggaattgctcacgatgagcaggagcttatcgacatactttcaaatggacttcgcctgtcacgtgtcggagaagttctcgtagagagatgtatcgcaggctggaaggaaatcgagtacgaggtaatgcgtgatgccaacggcaactgcatcacagtatgtaacatggaaaatatcgacccggtcggtgtgcatacaggagattcaatcgtagtagcaccttcgcagacacttggagataaagagtatcagatgcttcgtacatcagcgctcaatatcatcaacgagcttcagattacaggaggctgtaacgtacagtatgccctcaatcctgactcattcgagtactgtgttatcgaggtaaacccacgagtttcacgttcatcagcactcgcatcaaaggctacaggatatcctatcgccaaggttacagccaagattgcactcggctatcacctcgatgagatcaagaacgctatcacacagaagacatacgcaagctttgagccaatgcttgattactgtgtagtcaagattccaagacttccgttcgataagttcctcacagcaaagcgtacacttaccactcagatgaaggctaccggagaggtaatgagtatctgcaacaacttcgagggtgctcttatgaaggctatcagatctctcgagcagcatgttgattcacttatgtcttatgactttacaggtcttacagatgatgagcttgagaaacagcttgcagttgttgatgacagacgtatctgggttatcgcagaggcgctccgccgtggagttaaatacgagcatattcacgagattactaagatagatctttggtttatcgataaaatcgcaatacttgttgagatggagaaccgtttaaagacagaggagcttacagttgacctgttaaaagaggcaaagcgtatcgagttccctgacaatgttatctcacagcttacagatattgatgaggctgatatcaagaagatgcgttacgacaacggcattgtggcagcctacaagatggttgatacctgtgcagcagagtttgaagcagagacaccatactactactcagtattcggcagcgagaatgaggcggcagagacaaatccacagaaaaaggtgcttgtacttggttcaggacctatccgtatcggacagggtgttgagtttgattactgttcagtccactgtacatggtcgtttgccaaggaaggctgggagacaatcatcgtaaacaacaaccctgagaccgtttcaactgactttgatattgctgacaagctctattttgagccactcacagctgaggatgttgagagcatagttaatattgaaaagcctgacggagctgttgtacagttcggtggacagaccgccatcaagcttacagaggcacttatgaagatgggtgtcaagatacttggaacaaaggctgaggatgtagacgcagccgaggacagagagctcttcgacgagattcttcagaagacaggtatcccaagagcagcaggtggtacagtatttacagctgaggaggcaaagaaggtagcaaatgagatcggttaccctgtacttgtccgtccttcatacgtgcttggcggacagggtatgaagattgcatggaatgatgatgaaatcgaagagtttatcggcatcatcaacacaatcacacaggatcatccaatccttgtagataagtaccttatgggtaaggaaattgaggttgatgcaatctgtgacggtacagatatcctgattccgggtatcatggagcacatcgagcgtacaggagtacactcaggagactctatctcagtttatcctgcacatactatctcagaaaaagcaaaagagactctggttgagtatacaaagagacttgcacaggcactccatgttgttggtatgattaatatccagtttatcgatatggacgacaacatctatgttatcgaggtaaacccacgttcttcaagaacagtaccatacatcagcaaggttacaggtattccaatcgtagacctcgcagcaagaatcatcatgggtgagacaataaagggcatgggctacacacctggacttgctccgacagccgattacattgcaatcaagatgccggtattctcattcgagaagctgcgtggcgctgagatttcactcggacctgagatgaaatcaacaggagagtgtcttggaatcgacaagaccttcaatggtgcgctttacaaggcatttgagggtgcgggagtcgagcttcctaagtacaagcagatgattatgactgtaaaggatgccgataagcctgaggcagtaggcgttgcaaagcgttttgagaagcttggatacaagatttatgctacaagaagtactgcaaagtacttacaggagcacggagtaaatgctcttcgcgtaaacaagatatcacaggagtctccaaacgtcatggatcttatcctcggacacaagatagaccttgtaatcgatacacctacacagggtaacggagacaagacaagagacggcttccttatcagaagaaatgcaatcgagacaggtgtttactgtatcacagccatggatacagcgaatgcacttgcacatgcattagagactgcttctgacaagaagacaccggttgacattgcaacagttaagaatctttaaaaatatatagaatatattttatccccggacagtatatcggatatgctgcccggggattgtttataaaatgaaaaatatgcaaagtttaatagaattttgacaaattattaacaaaaccaattgatttttacataaatttgtagtataataactttgttaaaaaattaacagcacggatgtgcaatacaatttaaaggagataatataatggcaaagaaagttgtaatcgcaagtgcttgccgtacagcaatcggcaaaatgggcggagcattaagcaatactccagccgcagatttaggtgcaatcgtaattaaggaggctttaaaccgtgcaggtgttgctcctgagatggttgacgaggttaagatgggttgtgttatccaggcagctcagggacagaacgtagctcgtcaggcttctatcaaggcaggacttccaatcgaggttccggctatcacaatcaatgttgtttgtggatcaggtcttaagtgcgtaaacgacgctgctacaatgatcaaggccggtgaggctgatatcgttgttgccggtggtatggagaacatgtcaatggctccttacgctatgacaaaggcacgtttcggatacagaatgaacaatgcaacaatcatcgatacaatggttaacgatgctcttacagatgcattcaaccactatcatatgatgatcacagctgagaatgtatgtgataaatacggcatcactcgtgaagagcttgatgagttctcagcaaactcacagcagaagtgtgaggcagctatcgcagcaggcaagttcgatgatgagatcgttcctgtacctgttaaggttaagaaagaaatcgttgagttcaaaaaggacgagggacctcgtgccggaacaacagtagagactctttctaagcttcgttgctgctcaggtaaagagggcggacttgttacagccggtaacgcatcaggaatcaatgatggtgctgcagcagtagttgtaatgagcgaagagaaagctaaggagctcggtgttaagccattagctacatgggtagcaggagcacttggcggagttgagcctgagatcatgggtgttggaccggtagcttctacaaagaaggttcttgcaaagacaggtcttacaattgatgatttcgatcttatcgaggcaaacgaggcatttgctgcacagtcaatcgctgtagcaagagatcttggtttcgatatgagcaaggtaaatgtaaacggtggtgctatcgcactcggacatcctgtaggagcttcaggctgtcgtatccttgttacattattacatgagatgcagaagagaggatctaacagaggtcttgcaacactttgtatcggtggtggaatgggatgttctactatcgttgagaagtactaattttctttgccaatagatatatgaggggatgcaggtgcatccccttgtagtgtgaattagtttattcacatcagtttatatatatgattaagttgtgctgcagaggcttagcacttaaagctttttgcaccataatatattttaggaggaattaaaatgaaggttggagttatcggtgctggtacaatgggccagggaatcgcaaaagcattcgcacaggtagatggatacgaggtagcactctgcgatattaagcaggagtgggctgaaggcggaaaagacaagattgcaaaaggatatgcaagacttgtagcaaaagaaaaaatgacacaggagaaggttgacggcattcttgcaagcatcactcctggtttaaaagaagatctctgcaaggattgtgacctcatcgttgaggctgctttcgaggatatgcaggttaagaaaactacattcgctgagttagacaagattgctaagccagagtgtattttcgcttcaaatacatcatcactttcaatcacagagattggaaacggacttacacgtccattaatcggtatgcacttcttcaaccctgctgaccgtatgaagttagtagaggttatcgcaggtgttaacacacctgttgagacagttgatgcaatcaagaagattgcagaggagatcggcaagacacctgtacaggttaacgaggctgctggtttcgtagtaaaccgtatccttatcccaatgatcaacgaggctgctttcatcaagatggagggcgtttcagatatcgccggaatcgatgcagctatgaagcttggtgctaaccatccaatgggaccattagagcttggagatttcatcggacttgatatctgccttgcaatcatggacgttctttacaatgagacaggtgacagcaagtatcgtgcatgcccactcattcgcaagatggtaagaggcggaaaccttggatgcaagagcggcaagggattctacgtttacaacgcagaccgcacaaagacacctgtagacgcacagtaggagcaataaagcctggtctcaaagcgtataaatgatgcaagcttgcttgcaaaaatttgtacgctttagagacgctaatggacatgagcaagaagcacggtagtgcggattgcgaatgtacataggattgcgggagcgaaagcgtagcaatccgtaggctttatataacatatatacgttataaaatataggtcttatgtagcttatatataaactataaagttatataagaattcaataacaaaacaaaaatcaaggagaataaatcatggatttcactttagatcagaaacatgagatggctcgcgaccttttcaaacagttcgcagagacagaagttaaacctcttgcacaggagactgacgagacagaggtattcccagcagagacagttgctaagatgggaaaatatggattcatgggcattcctgtaccaaaggagtacggcggacagggctgtgatccacttacatacgttatgtgtgtagaagaattatcaaaggtttgtggtacaacaggcgttattgtatctgctcatacatcactttgtatcgatcctattatgacattcggtacagaggagcagaagaaaaaatatgttcctgaccttgcttcaggcaagaagatcggtgctttcggtcttactgagccgggcgctggtacagatgcacagggatgtcagacaaaggccgttttagacggagacgagtgggttcttaacggatctaagtgcttcatcacaaacggtaaggttgctgatgtttacatcatcatcgctattacaagcatcacagaggacaagcgtggacgcaagaagaagaacttctctgcattcatcgtagacaagggaacacctggattctcattcggaacaaaagagaagaagatgggtatccgcggatcatctacatacgagcttatcttcgaggatgcacgtattccaaaggatgcattacttggaaaagagggaagaggtttcccaatcgctatgcatacacttgatggtggacgtatcggaatcgctgctcaggcacttggtattgcagagggcgcattagagagaactatcgagtacacaaaggaaagaaagcagttcggccgttcaatcgcacagcagcagaatacacagttcaagcttgcagatatggctacacgtatcgatgcagctaagtatcttgtatacgcagcagctatgaagaaggcagagtttgctaagaaccctaaggtttcttactcagtagatgcagcaaaggctaaattattcgcagcagagacagctatggctgttacaacagagtgcgttcagttattcggtggatacggatatatccgtgagtacgatgtagagcgtatgatgcgtgatgctaagattacagagatctacgagggaacttcagaggttcagcgtatggttatttcaggctcattactcagatag

SEQ ID NO: 295 - DNA, 28771 bp, unidentified
  source 1..28771: mol_type = unassigned DNA
agattgacagcggcgtttcgggcaaggctgccagccgcatcggcgaggtgctcaagcagagcgcaaaggaccaccagatcctctgcatcacgcacaccgcgcagatcgctgcactggctgactgccatctgctcatccagaaaaatgttgcaaacgagcgcacctataccgagatccatccccttgatcaggagggccgggtggatgcgctggcgcatatcatttccggcgaccatgtcaccgagctttcccgtgccaacgcgcgggagatgctgggcattgccgagcaggaaactcgtgattgacaagcttccggaaatgtgttaaactggctttcgttgaaaggcgaagaagggaataagtaccctgaagcgctctgcccagagaggccccggttggtgaaagaggcgtgcagagcagcgggggaagtacctcccggagctgcaagctgaatgaggagctttctctagtaggccgtgccgcgtgcgagcgttacaaacgcaggagtgtcgtcctactctggggcatgcactcgtgaggccgtttccgtgaggaggcggcaaacagaggtggtaccgcgatttttactcgccctctgccaaatttattttggcagggggcgttttcttttccctctgcccacaacaacaggaggaactatccatgactctctacgaagaactcaaggctcgcggtctggtcgcccagatcaccgatgaggagatcatcgacctcatcaacaacggcaaggccaccttctacatcggctttgactgcacggccgacagcctgactgccggtcacttcatggcgctgaccctgatgaagcgtctgcagatggcgggcaataagcctatcgctctgatcggcggcggcaccaccatgatcggcgacccttccggccgcaccgacatgcgcaagatgctgactaaggaagacattgctcacaacgcggcatgcttcaagaagcagatggaaaaattcatcgacttctccgacggtaaggctctgatgctgaacaacgccgactggctgctgaacctgaattacgtggagctgctgcgcgatgtgggcgcttgcttctccgtcaacaacatgctgcgcgccaagtgctatgaacagcggatggagaagggcctgtccttcctcgaattcaactacatgatcatgcagagctacgacttctactacatgttccagcactacggctgcaacatgcagttcggcggcgatgaccagtggagcaacatgctgggcggcactgagctgatccgccgcaagctgggcaaggatgcctacgccatgaccatcaccctgctgaccgattcgcagggcaagaagatgggtaagaccgcgggcaacgccgtctggctcgaccccaacaagaccagccccttcgagttctatcagtactggcgcaacgttggcgatgcggatgtcatgaagtgcattcggatgctgaccttcctgccgctggagcagatcgacgagatgagcacttggaaggacgagcgcctgaacgaggcaaaggagatccttgcctacgagctgaccagcatggtccacggcaaggaagaggccgaaaaggcacagaaggccgcccgcgccctgttcagcggtgccgcagataccgagcatatgcccgccacccagttgaccgaggcggacctgaccgatggctccatcggcatcctgaccctgatggtcaaggccggtctggccgcttccaacggcgaagcccgccgtctggtcgtgcagggcggcgtcctcgtcgatggtgagaaggtcgcagctcccaccgtcagcttcaccgcagaccaactgaccaagggcatcgtcatcaagaagggcaagaaggtctaccacaaggtgaccctgtaaccccggaaactccagaaaaccaaactgcaaaacgccccgcttccttctcacaaatgagaggggagcggggcgtttgttgtttgtatcgatggatggaaaaatgctgctgcttacagctcgaaggctttcttcagcacatcgtaggcggcatcctcattctccgcgcggaccagcagggaaatatccaagtcgctggtggtgatgagcagcacttcgatgtctgccatggccagcgcattcagggcgcgggcggccacgccgcagctggtgaccatttcctcgccgaagaggttcagcttggagtagccgacgctgatcagcggggaagctttggcgtctttatcgaggttggcggcagagatggccttcatcacaagcggaaggtcgctggaggaggcggtaaagctgaaatcaatggtggtgccgtggggggcgctctggctgatcatatccaccacaacgccggtatcggcaaagatctgcagataacgtgccagactgttgcccttgaactcgacatcctgaacgctgatcatcatgaggctgggttcgatgttgatcttcgatacaccgtacatagtaaacactccattctgcccgtaagggctccaagttccggcactttcacatttctgcgatcatgttacccatattgtacagccccggctccttttttgcaagataaacggcggcattcactgcgccattcgcaaaaatgctgcgggaataagcggtatgcttgagggtgatgacctcatcctgcccgcagaacagcacttcgtggtcgcccacgatgctgccgccgcgcaccgagctgatgccgatctccttcgggtcgcgcttctggcggacggaggagcggtcatagacgtaatgatactcgccgttgttctcctcgttgatggcgtcggccagcatcagagccgtgccgctgggtgcatccagcttgttgtgatggtgctgctccacgatctcaacgtcataatccacgccgaggatggcagaagcgcgcttgcacagctcggacagcacattgatgcccatggacatattggcactcttgaacacggccacggtgcgggagagctgcacgactttcaactgcagctcctcggacaggccggtggtgcagaccacgatgggcagcttgtgggcttcgcaataaggcagagccttttccacggcggcgggggagctgaagtcgatgatgacatcgcccttgccttccagcttctccaagctgtcgtacacggggatgccgttctgctcgccgtccttcacgtcgataccggccaccacgcggcaatcctcgcgctttgcgatcatctcgcacagcacatggcccatgcggccgccgatgccctgaatgatgatatccgtcatttgattttacctcgttgttttgttccgctcattttccgaaagaggccaaatgcccggaagagcattccaccgggcattggacctgcattttatttaaatcagaccttctgcggccagcgcttgttcgatcttctccttgtgggcgtcgctgggctccaccagcggcagacggcatgcgcccgcgttccagcccagcacgttcatcgcgtacttgaccgggatggggttgacctcgcagaagagggcatcggccagcggcagcatctccaactgcagctggcaagccttcttggtatcgccctcgaaccatgccttgcagcacgcgtgcaccagttccggcttgacgttggagaccacactgatgacgcccttgccgcccagagacagcaggggaaccacctgatcgtcgttgccggaatagatgttcaactcgtcaccgcaaagctgtgcgatcttcgccacctgcgaaatgttgccggaagcttccttgatgccgttgatgagggggtgcttgctcagctccagcgccgtttccggagcgatgttcaggccggtgcgggaaggcacattgtagacgatgaccgggatgccggcggcgtccgccatggcggtgaagtgtaccaccagacctgcctgtgtggtcttgttgtagtacggggtgaccagcagcagggcgtctgcgccgcactcggcagactttgccgccagtgcacagccgtggtcggtgtcgttggaaccggcaccggcgatgaccggaacgcggtggttcacggtatcgacggtgaacttgatggcagccagctgctcctcatcggtcatggtggagcactcgccggtggtgccgcagatgacgatggcatcggtgccgcgggcgatctggtcctcaatgatgcgtcccagttcgtcgaaattgacgctgccatcctcgtacatcggggtgatgatcgccacgcccgcgccggtaaagacaggattcttcatagtgtaaaatctcctttttgctgcgtttccaaacgcagatcaatcaaaatagcccttggcggccagcagctcggccagcaggacagcgccgcccgcggcaccgcgcagggtgttgtggctcatgcaggcgaacttgtagtcaaacagggtgtcctcccgcagacggccgaggcagacggccatgccgttctcggtgttgcggtccagcttgggctggggacgatcgttttcggtgaagtagtgcaggaactgcttgggtgcgctgggcagctccagctcctgtgcggggccgcggaagccggcccatgcttcgaggatctgctccttggtgggcttcttgtcaaagctcacgaagacagcagcggtgtggccgtccgaaacggggacgcggaagcactgcgcggtgatgacgggcttctcggcgttgacgatcttgtcgccctcgatgtggccccacagcttcagcggctcctgctcgctcttttcttcctcgccgccgatgtaggggatcacattgtcgatgatctccggcatccggtcgaaggtcttgcccgcgccggaaatggcctgataggtgcagaccagcgccttgttgacgccgaactccttcatcagagggtgcagggcgggaacgtagctctgcaagctgcagttggacttgactgcgatgaagccgcgcttggtgcccagacgcttgcgctgggccgggatgatctcgatgtggtcggcgttgatctccggcaccaccatcggtacatccggggtgccgcggtttgcgctgttgttggagacgaccgggcactctgccttggcgtaagcctcttccagcgccttgatctcggccttgggcatattgaccgcgcagaagatgaagtctacctgagaggcgacctcttccaccttggaggcgtccagcacgaccatcttcttgacgctttcgggcatcggagtggtcatagcccagcgggagccgacggcttcctcataggtctttccggcgctgcggccggaagcggccagcgtggtcagcttgaaccaaggatgattttccagcagcgtgacaaagcgctgaccgaccatgccggtcgcaccgacgataccaactttatattgtttttccatttccagcacctttcctttcaaaaaaacaaattcacacagaacacggcttgcaaaccggacgcctatgcaatataatagatactgtttacacagattttatgataacattgatacggcctccgtgtcaatcatcggaaaggcaaatgcgaagcatgttaaaaaaagatttttggtacgatttacccaaagaactcatcgcgcaggaaccggcgaaccctcgtgactcggcccggctgatggtcctgagccagaaagacgacagcatccagcaccgcatcttccacgacctgccggaatatttggagccgggcgacctgctggtcgtcaacaactccaaggttctgcccgcccgcatcgtgggcgtcaagcagcctaccggcgcggtctgcgagctgctgctgctgcgtcaggtcaagggcgaccagtgggagtgccttgccaagcccggcaagcggatgcaggccggcaccaaggtgagcttcggcgacggcaccctgacggccgttgtggacgagacgctggaagacggcaacaagttcgttacattttattatgacaccgagacgctttatgaaaagctggacgaatttggcaaaatgcctctgccgccctatatcaccaagcagctcgaagaccagagccagtatcagaccgtctacgccaaggagcttggcagcgccgccgccccgacggccggtctgcacttcaccccggagctgatggatgccatccgcgccaagggcgtcggcatcgctgaagtgaccctgcacgtcggcctcggcaccttccgccccgtgatggaggatgagatcaccgaccacaagatgcacagcgagtggtactccgtcagcgaggagaccgcccagcgcatccgggagaccaaggccgccgggcaccgcgtcatcgcagtcggcaccacgagctgccgcacactggaagccgtcgccgccaagtacggcgagatcaaggcttgcagcggaaacacctccatcttcctgtatccgggcgtcaagttcaactgcatcgatggcctcatcaccaacttccacctgcccgaaagcaccctcatcatgctcatttccgccttctacggctatgagaagaccatggccgcatataaggtagctgtggaagagaaataccgcttcttcagctttggggatgcgatgctcatagtttgatacaaaattcacgctttttgcgatatttgtatgtagaaaaaagtaaaggcccgatggcgattatgccgtcgggtcttttgtcatttcaggatgaaagtgtatcaaaaagcttttgaatacgctgctcgaaaccttatcttgatgaagaagccgcgataggatggctgcaaaaagttgaatcattcgaagaagaacgacgatagttcatgtctcatgggagaagctgtaaatggaaaacaagattataacagataaagcgatccttgcctttcgtgaatctttgattttagaggaaaaaagtcaagcgaccatagggaagtacctccgggatgttcgtgcgttttctatttttatagaaaagaaccctgtaacaaaaaacagattgatccagtataagcaattcttagtagaaaaagggtatgccgttcgttctatcaattccatgctggcaagtattaatggatttttgaattatatggggtggcaaagttgtaaagtgaaaaatctgaagctccagaagtcggcttactgtacagaagaaaaagaactgacaaaagatgaatatttacgccttctagcagcagcaggtcaagagactcgtctccgacttctcatggagaccatttgcggaacaggcattcgtgtcagtgagctttgttattttactgttgaaggcgttttcagcggagaaatcaccgtaagatgtaaaaataagacacgaactattctactgtcaagaaaactgcgtagtttattgctggattacgccaaaaagagcggaatcatttcaggaacaatctttattgccaaaaatggaaaaccgctcaatcgaggaacgatatgggcacagatgaaagctctttgcaaaaaggctggcgtaaatccaagcaaggtttttcctcacaatctgcgcaaactgttcgcgagaacattttatgatatcgaaaaagatattgctaaattggcagatattttgggacacagcaatattaacacaaccagaatttatattatgactaccggggtcgagcaccgtcgaaaaatagaaagccttgggctggtgtgttagattggataatatctgcggtatttctctatgatatttcaaaacataatcaacattatgtcattctctgccgattgttagaacatcatctggtattttaccacattgaaccataaaacacaactgcaatgccaataaaaatcagaagtcgtacttgattctttctgtactattgcattacaaatcagcctttccgcgatgatttgaagcgcagaagggcttggtttctatactcatttaggatggcaactgccatccttttttcatttgcgacataatgttgattatgtcgcaaatgaaaaagggagagctctgactgtggagttatatgagcataaccaaatagcatatcaagaggctgataaaatgctgaagacccatggtcgcgctgcggtcattcaccctaccggcacagggaaaagctttatcgcgttcaagctgattgaagagcatcccgatgcgcaattcttgtggttgtccccgaatgattatatctttgaaagccagcggcggaatgtcagcggcaatttcaacaatgtcgtccatatgacctatacccggctgattcggatgaacgaagaagagctgaatctgctctgctcggaatatatcattctggacgaattccatcggtgtggggcgtattgctggggaactggtgtagaacggctgctgaaaaactgcccccgtgcaaaagttctgggactgtccgcaacgccgattcggtatctggataattgccgaaacatggcggaagaactttttaccgtcaagggaaagctttgtgttgccagtgaaatgaccttgggagaagcaattgtccgcggaatcctgccagcaccgcaatatgtgacaacaatgtttcagtaccagcaggagctgcaccgttaccagaagcggatcaattggcaggtgcctaatggcgcgaaagatatcagtcagcgtcaattgaatgcactgcgcagggctcttgggcaagcggatggactagagaagattttttcacgtcatctgaaaaggaacgggaaatacatcttgttctgcacggattgggcacagatgcaaaaaatcaaagcgcagcttccgcagtggctgcgtggcattgatgatagcccgcagatctattgcctctacgcaggtgaacgggaaacggaagcggagtacgaagagttcctgaaagaccaaaggaatcatttgagacttttgctgtgcatcaaccggttgaacgagggcgttcatgtggctgatattgacggcgtgattttgtttcgcgtgacttcttcgccgattctctacaaacagcagatcggcagagcgttaaccaccggcaatggaaaacagccgcttatcttagatattgtcaacaattttgacggcttgtccagtgttggcacgattcgagcggaaatggcttccgccgttcagaaattgcgcagtgcgggcaaagaaaatctggtccgcgtagacaaatttccgattgaggaacaggtggaggatagcatccggctggtccgagaactggaaaacaccttgaataatacatgggatacgtggtatgcggaagcgtgtgcctatttttcttctcatggaaatctggcggttccaagacggtatattacggaaagcggaatgcagcttggtgtttggatacagactcagcgggctgttttcaacggaaaagcaagaggaaaccttaccgatgaacaagtgaatgcgttgaatgccattggaatggaatggggcagtgttctggacagggcatggaacgagacttggaaattggcaaaggaatattacaagtccaatgggaatctgcttgtgccggatagctttcaaatcggtggtatagatctaggaaagtggaccgcataccagcgcagccgaaagaagaatggccgactttctgcggaacgcgttgcaaaactgaatgaaattggcatggtgtgggacgcagttaattccagatgggagcagcgatatgcacaagcgaagcggtattttgaaaaaaaaggaaatctggatatcccaagttcctaccgctgtgaagacggcttcctgttggggatgtgggttgcaagtcagagaaaagccaaaacgggcgcaaataaatccaaaaggttgactgccgaacaaatcgaccgacttactgcaattgggatggactggggcggcactcaggaggctcagtggcaaaatgcctatcgacgggcagaagaatactaccaacagaacggaaatctgaatattccgtatgcttattgcacggtggatggctatcggcttggtcggtggctggcccggcagaaaaatgcgggaaggaaaagcggccattgtgttatgactccggagagagttgcaaaattagagaagataggaattgtgtgggatgttgcaagataacctaaaaaatcgtgtcgcggtagtggttgttacttacaaccggctggaattcctaaagaggtgtgtagattcactgcacaaacagaccgtaccgtgcgatattttagtcgtggataatgccagtaccgatgaaacggcccagtggcttgaatcgcagacagatattttttttcataatacggggagcaaccttggcggtgctggcggattccattatggtatgcgctgggcggtagaggcaaattatgactatctgtgggtcatggatgacgattgctttcccaaaacggatgccttggagaagcttttgagtgcagactctcttttgaagggagtgtatggatggatgagcagtgttgccctatggacggatggccgtgaatgccgaatgaatcgtccgaaggtgaaaaaaagcttttacgaacacatcgaattactgcgcgagggagttctgcaagcggaacaggcaacatttgtctcgctgttcctaaaaagtgaaacggttcgtgaagttggtctaccaattgccgaatatttcatctggggagatgacatcgagtacacccggcgaatcgctgtacgaagaaattatccttgttatatcgttgggcaaagccaagtgattcatgccatgaaaaacaataacggcagcaatctggcattggatgatattgagcgtatcaaccgatattggtacgcataccggaatgaaaactatacctaccgacaggaaggcataaaaggcatctgctattatctggcacgttgcggaaagcacggaacgcagattttgctttccgcaaaagaccatcgattgaaacgcctcgttgtgttgttccaagggatgataagcggggttggctttgccccaaaggtggaatacgttgcgagaacacgaaatgatgcggaatcaactataagagagtgagagaacaaattcatgcaaaacagagaatatataaagacgaagaaattgaaagagatgcaagaaaacccccgatttttgaagcgtgtgctgatcgggatctttgcgttttactgtgcattcgttgtgctgttttactttctgacaggcgatcaactgatttatcgggagtcgcgaggagagcaggaaatgccagcagcgactgcgggaacggtggagctgtatcagggcagcgatgtgacgcagtactttatgactggtgtacagcgtctggattccgtttccgtgctgtggggaacttattaccgcgccaatgcgggcactgttaccgtcgagcttctgcggaccgatactggagaagttcttatgagcggccaattcgctgcggtggatatcccggagggtggcacaacaaccatttatgcgcagcagcctatagagggcttgccgggtgttgagctggcacttcatattacagcagattccgctcccggtgaggcggtctcccctctgatggatgcagaaaatccttcaaccggcggtctttggctgaacggagagcaaacgaccggtctcttgtgttttagcacggcgggtaccgattatatccgcgcgggactgcattattggcagctggtgagtattgttggcgcggtattgctggcagtgctggtatttgcatggaatcgctaccagcgcggcagacaggatattctggccgaagcaatactcgcagtgaaaaaatatcgctttctcattaaacaacttgtctcccgcgatttcaaaaccaaatataagcgctctgtactgggtgtgttctggagttttttaaacccgcttttgacgatgatagtgcagtatttcatcttttcgaccatcttcaagtcggacattgaatactacccggcttacctgctcgttggtatcgtttcgttcaacttcttcaacgaagcctgtggcatgggcctgatgtcgatcattggcaactccggcctgattaccaaagtctatatgccgaagtatatctatccgcttacgcgcgtgatgtcctctgtggtcaatttggcgatctctctgatcccgctgatcattgtttcaatgtttacgggcgttcatttccgtaaatcggcgttactggcgctctattttttggtctgtctgatccttttcacgctgggtgtggttttgctgctctcggcggcgatggtcttcttccgggatgtgcaattcctttggaatgttatcagcatgatctggatgtacgcaacaccgctgttctacccggagacgattcttccggatcagttcaagttcgttctgcagatcaacccgctgtaccacatcatcaaagcggagcgcacctgtattttgggcggtgtttcgccggacccggtggtctatgtgcagtgtctactgatggcactggccgcgctgctgataggtgcgctggtattcaaaaagacccagaacaagtttgtgctgtatttgtaaaggaggtggaacattatgagcaaaacgatgatcgaagtagatgacgtaacgatgcgcttccatatgaatacagaccgcatcctgtcattgaaggaatttgtgaccaccgcccttcgcggtaagctggcatttcaggacttcaccgcgttgaaccatgtttcctttactgtgaaaaaaggcgagactgttggccttatcggccacaacggcgcgggcaaaagtaccatgctgaaggtgatctccggcattctggagccgacaaaaggtaaggtcacgacccacggcaatatcgtccccatgctggagcttggttccggcttcgattttgacctcaccggccgggaaaacatctatctgaacggtgcgatcctaggctacagtgaggaattcctgaaagcaaagtacgatgagattgtagagttctccgaactgggcgacttcatcgaaatgcccatccgaaattattcgtccggtatgttggcccgtctggctttctccgttgcggcagaggtacagccggaaattctgatcgtagacgagatcctttcggtgggcgacgcaaactttcaggagaagagccgcaagcgaatgatggaactcatgagcggcggcacgaccgtgctgttcgtctcgcacaatctggaacagatccgcgagatgtgctcgaaggtcgtctggctggagcacggtaccgtgcaaatggtgggggataccaaagaagtctgcgacgcgtatgcgaaagcttgatcagcgcggaatttcgatggagtaataggaggaatataaaagtgaaatcaccttttttaacagtcattgtccccatgtataatgtggaagcatatattgagcagtgcctccacagcctattgaatcaatcatactcagacttcaaagtaattgtagtagatgatggttcaaaagataatagtgccgtggttgccaaaaagtatgcacatgattatcctgagcaatttacatatttttatcaagaaaacaaaggacttggtgctgctcgtaacagtggaatgaagttggtgacaactgattttattgcattcttagatagtgatgactggtggatgcctcgcaccgcagaacgactccatgaagctcttatgagagaaaccgagcagccagatattatttttatgactccgactgtgtatagcatggctacaatgcaattcacggagtggatggataaacctattcttgaacacatctttgcacaaaatcatatttgtactccgagagaacatcctgaaatgtattctttggaggctaatatttgtcgttctgtgtggaggagcgcctttctgaagaaccacaacttcgaattccccgtaggtgtaaaatgggaagacgtcttcccgcatttttatttgttttactgggcacgtaattgcattgcagtaccaaactgtggatttgtataccgagtaagttctggtaaccagataacatctctttcagacgaatcaagattggatacgataaaagttttcgccaaaacgcttacgtatgcattagaaaacaactggcgaaaggacgaagtctcctacatcattgatatgatgatgtcttttactcgctgggcatttgatgtttcgaaaccagaagtcatgaagaagatgattccgcaggcacgtaaattgtgctgtgcaattccttcgaaatatgtacgtacctataaagaaatgtttgggcagcagcaccatggattatggatgatgctaagtttgctccgtaagccaatcggatatcaggtatttggaaattaccatcttgtcgatgtatgcaaaaaagtgcggcggcgcttgcttagaaagtgaggacaaaacagtatgaatcaaatcgcatggtatatatccacacatccagaaattaaagaagttatattgctttgcggcaccgaaagcaaaacagaccttgttgcagatatttgtagacttcaaccattgaagaaacttttgatttttacttctacaaaagagcaaaaaaagaatctttctaattttcttgaagtagcacattacgaagagccaggtacccttccaaaagaaatttgcttaataaatcgtgaagaattgttgaattattcaccatcgtccacagagtttgctttagtatttgactcgctgtcaaaaaatgaagaaatcttgccctatgttgcgatggcacccaaatttttgattggttcattatgcaaagaccaaatgaatgcgtttacaatttgggaaaaatatcgtaaagtatcggatgaaattcatattttatcttataagaaacgcaatgaagttttgcattgggagaaaccaaccgatgataatattgagttaagcgttattttcccgatgtataatgttgcaaaatatttgcccaaatgcatagaaactaccacagcatggaaagcagaatatatcgaatatatttttgtggatgatgggtcacctgataattgctctgaaattgtagagcaatacgcaaaagcggacccgcgaatcaaactcctccgcaagcaaaatggtggttgtgcttctgctcgtcaatatgggctggaacacgcgaaaggacattatatcggatttatcgatccagatgattatatcgatccttctatgtttcgaaaattattaactcgtgcagttacaggcagctacgagatcagctattgcggttataacgaattatacgaatccactggtgaaacaatggaagtagaagaccctttaggatggccctataacgaaggaactgaagaccctgtaaaaatcaatgagctaattgcaaatcaacgtgtagcgatatggcgaggaatctattcgaaagatttgattcagcgcagtaaaattcatttttatttagatcttccacgatttgatgaccttccattcaaagtcgaaacattagaaaaagctcgttctgtggttgcaattcctgaatacctttactattacaggatgcagcgtccgggacaagatgtggcagcggatgatgagcgactgtatgttcactttcggatttttgagtatttggatgctttttctagaaagtgttccgatagaaatcagttggattatctccaaattacaaaatttaaaactcacttgtgggcgttaaagaaaatccggccagaattcgcaagagaatactgtaagaaaacgaagtctgacctgaattcgaattttggatttgcagagtcatgttacattttcaggagagcgctatccagaaaagagaagatgatttatctggcgctggaactcggtgcattccgagtggcaagacgtttgacaacttcgagtagaagccatagaaatgatgaaaagcacgctattgagcagttgtcgaaactcctgtgagaaaggacgtatgttttctctgccgtcccatcaatttctaccgtgcaaagcgtgtgatgcagtatgacgttacaaaccagaaagcctttatcacggagaaagacacgaaagaaacgcttcattatttgtggctgctcttcaaagaagcctacaaaatcaatcgggagtttgatgaggcattccacaaatttggggaagaagctggtcggctacaagcggaagagttttggaggaagtacttggactaatgaggaatgtttcgttggtggaggaaaaactacagatgatttcgaaggttataagaaaaacatacaaaacggtcattcttttctttgcggtggcaattctagcgcttttgtgtgcgtataatgcttcctcaacagcttgctttattaactgtgagcatactgcatatgtagacgattccgttaagaaacaaattctcctgataatttttgtctgtgccatactcataaaatttaaggagagtaaatcctacgaaagactaaccaagaaagtacaggatgatacttccttcattcaaatccgttttgttcttttggcaacaatttttgcaggatgtaccgtatggatactcagcactcaatttgttccgggtgttgacgaatgggccgtgcaggacataacttcacgagcaattcgtggtgatttttcggatttccaatcgatgggctatatggatcagtatccaaatcagtgggggctgtttattgtatcgtatattatcgcactattgtttggcgcgcagaattatctaatccttcaaatttttattgcttttgcaattacaattgtattcaaagaattatctgaaattactgcgctacttggagtcggacgtattggacaactagtggtaattggggtcggaatcttgtacattcccttcccaatctattccattatggtatacgggaatatgattggcgttgcaatggcattaaccgctgtgaaatacgagctacgctattttcagaagagtacattcgatgatgccataaaatgtggcatttgtattgcctttggaatactgttcaaaagcaatatggagatttattttttggctcttctttttacagcgagcattgaactattttatacgcctcggaacgcactgaagctaatagtggtactaatcgccgcctttctattgcaatctgtcggaataaaacttatcatttcatggctgacgggatgtactcctaaccagcatattcccgcaacggcctgggttgcaatgggattgcaggatggcgacttagcacctggatggtggaatagttatacggttaatagttactacgagtgtggcggagatgttgcattacattcattggttgtaaaaagcaatattgttgagtcgataagagcttttattcaaaatccatcttatgcggtggaatttttttccaaaaagattttatccacttgggctaatccatcatttcagtgttttggaacgatacgaaatggttcatacgtttatactcctgtatgggttcgtttcatattgtcttaccatggtcaatactacattggtatttacttgaatgctttttgctttgttctatactttggggcacttttagatatgctgtttgcaaaaatggataatctagagcatttgattttaccgatggtcttcgttggaggatttattttctatctgttttgggaaacaaaagcacgatatggcctaatgttttttgttgccttactgccgcattccatccggggatatagtttgttgatttccaaattgacagataaccccataacgatcactactataccgaggaaattgagcaaactaataagaaatgctccgttgcgttttgctgcggcagcactcgtcgctctatttttctgtggaatatatggcaccaaatatagctatttactcaaacaggatacggcaacatactatgattatgtcgcaaattctggttggcaggaaaaaacagaattcatcggaaaataagaaaagagtgtgtatatatgactaacccaattttatatatcattatcccctgctacaatgaacaggaagttcttcctaaaacggctccattatttctggaaaagttgaaacaactggtatcctctaataaaattgatgataaaagccgcattctatttgtaaatgacggtagcaaggataatacatggagtattatttgcgacctttcaaagcaggacaatcattatcagggaattgcgcaaagcagaaatcgtggacaccaaaatgccgttctagcgggactgatggaagcaaaagaccgttgtgatgtcaccatttccatcgattgtgatggccaagatgatatcaacgctatggatggcatggtagacgcttatctggatggatgcgatgtggtctacggcgtacgcagtaaacgtgatacggatacgttcttcaaacgttttaccgcagaaagtttttacaagcttttgaatgcaatgggggccgaagtggtattcaaccatgcagactatcgcctgatgagtgcgcgtgtacttcaagaatttgccaacttcaaagaggttaatttgttcttacgcgggatggttcctttggttggcttcaagtccacaactgtcacgtatgagcgccatgaacgtattgcaggtgaaagccactatccgctttccaagatgctggcattagccttcgacggtattacaagtctatctgttaagccaattcggtttattacaggctttggcggagtggttgcctttgtaagctttattggtgtgatttgggcaatcgtacaggcattgactggacacgctgtttctggctgggcctctatgactagcattatttgttttgtttcgggtgtgcagctgatttgcctcggtgttattggtgaatatatcgggaaaatctatttggaagtgaaacaccgtccgcggtatattatcagcgagcgtaccgaagaaatgaaaaaataatatttgaggtaaggcatccgcatgaaaaatcgggtaaaatatctttttcataagtacaaggacatcctcccttatgctatttttggcgtacttacaacggctgtaaacatcgccgtatactggctgacggctcacccgatggggctttcggtcatgatgagcactgttttggcttgggttgccgcagttttgtttgcttatgtaacaaaccgaaaatgggtctttcacagcgaagcaaaaacgcccgccgagatcggaaaagaaatggtatcttttttcgcctgccgtttggcgacgggcgttgtggactgggcagcgatgtttatttttgtagatatgctgcacctgaatgatgtcgtgataaaagctggtgcgaatgtgttggtaattatcctgaactatgtggccagcaagcttgttatttttaaaaagaaacagtagcgaggaaaaaacaatgaaatacgattacgtagttgtcggttccggcttatacggagccatctttgctcacgaggcaaaagctcatggcaaatctgttctagtagtggacaagcgccccaacattgcgggcaacgtctacacggaaaacatcgagggcatcaatgtgcacaagtatggcgcccacattttccacaccaacaataaaaaagtgtggcagtatatcacgcagtttgcggagttcaaccgtttcaccaacagcccggtggcaaattataagggtgagctgtactccctgccgttcaatatgtacaccttcaataagatgtggggtgtggtgacgccggaagaagcggctgccaaaatcgaggagcagcgcaaagaaatcaccggcgaaccgcagaatctggaagaacaggccatctcgctggtgggccgggatatctacgaaaagctcatcaagggctatacggaaaagcagtggggccgcgattgcaaggagctgcctgcgtttatcatcaagcgcctgcctgtgcgcctgacctttgataacaactacttcaacgcgctgtatcagggcatcccggtgggcggctacaccaaaatggtggccaacctgctggacggcattgaggtgcggctcagcacagactatttggaacacaagacagaactggatgcactggctgaaaaggttgtgtataccggacctatcgacgcttattttgactacaagttgggtacgctggaatatcgttctgttcgctttgagaacgaactgctggacaagccgaactttcaaggaaacgcagcggtcaattataccgaccgcgaaacaccgtggacccgcattattgagcataagtggtttgagtttggcaaagatgaaaatgggaacgatttgccaaaaacgatcattagccgcgagtattcttctgaatggaaacccggtgacgagccctactatccagtgaatgatgagaagaacggtgcgctctatgcggagtacaaaaagctagccgacgcagagccgaatgtgatttttggcggccgtctgggcgagtataaatattacgatatggatgctgtcatcgcatcggcgcttgaaatgactgagaagcattttggctaaccctctctgccgtcgaaaaaccggttgcaatccgccgacatatctgttaaaatgaatatgcggcgcactaccgaacaaaagagccccacatggggctcttttgcttgtcaccaattcattctgttgttgataagtctgcgtcacaggcttttcagtaaggctgcacggctgttttccgtgcacagaaaggaacgataccatgccttctttgaccacatacaagctcctcaagcaggagcacgacgcccggcggggcgagttcaaaaccgtgcacggcacggtgcagactcccgcgttccagaatgttgccacggcgggtgccatcaagggcggcctgtctgcgcaggatctcaaggacatcggcgcacaggtcatgctctgcaacacttaccatctgcacctgcgccccggcgacaagctggtggccgacatgggcggtctgcacaagttcacccgctggaacggccccatcctgaccgacagcggcggatttcaggtgttcagcctctccaagctgcgcaagatcaccgaggagggcgtgaccttcgcttcccatctggacggccaccgcatcttcatgggccccgaagagagtatgcagatccaagcaaacctcggctcgaccatcgccatggcctttgacgagtgcgtggagaaccctgcacagcacgattactccaaggcaagctgcgaccgcacggttcgctggctggcccgctgcaaggccgagatggcccgtctgaagcacgagggcaaggcggtcaacccggatcagctgctgttcggcatcaatcagggctgtacgtttgccgatctgcgcgtggagcacatgaagcagatcgccgagatggatctcgacggctacgccatcggcggtctggccgtcggcgagcctaccgagatcatgtacgagatgatcagtgaggtcgaaccctacatgcccaaggacaagatccgctatctgatgggcgtcggcacccccggcaacatcattgaggctgtttcccgcggcgttgatctgtttgactgcgtaatgcccagccgcaacgcccgccacggccacctgaacacatggggcggcatcatcaatatcaagaacgccaagtacgagcgggacgagcgccccatcgaccccacctgcggctgtccggcgtgccggaactattcccgcgcctatatccgccacctgtttaaggcagaagagctgctgggaatgcgtctagccgttatgcacaatctgtggttctacaatcatctcatggagcgcatccgggatgagctggacgcaggcaccttcacggccttccacgaccgctatgtgaagctgctggatacaagaatctgagggttttcacactttagccttgcaacaggccgaagatgggattataataggcttatctgaattttgagaggagattttgccccatgcaatttctgacgactacgaccgaaagctatatcagcctgttctttacgctggctctgatgctggttctgctctactttatgatctatcgtccccagaagaagcaggagaagaaggacgctgcgatgcgtgctgctctggagatcggcgatcaggtcaccaccatcggcggtgtgatcggccgtgtggttgccatcaaggacgacaccttcgttctggagaccggctccgaccgtgtgaagatccgcttcaccaagagtgccatcagctctgtggaaaagctgaacatggacaacgctcctgctaaaaagtaatttccgcttccggtactttttcacgcgccttcctgcatacagtagtgcagggaggcgcgtttttatgtctgaacaaaagaagttttccgtaggcccggcgctgcttgcgttcggcatcggcggcgcgtttgccggtggctgcatggcggggctggcgtatctgatggcgcggcaggggctctcgcaagccgccgcgtggcccatggcaagcgctgcagtctgtgcgggcagtctgctcagcggatggctggcggcctttttccagcgcagcaggggattgctctgcggcgcaatacaaggcatcctattcgtcctgctgctgaccatttttggcctttgggccgggttttcgcccaccgagatgcagcttctgcggtttgcccttgtgtttctgtttggctgtatgggtggtatcttcgggatgctgcgcactgagcggcggcatcattaaaacgatttgcatcaaaaaagcaggaggaatccaaacatgtgggtctatcaggaacagcaaaaccttcccgcactgtctgccggggcagatgccccggcaccagtggaaccggggcttgtgccagagtgctctgcccctgtggcggaaacgctcccggcggaaccgatcattgaagaggccgaggcgaaggagaagattctaaaacgcactctgccccatgccagccgggactgcatcctgctggcgggagcctatctgttcggaacctttcttgccggggcgctgtccgctctgtgcagcgccggagagctggaaacgctggggtattacctcgactgttggcgcgcttcctttgcggcgaataccgccgccgaggtcgtcggcctgttccgcaccgaattcctgactacatccggcgcactggttgtcctgcttttgctgggactctccgccatcggttcgctgcccatctttttctttgtgatgctctacgggaccggggccgggatgctttccttccaactgcttgcaaatctgaactggaaagcgctggccgcttattgcatcgcttccggtgtcccgacagcattggccgccgggtgcctgtgcctgttcggggcgtcggcactgcaggtcagcgggaagatccagcgctgttccttcgggaaggcgtttcactccaccggcgcatgggggctcgtggggcagtttgcccaaaccctgtttctgctgctgcccatctgcggcgctgcgaccggaatgctctacctgtgcggccagatgaagctttcgttttaacgatcttcgtgcaatccttgtgcaggtactaaaaaatccttgacagtttcctccatttatgataaaatatatgacgttgcaggaatgtaacgtcatgctactgtggctcagccggtagagcagctcactcgtaatgagcaggtcgtccgttcgaatcggatcagtagctccaagtatagactccctgagaatcagtttaaactgattttcagggagtttttcgtttatagattccaccggcaaaattttgtgcaattttcacagttttctaattggtattttggtggtacaataaaggtggaattctattgaagatttcgggaggagccgtatggctgaaaaaagcatcgaactggatagtgtggagatcgcggcggcagtgtttggaaactgcgaccggaatatccgcctgttggagaaagagttttccgtcacggccgtatgccgcggtacacagcttcgcatttccggcgaagccgccaacgttgccgcagcgacacgggccattgagggaatgctccttctgatcgaaaatcacacgccgctggaggagcagaccgtgcgctattgcctgagccttgcccacgacggtgaggagaagcgggtcaaggagctgacagaagattttgtcaccgtaacggtcaagggccgccccatccgccccaaaacgctggggcagaaggagtacctgaacgccatccgcagaaacgccgttaccttcggcgtcggcccggcgggcacgggcaagacctatctggctgtcgccatggccgtaaaggcttttaaggcaaaagatgtgtcccgcatcgtgctgacccgcccggctgtggaagcgggagagaagctcggtttcctgcccggagacttgcagcagaaggtagacccttacctccgcccgctctacgatggcctgtttgatatgctgggcgctgaaacgtatgagcgtttggtggaaaagcaaatcatcgaagtggcacccttggcttacatgcgcggccggacgctggacgattcattcatcattctggatgaggcgcagaatacaacccccgaacaaatgaagatgttcctgacccgcatgggcgtgggttccaaagtcgttgtcaccggcgatgttacgcagatcgatctgcccgaccgtacccgcagcggccttgtggacgcgctgcaggtcctgaaaaatgtggacggcatcgcgcaatgctactttaccgaaaaggacgttgtgcgtcaccgtctggttcaagagatcatcaaagcctacgaagcggccgcacacccggccaagcgttgaggcagcataaaaagaagggagaggacaagtatgtccaataaagttttgatcaccaattcccagaaggccgtgaaggttccgtccggcctccgtatcctgatccgccgcgcctgcaatgctgtgctggaatacgagcatttcacggcacccgccgagatcagcgttaccttcgtggacaatgccgccattgcagagctgaacaaccagtaccgcaacaagcccatgcccaccgatgtgctgagctttcctctgggcgagaacggcgtttacgataccgacgagaacaacggctgcaagatgctgggcgatatcgtcatcagcatggagcgtgcacaggaacaggccaccctttacggccatccgctgcagcgcgaggttgcgttcctgaccgttcactccatgctgcatctgctgggctatgaccacgagaacggtggtctggaagccatgcggatgcgcgaaaaggaagaggccgtgctgctccagctcggtctgccccgcacggtcagctatacggaataacacaaacccttggaatggataggagttcaattttgaaaaacgcagcaccaatgcagcagcattacgacacctcttcggtctttgtagccgtgatcggccgaccgaacgtcggtaagtccagcctgaccaaccgtctggtcggcgagaaggtggctatcgtcacttccaaaccccagaccacccgcacccgcatcaccggcgtggtcacccgcggcccgctgcagtatgttctgctggacacgccgggcgtccataaggcccacaacaagctggggaagcggatggacaagacggccagcgattccattgcagatgtggatgtttcaatgatgctgttcgagccttacggtgcgctcaacgagccggaaatggttctggtggatgcgctgcgccagagcggcggccccgccattgcagtcatcaacaagactgatctcgtcaaggaaccggcggacctcgaagcccgcaaggcagagctgaaggcgctcggcgtgttcgacgccatttacaccgtcagcgtccgcgccgatgaccattgcgaggagctgtttgatgcgctgagtcagtacgctgtcgagggtccgcattacttcgatgacgacgcttataccgatatgccggaaaaggagctggtcgccgaggtcatccgcgaaaaggcgctgctcttcatgcgggacgagatcccgcacggcatcgctgtcgtggtggagcgcttcaaggagcgccccggtaccgatctggtggacatcgacgtgaacatttactgtgagcgagaaagtcacaagggcatggtcatcggcaagggcggcgcaatgctgaagaagatcgccagcgcagcccgcgcggactgtgaggagttcctcggctgccgggtcaacctgcagtgctgggtcaaggtcaaggcggactggcgcgacaacgagtttttgctgaacaatttcggcttcaagcagagcccgaacaaccgctgaatccgcgccgcgattcggacagattttccttgggtagtgcgctaggataaaggcaacactatcacgggcggcactctgccgcgcggaaaggggaacctttatgaacaccgacacaagctggcaagcctttgcacagacagggaacatccttcgctatctggattacaagcagcacccggagcagaccacagcttcgacaggagacaagacagatggatacgatcgtaacaccggggctcgtcctgaaggagacacggtacaaggaatctgaccggatactcaccattctgacgccggagctgggggtgatctcggcttcggcacagagcagcctacggctgaagaacaaattattcagcgcctgtgggctgttttgttattcggaatttgtgctgcttccgggccggaatatgtacactgtaagggatgcttccgtgaaaaatgtcttccacggaatttcttcctccatcgaggggatgagccttgcgatgtatctggccgaaatggccgcctcgctttcgccgacgggcgaagaagcagggaaggagctgcgcttactgctcaactgcctttatatgatcagcgagcacaaggccgatctgcgcgtggtcaaggctgtgttcgagctgcgcaccatgagcgaatgcggctttctgccgcagctcatctattgtaaggtgtgcaatcaatacgatgatgaatcgttctatctcgacccacaggaggggtatctgctctgttccgactgtgcgcagaaagcagggaagcgctgcaacctcgacaccggtgctctgtatgcgctgcggcacatctgccttgtggaagataagaagattttcgcattcaagatctcggtcggcagccttgcaaagcttgcggctgtggcggagcagtacgctctgacccacctcgacaagccgctgaaaagctacgaatttctcaaatccgttctgccgtgaccgaacaaattctaaaggaatcattgctatggaaacaagctacttaaaaacacttgagcttgataagatcattgcgcgtgccgccgagggctgcgtctgtcaggaagcaaaagcgcagatgcttgcgctggaacctcagtgcgacccggacgaagtgcgctatgcgctggagcagaccgacgccatcaatagtctgctgatcaaaaacggctcgccccgctttggcggcgtggagggcgtcagccagctcgtgacccgcgcggtcaagggcggcgtgctctccatgggcgagttgctgatggtggccggtgcactgcgcaactttcagaatctgagcagctggtacggctcctccgaccacgatgccctgccgacggacgacctgttttatgctctggcaccacagcccggtctggagcagcagatctccagtgccattctggccccagacgccatggcggatacagcttcccataccctgaacgagctgcgcaaaaagatccgcgtcaccgagaacagcatccgcgaccggttggagagcatggtccgcaacatggacacctccaaatatttgcaggagagcgtcgtttccatgcgaaatgggcgctatgttgtcccggttaagagcgagtaccgcggcgaagtcagcggcatcatccacgatgtttcgtctacgggtgctaccgtcttcgtcgagcctcaggccgttgtggaagccaacgcccgcattttgcagtaccgcgcgcaggaagcgcaggagatcgagcgcatcctcgtggcttttaccgcgcaggtggccgcgatcgagccgcagttccagtacagctacaaagccatgctggagatcgacgtcctgttggcaaaggcgcggctggcgctggatctgaaggctttcaagcccgctgtccggacggattcgtccttctccctcatccgggcgcgtcatccgctcatcgaccctaaaaagtgtgttccggtggatattgcattgggccgggagtacgattcgctcatcatcaccggcccgaacaccggcggtaagactgttacactgaaaacagccggtctgctttgcgccatggcgcagtgcggctttttgatcccagccgacgagcgcagtgagatctgcgtgtttgacgagttcctcgtggacatcggcgacgaacagagcatcgaacagagcctgtccaccttctccggccacatgaagaagatcaccggcattctggaactggctatgccgcacaccctcgttcttctggacgagttgggtgccggtaccgaccctgctgagggtgcggcgctggccgtggccatcatcgaggaactccgccgccgcggcgtgctgctgatggctaccacccactatgccgaactgaaggtctttgcgctggaaaccaagggcgttatcaacgccagctgcgagttcgaccttgagaccctgcgcccgacctacaagctcagcgtcggcgtgccgggcaaatcgaacgcgttcctcatcagcgaaaagctgggcatcccggagcgagtcattgaggccgcacaacagcatctttccgccgaggataaacgtctggatgccgttctgggccagctcgacgatttgaagctgcagttgaaggaaagccagaacgaagttgaagagctgcgcaacgaggccacacatcagttggatgccgcccgcaaaaagcg

SEQ ID NO: 296 - DNA, 36016 bp, unidentified
  source 1..36016: mol_type = unassigned DNA
atcaacggctggggcgctgacttcggcgaccccgtcaacttccttggtcaggagatcctgcacgacgacaacgcttattacagctggtactactccaacatcgccaaggtcgtggaggccggccccgctgactggcagaaggatctggtcgctgcttacgaggagttcaccgatctggtcaacaccgcaaaggccatcgttgatgataccgatgcccgttacgccgccttcgcaaaggctgaggcctgcatgctgaacaacgttctggcctgcccctgctacttcgatgtggcctggactctgacccacgccaacgagtacagcaagatcaacgccatgtacggcccctgcaactacaaggctgtcaactgggagaccagcgaagaggcttacaccaccgagcagtacgaggagttcgctgctgccttcgatgctgccaccaaggcctgagttttccaccgcaccccaaaataaaagttaaaggttcgataacatgttaaaatacacggttaagcggctgctccagtcgcttgtcacaatctttttgatcgcaacagccgtctttttgatgatgcgctgtctgccgacggactactacttcactgaggaacagctcatgaagttcaccgatcagcagaagaccgccgctctggaagcggccggcctgaccgaccccatccccacccagctgatcaagttctacaacgatctgctgcatctggacttcggcacgtcccgccgtatccagaacggtgcaccggtggtcaaggtcatcggcaagaagttcggcgtctcgatgcgtctgggcctcacggcgtccgccatctctctggtgctgggcgttctgatgggcatccttcaggcggcattcaaggacaaggtatttgactggatcggcacggcttacaccgtgttcgtcaatgcggtcccctcgctggtgtcctattctctggtgctggtgctgggctccaagtatctgggcttccccacgctgtactccacccgcaatgtgagcgcgtccagcgtgctgcccatcacctgcttgtcgctggcatccatcgcgggctacgccctgtggacccgccgctacatggtggatgagctgacccgcgactacatcaagctggcgcgtgtcaagggcctgagctcccgcgagatcatgttcaagcacgttctgcgcaacgccatggtccccatggtgcagtatatcccccagtccatcctgctgacggtgggcggctccctgctgatggagcgcttcttctccgtccccggcatgggccccctgctgaccgacgccatccagcgttatgacctgaacgtcgtgcagacgctggtcatcctgtatgccgttctgggcatcgtgggcgttttcttgggcgatgtgctgatgatggtcgttgacccccgtatcactctgactggaaaggaggaagctcgctgatggctaaggcatctgattttgagggtaagaagcaggacgaactgttctacttcgtggaatactctccggaagaggctgagcgcatcggctattccaactattcctactggggttctgtcatccagaacttcctcaagcagaaggtcgctgtcttctgcctgatcctgttcttggcgctgacggtcttttccttcatcgcactggccatcggcaagtacgattacacgggcctgatctcggatacgagcaaggcgttcatcaagccgaacagcgaatactggttcggcaccgacaacctcggccgcgactactggtgccaagtgtggtacgccacgcaggtgtccatccgtctggctctggtcgtcgccgttggcgagagcatcgtcggcgtcatttttggcctgatctggggctatgtccgcagcttggaccgcttcttcacggagctgtacaacctgatcgataacgtgccctacatcatctatatgaccctgatcgccctgatggtcggtcagagcttctggatcatggcgatttcgatgatcgcgatcaactggctgtccatggcacgccgtgtccgcaacatggtcttcatgttccgtgaccgcgagtacaacctcgcgtcccgctgcctcggcaccccgttgtggcgtgttctgaccaagaacatcctgccgtatctggtctctgtcatcatcctgcgcatggcgctttccatccccggcaccatcaatctggagtctacgctgtcctacctcggcctcggccttggcatcgatactccgtctctgggcctgatcctgagcaaggtgcgcggcttcttcctcgattacccgtacctgctggtcttccctgcatccatcgtgtccatcatctcgatctcgttctacatcatgggcaacgctttgtcggatgcggcagacccgcgcaaccacgtttgatagattggagagagaaacgtaaatggatagacaaccgattatctctgccaaagacgtggagatcacttttagtctgcgcggacgcaagctgaacgccatccgcaagtgctcgctggatctgtacgacggcgagacccttgccatcgtgggcgagtccggttcgggcaagtccgtattcaccaagaccttcgtgggcatgctggacgccaatggttccatcaccggcggctccatcctgttcgagggccgcgacatgaccaagttcaccgaaaaggattggctgggtgtgcgcggcaagaagatcgccatggtcatgcaggacccgatgaccagcctgaacccgctgaagaagatcggcaagcagattcaggagagcatcgagcaccatcagggcctgaagggtgaggccgccaagaaggcggccatcgagatgctggccaaggtcggcatccctgacccggagcgccgctatgaccagtacccccacgagttttccggcggtatgcgccagcgtgtcgtcatcgccattgcagcggcttgccgcccgcaggtgctgatctgcgacgagcccaccactgcgctggacgtgaccattcaggcacagatcctgcagctgatccgtgatctgcagaaggagctgggcatgtcggtcatctacatcacccacgacctcggcgttgtggcaaatgtggccgaccgtgtggctgttatgtacgccggtcagatcgtggagtacggcaccgtggaggagatcttctacgacgcttggcacccctacacttgggcactgcttcaggcgctgccccagctgggcaccaagggtgagagcctccccaccgtggacggcactcccccgaacctgttcaacgagatcaagggcgatgccttcgccccccgcaacaagcatgcgctggccatcgacttcgtggcagaacctccgttcttccaagtgtccgagacccacgcagcaaagacttggtatctggacccgcgcgcgcccaagatcgagcgtccgcactccatccagaaccttcgtgagaaaatgggaaagatgggaggttccaacttaaatggctgaacgtgaaaagctgattgagctgaaagaccttcagatcacctttggctccggcaaaaagaaattcgtcgcagtggatcatgtcaatttcgacatctacaagggcgagaccttctcgctggtcggcgagtccggctccggcaagaccaccattggccgtgccatctgccgcatcaacccgacttccggcggcgacatcttcttcaaaggccagaagatcaatggccatatctccaaggagctggacaaggaagtcatccgcaagatccagatgatcttccaagaccccatggcttccctgaacgagcgcgccaaggtcgagtacatcgtggccgagggtctgctgaaccaccacctgtacaaagatcaggaggacctgcacaacaaggtcatggatgcgctgcacgaagtcggcttgctgccggagttcgcttcccgcttcccgcacgaattctccggcggccagcgccagcgtatcggcattgcacgcgctctggtcatgcagccggagttcatcgtggccgacgagcccatctcggctctggacgtctccatccgcgcacaggtgctgaacctgctgaacacgatgaagaagagccgcggcctgacttacctgttcatcgcccacgacctgtcggtggtccggttcatctcggaccgcatcgccgtcatcagcaagggccgcatcgtggagctggctgaggcggaggagctgttcctccatccgctgcacccctacaccaaagccctgctgagcgctgttcccatccccgaccccgcactggagaagaacaagaagctgcttgtttatgatccgtccgtgcacgattacagcgtggataagccggtctgggaagagatcgccaacggacacttcgtctatggcaaccagcgtgagctggaaggctaccgcaaggaatacgaaagccagctctaagctgaaccgctttccggtattttaacacaaatgccccgccgcttgagggaaccctcagcggcggggttttgtgttgcataaaagcgccccgcagaccttcggagaaggccctgcggggcgctttgcgcttacttttggatttaggcgggagaaatccttactccacgatgatgctcttaccgctcatctctgcggggacagggaggccgatatagggcagcatggtgggggcgatgtcggcgaggcagccgccctcacggagcttcacgtcgccgcagccgatggccacaaaaggcaccacgttggtggtgtgggcggtgaagggcgtgccgtccgggttcttcatcttctcggcattgccgtgatcggcggtcaggaaggcgcagccgcccgcatccagcacagcggtgacaacttccttgacggcggcatccacggcctctacggccttcacagcggcctcaaagacgccggtatggccgaccatgtcgcagttggcgaagttcaggatgatgacgtcatacttgccgctctcgatccgcttcttgcactcggctgcgacctccggagcgctcatctccggcttcaggtcgtaggtggccaccttcgggctggggatcacgcagcgatcctcgccctcgtagggagcctccacgccgccgttgaagaagaaggtgacgtgggcatacttctcggtctcggcgatgcggagctgggtcttgccgttctcggacaggtactgacccagaacgttcttcagctccacgggcggataggcgacctcgcagttgggcatggtggcgtcgtactcggccatgcagacgtagttcacctgcttgcggccgccgcggcgctcaaagccggtgaaggcgtcgtcgcagaagatgcgggtcatctggcgggcacggtcagggcggaagttcatgaagatgacggtgtcgccatcctgcacgcggccgccctcgcaggtgacgcaaggcagaacgaactcgtcggtcttgtcgttggcgtaggaagcctctatggcttcggcagcgctggcatagtgctcaccctcgccgtagacgaaggcagcgtaggccttctcctcgcggtcccagttgttgtcgcggtccatggcgtagtaacggccggagacgctggcgatcttgccgatgcccagcgcatccagcttggcctgcaggtcggcgaggaagcccttgccggagtgcgggtcggtatcgcggccatcggtgatgcagtggaggtagacctccttggcgcccatgtgcttggccatctccagcacgccgaaccagtggtctgcgtggctgtggacgccgccggtgccgaccagacccatcaggtgaatggccttgcccgcgtcgatggcggccttcatgttcttgaccagaaccgggttcttgagcatctcaccgtccttgatggacttggtgatgagggtgagctgctggtagacgatgcggccggcgcccatgttggtgtggccgacttcggagttgcccatctggccatcgggcagaccaacggccatgccggaggcgtcgatggtggtcatggggtactttgccatcagagaatcgaggaagggcttgttggcggcggccacagcgttaccgtaggtctcgttgggggtccagccgaagccatccatgatgcagagcattacgggtttcttggacataggtattctcctttatattgaacgatcggactcaaaagcgcccggcttcagcgctgaaaacggcgcagccgggcgctggggtgattcaggaaatcaggattcagccgttggaagcagcgttgacgatcacggcgaagtccggagccttcagggatgcgccgccgatcaggccgccatcgacgtccttcttgctcagcagctcctcgcagttcttggcattcatgctgccgccgtactgcacggtggtcgcctcggccacggcctcgccgtagacctcaccgatgaccttgcggatctggccgcagacttcctctgcctgatcggcagtggcggtcttgccggtgccgatcgcccagatgggctcataggcgatgacgacattggccatctgctctgcggtgacatcgcgcagggcaatcttggtctgcatccggaccagctcctcggtcacgccctcttcgcgctgctcaaggctctcgcccacgcagatgatgaccttcaggcccgcattcagtgcggccagagcgcgcttgttgacggtctgatcggtctctgcgaagtactggcggcgctcggagtggccgacgatgacgtactcgacgcccagatccaccagcatatcggcgctgatctcaccggtgaacgcaccggacttctcgaagtggacgttctcggcacccacatggatattggtgcccttggtcttttccacggcggtcaccagatcggtgaacggggtgcagatgacaacctcgcaggaagcatccttgacggcggggatcagttcatccaccagcttggctgcctcagaggcggtcttgttcattttccagttgcctgcaatgattgccttacgctttgccttatccatgatgtctatctccttctaattaccttcaaaacgaaagaggcgcagcggcgcatggccgccgcacctcagtgatgctgttacgagcgcagatcaagcgttctggatgacagcgatgccgggcagctccttgccctccagatactccagagaagcgccgccgccggtggagatgtgggtcatcttatcgcccagacccatctgctgcacagctgctgcgctgtcgccgccgccgatgacggtggtagcgccgctctcagccatagcctgtgccactgccagcgtaccggcagccagagtcgggttctcaaacacgcccatggggccgttccacacaacggtcttggaagccttgacagcctctgcaaacagcttggtggtctccgggccgatgtcgcagccttccatatcggcgggcattgcggtcacgggcacaacggtggtctcgacgggtgcgtcgatgggatcggggaagtccttgatgcagacggcatcgacgggcaggagcagcttgacgcccttctcctgagcctttgccatcatctccttgcagtaatccagcttggagtcgtcgcacaggctcttgccgacctcatagccctgcgccttgatgaaggtgtaggccatgccgccgccgatgatcagggtatcgaccttctccagcaggttggagatgacgttcagcttatcggcgacctttgcgccgcccagaatggcggtgaagggacgctccgggtcgttgactgcgttgcccagatacttgatctccttctccatcaggtaacccacagcggtatccttgatgtagtcggtgacaccggcagtggagcagtgagcgcggtggcagctgccgaaggcgtcgtccacataagcgtcagccagagatgccagctcctgagagaactccggcatgttcttggtctcttccttgcggaagcgggtattctggagcaggacaacgtcgccgttgttcatggcagccacagcagcctttgcgttctcgcccacaacgttgtcgtcgtctgcgaagaccacggtcttgcccagctttgcgctcagggcagcagcaacgggagcgatgctgaactttgcctcagggccgttcttgggcttgcccagatggctgcacaggatgacctttgcgccgtcgttgatcagcttctggatggtgggcagagctgcattgatgcggttctcgttggtgatgacgccgtccttcatcgggacgttgaagtcgcagcgaacaagaaccttcttgccgcagtaattctcgtcgtcgatcgttttcttacctaaacccatggtaataagctcctctcaaattcttttcatcggaatcgaatttcactcgctatcggggcttgcctccccgtacacccctattataaacaaaaagtgtgatgtttgcaaggagaagtgatagataatttattaacaaacttcgtctattccctgtgcgaaatgtagtgattttgaccgaaagcggccaaaaaagaagccgttgcaaagaactccctccgtcccggctgcgccgtgaaagcttcctctctggcatcacgtgagcgatggcggaaggagtttagcggaaaagttcagatcctgcgtttgaccttctgcttgaatttggccagatactccagcaccagcgggtttttcagggcgatcaggatcacgccgtagaccgccaccgaccccagcaccgccgtaaaaatcgttgcgaggagcggcagcggcagcgccttgaccaccgtgcagaccgccagaatgccgaagcaccccaccgccaccgacccgacgatcttccaatcgaacacgagctccaccagccctttcgagtagtggatgcacatcaccatggaacacagctctgccagcagcgtcgtaaaggccgccgcgctctccttgaagtacgggatcaggacaaggttcagggcgacgttcagcacgccgctgatcagggtgacaaaaaacagctccttctccttccggcagggcagcagaacgcaggaattatacagccagccaaacaggcagaccaacagagccaagctcagaatctgcagcggctgcaccgcatccagatagctttccccggaaataaagagcaccacttccctgctgagcaagatcagcccgatgaccgccggggccaccacaaccataagggcgctgaaaatattgttgaacagttggttgaactcttttttcgcgccgatgccggcgtaatgggacagacgcggaatggaaacgaccagcaccgccgaaagaaggttcttcacgatgccgtagatttttcccgccacggcatagatgccgacgttgtaatcgctgcccagaatgccgaggatcgtcgtgtccgagctgacgtacagcgtcgtcgccagcgtggaggcaaagatgatcataatgggcttgagatgggtcttccagtcgatcttccatgtaaagtggatggcacaataccgccgggcgcggaaatagttgaggacattggagcccaccgatgcaaagaccgagatccccgcatagatgcagtaatcgctctgatttttcacgaacaggaagagtgcggcgaaggaaaggatctgaaaaatcatgccgcgcaccgtgatgtaggtatactcctcaaagatcgtgaagatccattcagtgccgatggtcgtgaagaagatctgcaagctcatgatgaggagcagatccgtataaccccgcaatttggccgaacaaagcatggtcacaaacagggctaggtaggcgatgaccgttgtgatcatattgatggagaacatctccgacgaaaaagccgagagcttttcccggtcgttcacatacttggaaccctcccgcaccgcataggacgagatgcccagccccgcaaacagcagaaaatagccgcacaccgagtttgcaaaattgactttgccaaggttctcgacctgcaggacattcgaggcatagggaaaggtgatgagcgggaaaataacgctcatcagcgttttcagcgcattcatcaccgcgttgagactcattgattttttcatcgatccatccttagaagtcgatttcgtactcttttctagtctgtttcaagcggacccagccatcccagaaccaccatgaaatcagcgttttgagccacacgctgtagcggccctgtttccaccagtttttcagcagatattttgctgatctccggaactcccggccgacccagtcacagttgttttttatgaagtcctcgtccttgcaatacagcactgccatcatccgacaccgcagggcataccccgcatttgcagacgcatatacttccggctcatcttcaaacacgatacacagccgccgccacgcctccagctcactcatcttatgcggcgcataatatccacttgtaacggaatccgagttatagcagtagttatacagtgccttgtccagccggacgattttattggccttatggatgcacttaccaaggaagagcgtatcttcgcctattttcaaatccaaatcaaaacggataccttccgtcacactgcggcggtaaacagccccccacgacaccgtatcggcatagcggtcaacccagttgtactcggacgctttgaggacaaagcgttctcccgtttctccgctgatcgtccggttctttccggtcgcctcttccacatcgcgcggatggcagtatgcgatttccgcatcttcctcgtccacacactgcttcagcgcacgaatgcagtccagttccataaaatcatccggatccgcaaacgccaaataggtgcccgtgctgtgttccatgcccagattccgggccgaggatacgccgccgttttccttcgggatcactttgatccgggtatctctcttcgcatattcttcgcagatactccgcgaagcatcggtcgagccatcgtccaccaaaaggatctccagctcccgataggtctggtttactacactgtccagacagcgcttcagatatttttccttattgtagattggaatgatcaggctgacagtttgattcttttccacgttttattttgtcctctgttttttatttcgctgcgcggccgtttttcagcaagaaaaacgcgctgtacagtcctctgctttgtttcagcagccggtattttctcatgaacccgctgtccagaagcccctcggcctctgtgcggaactcctgcagaaatcgctccatttccgctttgcggcgttcgtcttttctcagatacgggtagcagtgctctacgatcttcatcatcgctgcatcgttttccaacatatccgggtacttttcacggatataccgataccgctgacagcccatatcccacttgtcttcgtagaatttcagtgtccgcttgtgcaggatgctgtcgggccgctggtaatagaaataaagtgggacgggacaatatgcaacaccttggcatttatcaagaagtttataagtcgttccctgatcttccatcatccggcctaacggataacagacattttcaaacaattcccgtttgtacagtttattgactgcgaaatcccctagctcctctgactgcaaaatcgagcgcaatgcctcttttcccgtcatgtactgcactttctttaacgcatcttcgaccgccggaagctcttccgtcgagaaatatttcagtgctaccgccgatacatcagccccggcattcagcagatttcgacagagcacctcgatcatctgcggcgctatgccgtcgtcgctgtccacaaagcagaaatagcgaccctttgcgtgttcgattccacagtttcgggcatcggacagcccgccatttttcttatgaatgacctgcacccgtgcatcctgccgggcataggcatcacaaagttccccgcttccgtcggtcgagccatcgtccaccagaagaatttccagattagaataggtctgggcaaggatgctgtccacacagcggtttaggtaatgctctacattgtagaccggcacgatcacgctgatcaacttattgttcatcatgctttttacactctcaaatcccgtgcattttttcgttcggccagttcatatacccagtaaaacaggcgcttgctgagcagcagcgtcttcaccttgatcttgtccgcacgctttgcccacggctggcgaatgaggtcctgctgatcctgcacataggcaaggattttctcctgctccattggatagttatagaagcccccatccataattcctttcaacagtttcagataggtcacaagctgaagataagcagcttcattgcgcagttccggaagctcctgctcaatgaaagcggtcacatctgcactgacctccagcagctcaagattttttcgttgaataccactgtgcatgattgatccatctcgcatgcgataataatatactggttcttcaataatagaaactgttttgcttttggatgtcactcggtaaatcgttgcgtaatcctcatataaccttccatatggaaacttcaatttattccataattcgcgtcgataaagttttccacacgccgaatgcccgattccttggaaaaggaacattcttctcatcgcttcttccattgccaccttttcaacagttccatttttttctgtatctcttggcgtctctcctgaaaactcgaagagttgtccaattgtaagctccgaatgattcttctcacaactagaaaccaacttttctacggcactatgcggaagcaaatcatcaccatccaaaaaagtaagatattttcccctcgcctgcagcatacctatattccgtgcatctgagagacctccattacttttatgtaaagtgcaaattcttgtatccttcgttgccaatgcatcacacagctcgccgctattatccgtggatccatcatccaccagaacaatttccaaattggtataggactggttctgtacactctctacgcattcttccagatatttctgaacattgtagacaggaataatgaccgagaccagcggcttttctttgcccacgtcacagagtctcctttcctttacctaatggaatttttacgacccaattttcctttttgttgtctgcatcccggtacgccagatacatgcccagcagcaggaaagccagcgtatcgccgccgcggaactgaagcagagaggccccgcagtaggtaaacagcgccgccacaaacgggtcgtgcagcagctttttcttttccatccagaagaaccggacgaccaacgccagatacgctgccccgcccagccagccgcagtcgatgaggttctgcagataaacattgtggatattatcttccccataggcgaagcccgccacgccggaaagcgctttcatgcagttgcccacaccacagccaaagggataggccttgcttgtttcaagcgcgtaggtccacattcggatacgccccgcattgcccgcatcttccatgccatgaaggaaacgattcagcgagcgcaggaccagcgactccaaaaggccggacccccacagagccgcgaccagtgcagcgcagagcaccagcaccgtgatccgcaccttccgttctttcagccgcttgaactgtggcagcaaaagccagaggatcgccgcagcggcgatcagcattcccgcgcggctcccatacaggaacgaaagcatcaggttcgcgcccgcatacagccacttccagcggctccggcagaagaaaaaagccagcagtcccagccagctcgactcaatgttggaacctccgccgatgatcattttcacgccccatgggtgcgccattctctccgtccggagataatccaaaaatccctgatagtagatcaaatttttgatcaggatcacgatcatcagaatgcttgccgcgccggacacgatgtccagccagtcatccttggaaaggtctgcgccaaaatttgcgcagagcacgaccagatacaagccgaagatgtagttcagcagcagactattgacaccaaactcgctccgatgaagcagagagacagccgctgcataggccacatacagcaggaccgggcggttgaccctcagttctttttttctgcacagaaacggcagaaacacaagcgaaaacacatggacccatttcagcgaagcaccggaaccgatggaggcgagggtcaggttctgaaaacaggccaacaggaaaagcgctgtcagcagccccttttcccagccgtgatctctccgcagcttttccattcaacttctccttttatcttgttttccctctccactgcgtccggtcatacacaaagcgcagcagcggatagcctccataggaaagcagcgccgccagccgcgctttttttcgggcattggggtcccgcaccaccgcgctgcggcagcggaccacttccttccagagcagtttacgctccggctcgtgggccttgtcccggatctggaacaggatgttgcagaccgtgctgaggtagcggcactccgccgcctgttccaacggagggtgatcccgccggacattttccagcatcgcgcggcagtgttccacgccgtccagcttcttcgggtcgaacgccgcattctggatgctggcagcacgctgaaaatagtagtaatccacgtttccgatccatgcgacgcgggccgcccgcttcagcacttcgtacgcgaccgggatatcctcgtaaagctttccgaccgggtaacgcagcccttcgaacagctcctttttataaagtttcgtcggggtcgaggtctccacgccgtcctgataaagcatccgcctcaggcacgcttccggggtcaggctctggaaattttccaattctgccgcgggctgcgactggatgcccctgccctcaaacacctcttcaaagcagctgacggcgatatccgcatcggcttttctgagcgcccgatagaggttttccacgtagtagggcgacacccagtcgtcgccgtccacaaaggcatagtattcccctttggccacatccagcgccgcattccgggcgtcggacaggccgccgttcttcttatggatcactgtgattcgtgggtcctgcgcggcataccggtcacatactttcccgcagccatcggtcgagccgtcgtccaccagaaaaatttccagatccttatagctctggcccagcagactttccacacagcggtccagatatgcctttacattataaacgggaacgatgacgctgatgagcggttccatatcggtttctcctgttatcccaaaaggctttgataaaacacttccagctttttcgcttcgaccgcaatattaaagcctttttcggtcatttgccgttccgtattgcaccgcgtggtccgttccgccgtttccagcactttttgtgcccatttccggggcggttccgacaaactgatgaactgcgtcgattccagcagtttcgtttcccgtgaaatatccgtcgagcagatcaatggcagcgcgcaagcctgtgcctccacgcccaccacaggcagcccctcataacgggacggcagaacgaacgcatccatcgcctgatagtagcgctcgatctttctgcggttgcccaaaaagaggaccacgtcctgcagcccccggcggttcactttccggcggatgacactctccatctcgccccggccgatcagcatcaacaccgcctccggccgctggcgatggatctcctcgaacacatcgatcaggaactcatggtttttctggtagcagaagcggccgatgtggccgaccacgaatttgccttccagccccagttccttgcgcagggctgcccgcttctgggcgtcgaaggagaacttttccagatcgatggcattgttgaagacccggaactccgaatccccgtagagccagcgcccggcggattccgaacaggcacagagctgggtggggtaaatttttgcgaacgggcggagcagatacttgacgaaattcttcttcgtttcgcccttgcccgccaccgagtgattgtgcatgatgcggttgggcaccccggcgcgctgtgccccccacagagagaacacacccagcgtattcatgtgcgaatggacgatctggtattgatttttccggaacagctccatgatcgccctttcgtactggaccagatgggtataccgcggcaccagatagacgtgcccgcccagccgctcgatctcctcctgctggggcacggcagagccttccagcgcgaagaagtcaaactggactttggagcggtcgatgtggcggtaatagttcatcacgaccatctcgacgccgccataattcatatctgtcatcatttgggcgacccggatcggcgtactctcagacacgtttttccctcacattaaatcaattctttccggccgcaatcctcataccagtcccggaagctttcctccaaggtatagtggaagcggtagtccgttgcggccagctttttgccgcagatattggtggagaccatcagctttttcacgcgggccgggtggatgccaacctttttgccgccgatgggccccagcaccgccgccgcgaacagcagcagcttgccggggatcagtggaacataggacttcatccccgtggccgactgcattgcggtgcagatctcctcgatggtataggccggctcgaaggtgcagttgtagaggcccacgccggggaacgagtggtcgatcatccgatacttgaagaagcggaccagttccttgacgtaaatgcacgctttgatggtgtccttccgcccggcgtagaagaaatagtgcttcttctggcccttgtacaggcgggtcatgttgccgtgctcgcccttgccgtaaacaatgccggggcggacgatggtgagctcccgcgccgggtcctttgcctgccagatctggtggatcttttccgccaccagtttgctgatgccgtagggcgtattgggcatggggatcgtttcctcggtcttcagctcctccgccgcgccgtagggggcgatggagctggtgaacaggatcttccggatgccgtaccgttccgcaaaggcggtcacatgctcggcaccgaggatgttcgtttcaaaataggcttcgtccgggtggccgggcgtgcggtggaccgccgcaaggttgaagatcacgtcctctgccgtcggtgtaaagtccagcgtgaggggctgacggacatccgcgcggatatactcgaccccttcgtttttctccacgatgcccggtacgacaccctcttcgccgggcatgacgagatccagatcgtagatcttatcccccggccggacacactcctgccgcagcaagtggatcaggtgggtcccgatgaaccccgacccgccaaaaatgatgtagttcatttattttgcaccttttcccgcaaacacgacccatacggttttgaagaggatgcggatgtcctcccaaagggtccagttgtctatgtactgcacatccagacggaccacttcctcgaagtcctcgatgttgctccggccgctgacctgccacaggccggtgatgcccggcttcatggaaaggcggcgcttgtggtggctctcgtactggttgtactcatccagcgtaggcgggcgggtgcccacaaggctcatggaaccgcagagaacatcaaaaaactgcggcagttcgtcgatgctggtctttcggatgaagcggcccaccttggtgatgcggggatcgtcctccattttaaacatcaggccgttcatttcgttctgggccatcagctccttcttccgctcctcggcgtccacatacatgctgcgcagcttgtggatatagaacacacggccgttccggcccacgcggcgctgcttgaagatcagcgggccggggctttccagcttgagcgggatggccacgatggcaatgatggggatgctgatgatgcagcccacaaggccgccgaagatatccagcccgcgcttcaggatctggtcgtggagcttgagttccccggtgcccatggtgaccacattgcccccggcacagcggctcagcacccggctcagccgcacggcgctggtctcgctgcagcacgcctcttcgatccgatccagaaccggaagccggaaatggaccgtcaagcccatgctctcgatctcctccagataaggaaccagcgtattgccgctttccgtcgggatatcgatgtagatctcatccagcgccgcctgacggagccagtccatgaaggtatcgtaattggccttgatcgcgacaccctcgatctcgcccgtcacatcctcggccacggcttccagcaccgcgatgccggtaagctgcttcgaccagtcctttcggaggtcttggatgatgaccggggcctgctcccgcgttgtcacgataccgaccagactccggaaccccttggtgtacttcgagcgggtcagcagctttttgagcagcgcatggctgccgcacatcataaaaatgttgacgagaggcactgcgatcaggaaatagcgcgaatccagcatggtggccttggtcagcgccaagcacgccacatccagcagagccagcagcgtattgaagcccaccgcgatctccacttcccgcgtgctgctccgggtaacgatattttcgctctggtcgaaaacgaaaaaggtcagaacgtaggcgatgaacagcatgacacaggcttccagcaccagccgcggctcccggaagtccgtcatcttaccgaacaggccgtccatgatcagccacgccaccgccacactggccaccagcgagacaaaatcggtcacaaacagatatccatattgcaatttttcacgtcttgcaatcataaaaatttcttgctccttaccgttgtaccctgcggcggcctcgtttccgcccgctttgtccgagtccttcccggcccgcggcacatggatttttacaccaaacccagtttatcctatctttgtaattttaacatactatggagttgctttcaatagatcgtgccgaattttgtccgttttgcccggccgcaattttcctgcacagacaaaaaagctccccctcccaccggtcacccggcaggagggggagcaaaagcctttttagaaggtcaggaactcaatcagcagttctcagcgaagtacttaatggtacggaccatctgagaggtgtaggagttctcgttgtcgtaccaagacacgacctgaacctgataggtgtcatcgtcgatcttagcgaccatggtctgagttgcatcgaacagagagccgtaacgcatgccgatgacatcggaagaaacgatctgatcctcgttgtagccgaaggactcagaagcagcagccttcattgcagcgttgatggactccttggtgacgtccttgcccttgacgacagcaaccagaatggtggtggagccggtgggaacaggcacacgctgagcagagccgatcagcttgccgttcagctcagggatgaccagaccgatggccttagcagcaccggtggtgttggggacgatgttctgtgcgccagcacgagcacggcgcaggtcgcccttgcgctgaggaccatccagaatcatctggtcgccggtgtaagcatgaacggtggtcatgataccggaaacgatgggataggtcttgttcagggtgttagccatgggagcgaggcagttggtggtgcaggaagcagcggagatgacctgatcctcagcggacagggtcttctcgttgacggagaagacgatggtcttcaggtcgttgcctgcgggagcagagataacgaccttctttgcgccagcctgaatgtgagccatgctcttctccttgctggtgtagaagccggtgcactccagaacgacatccacgttcagctcgccccaaggagcatcctttgcgtccttgacagcgtagatcttgatctccttgccgtcgacgatgatggaatcctcagtagcctcgacggtgtgcttgccttcgccgatcttgccgcagaaagagccctgagcagtatcgtacttcagcaggtgagccagcatcttggggctggtcaggtcgttgattgcgacgacctcgtaaccctcagcatcaaacatctgacggaaagccagacggccaatacgaccaaaaccattgatagcaactctaacagccatgttaataatacctcctaaatgttcttacccttttcatcggataatctcacggtgtttttattgtagtccaaaatgcgaaaagtttcaagtgtctgccaaaaaattaacaactcaattttacactttttggcttttgtatgatttttctacctcttctcggccgcttttcggcaattcagccaagagagtgcttactcccggctctcaaaggcagcggctgcagcgatgcgcaccacggcaaaaacccccagaacgcccacgcacgcaatgccgaggccgaagaagatggcgggcagattggtcagcttgaactgggaaggcatggccagcgtcagggtctggggcagctcccagcagaaggccagcatgaagctggccagaccggacatgcacaaaagcttgccgtccgacgtttcaggcagccagagcgcccgcacgaggctggacaggaagagcagcaccgccagcatctcccacaccatgacggtgggcgagacgcggtgccagctggagctgttctccatgaaacggctcagcacgcaccagtagaacaccagcgtgccccagatgccggaggccatgctcttggccgggagctgcccgtccggccggagccatttgcggcccagcagaacgagccagaccgcgcagagcacctccagcacagcccggacgacggcgccgatgccggtcagccctacggccagccgggccagcgccgcaagggcgaagaatgccccggccatgatcgtcaccgtgccggaggccttgcagcggttccgcagttcctgcggcccatgggccagtgttcggccaatgcagatagccgccagcacgcccacggccagcgcggcatagcgcagccagaccgggccgacggcgcacaggccgctttccagatcggtccagaggccaaggtccagcgcacggccgatggtcagcgcagttcctacaacgaacagaagtttgatccgtggattcatcagcgttcctcgattggtttatatttctggcgcacgcccagatatttgtaggcgggccggatgatacggttggcgaaaacgacctcctcgacgcggtgggcgcaccagcccggcacacgggcgatggcgaacagcggggtgtagagatcctcggagatgcccagcatgttgtagatcaggccgctgaacaggtccacattggcgcagacgggcttggtactgcccttttcctcggcgaagatgccgggggccagccgctcgatgctgcacagcatgttgtactcttcctcaaagcctttctcgtacgccagatggcgggcacgatttttcaggatgacctcgcgggggtcgctcacggtgtagaccgcgtggcccacaccgtagatcaggccggagccgtcgcccgcctgtttgcggaggatgcggcggaggtactcccgcacctcgtcgtcatcttcggggttctccacgtgcttgaggatgtcctgcaattggcggttgaccatcaggttcgcgccgccgtgcttggggcccttcagcgcgccgatggccgccgcgatggccgagtaggtgtcggtgcccgacgaagagagcacgcgggtggtgaaggtggagcagttgccgccgccgtggtcggcgtggaccagcagacacatatccagcagcttcgcttcctcgtgggtgaacttctggtccgggcggtaggtgctgaggatgtgctctgccgtgctctggccgggcttgggcaggtggaagaacatgctctgcttgtcgtaatagcggcgcttcatctggtaggcgttcaccatcatggtgggcatactggcgatgaggttgatgctctggttcaggatgttctcaaggctcagatcctcggcgtgctcgtcgtaggaatacaggcccagcacgcagcgctgcatcttgttcatcacgttgggcgagggggcgttcatggtatccatgaagccgtcgggcagggcccggtgctcggccagcagctcgcagaactcgtccagctggctctgggtgggcagactgccgaacagcagcagccagatgacctcttcaaagacgaagcggtcgttgcggtaggcctcctccacgatctcctcgatgttgacgccccggtagatcagcttgccggggatagggatcacatgcccctcctgatcttttttgtagccaacgacgtcgcatacattggtcagaccggcgaggacgccggtgccatccgggttccgcagaccgcgcttgacccccagccgctcgctggtctccgggtcgatgtagttgttggcgaggtactcttcgcacagggtccgcatcatctgcggggccagagttgccacctctgcgtgcttatagttcatgcgtagactcccctttctattcttactttatacctttccctgccatccacaccgatggcatgagtctatcatagcgcttttgtgaaacaaattcaagaagaagatgaaatttgcgctttttctcccggcggttctgctacactggccgaaacgaaactgcctgtccgggaggggtcctgtgatgaaacgcaccttttttctgctctgtgccgtgctgctcgtagcgggcagtctgctgccgctggccgggtaccggctggccactgccgcgctgggccgggcggccccggaggctgcggagagcgccccggaaccggcggcatccggcccggccgccctgccggaagcttccgcgccgccctccgatcaggacagcgagagcttcctcatccggaacctgagcaacggagccgtggcggcggtgccccggcgggagtatctgatcggggcagtggcggcggagatgcccatcacgtggccggacgaagcgctcaaggcacaggccattgccgcccacagctacgcgctctactgccgggatcacgcagccgaccccgctgccgggtggctgacggcggacccggcccggcggcagggctacctgaccgacacggtcctgcgcagctactggggcacggcctacgaagagaatcacgcccggctggcggcgctggtggacgcggtggagacgcaggtgctgtactatgacaacgcccccgccgggaccagctattttgccatctccaacgggcagacggaagccagcgaaaacgtctggggcagcgccgtcccctacctcgtccccgtggacagcagcaccgaccgggaggccgatcattttacttacacggtccagttttccaccgcgcagaccgaagagctgttgaaagggctgggcctcgccccggacctttccgcaccggaaggctggttcggggtggccgcgctgaccccctccggctatgtggcttccctgccggtctgcgggcagacgatcaccggcccggccctgcgcaaggcgctggggctgcggagcgcctgtttcacggtgcagtaccagaacgggacgtttttctttaccaccatgggctacggccacggggtcgggctgagccagtggggtgccaaggcgctggcccagcaggggcagaccgccgcgcagatcctcgcccactacttccccggaacggaactgcgccagtaaacagcaaagcagccggacatttctgcccggctgctttgttgatcgaaaggacgtttttaagaaagatcactgaaacatgccgtccagccagctccaaatgtcgctggcggtatcggaggaagtcgtctcctccgtgggtgcgggtgcggcttcggcagctgcttccgtctcctcagcggccacagcggcttccagctcttccaagccggtgccgtcatcgttggcgtcggaggtgatgtaccagtagcaggacgcgccggagatggagatgctggcactggacaggggcacacgccccgcagaaacgccgttggccggatcggagcagtagaacacaccgccggtgtaatcggtcaggagcaccgcgtggggctggcggcgatcataaagaacgatgccttccgggtgctcggcgaggatctggatgagggcctcggtcttggcggccttgccggaaggaagggtggcgtagccaacgtgcatcgcattgtatgtaaaactgtgggacagaccgccggaccatgccgtgctcttgatgctgttctcggtcacatcgacccagccgtccagcccatcgaagtaagcgcggcggcggagcatcatggcggcggaggccagtgtgcaggtgccgccccggctctgcttgaagtagaacccgacgtccacgttcaaatccacggccagcgcggcgggcagcagcgtcagtatcaatgccagcgtcatcatcagtgccgacagttttttccatgcgtggtgcggtgcagtttccaccttttttcatctcccttgaatttcgtcgtcattcactggtgtaaagtataccagcctgttacacttttgtaaacacttccttcgcatttttctcaatatttacacgttttggtcacaattcagaagcaccttgcacaaaaggcaacggtgggctttgtggggtttggacaaaggccctgcgccgggtctggcgggtctgccctctccctaccgaaagcatctgcgaaacaaaggccctgcgccgccgtcagcgggcttgccctctccgtcatcgcttcgcgatgccacctctcccaaagtgagaggccttggcagtccgccaagtttccggttttacactttacgccctgctgccgtaaggggagccgaaggcgctgcgctcagactttccgcctttgccaagggctccccctttgggggagctggcgcgaagcgcctgagagggcaagcccggcagagggaacactgcgcctttgtttcgcactgcgtaccgtaaggcagagagggcaaggatgcttgcttacggtcggaagaggccgccccgactcgcctattccatttctcctgcaaatatggtatacttgccccgaaatcgaaactttgcaggagcgcatttatgaaagcaaccatcgtcatccccaacatcaacggcaagggctggctgaaggactccatcgagtccgtctatgcccagaccgagcaggacttccagctcatcgtggtggacaacggctccaccgacgaaagtctggaacaagcccgcagctattgcagccgccccaacttcacgctgatcgaaaacgggcggaacaccgggttttcccacgcggtcaatcagggcattgcacgggcagagagcgaattcgtggtgctgttcaacaacgacgccttcgctgagccggagtggctggccgagctgatccgggccgccgagagcgaccccaagatctttgcggtgcagagcctgatgatccgccactttgaccgggagctggccgacgatgcgggcgattatgtcacatggatgggctttgcctgcaagaccggcgacggccgccgggccagccgctataccaagcagaagcggatcttctcggcgtgcggcggcgcggcgctctaccgcaagtgcattctggacgagatcggcggcttcgacgagaacttcttcgcctacttcgaggatgtggacctgagctggcgggccaacaatgcgggctacaaaaacatcctctgccccaccgccaagtgctaccacatctgcggagccagcaccggtgcggtcaagtacaacgccttcaagagccagcagagcggccgcaacagcatcctgctcccgctcaagaacgagccgctgctgatgctgatcgtcaactttctcccgctggcgctgggctatctgctcaagtgttacaagttccacaagcagggcttcggcgacgcatgggacaaggggatgcacgaagccttcgacctgctccgctccggcaagctcggcaagcgccccttccggctgaaggacctgccccactacctgctcatggaggtgtggatgatctggaacatgatcccctatttgtggtatcggctggtcgtggtgcggtttgatctgaaatgatctctcataaaacagaaccaccccggttccgggcgctgcaagcgccttggagccggggtggtgttttgtttctgcggtttgccttaggcggcggtgctctccgcagcggcctcgccggaggctgccgtgctctccgcagcggtgctgtcggcagcgggagcgctctccgccggggtgctgtccgcggactcagcgggggcggcctcctcggaagagacggcgctgtcggtggagtcaccggcggcggcgaggatggcgtcctgcacctcgctctcggccatgggggccggctcggaggcggctgcggcggtggattcgggcttggtctcgctgtcggtcaggccggtgaggtaccagctgccgttctggcggcggaacaggtaatccatatacttggtgggagtgtcggacaaggtgttcaggatgctgtcgtcggcgctctgggtggggatgtagcccacggtgacgtggagcaggccgtccttcttgaacagcttggtcacggtggcgctgtagctgcccacactgccggtgacggggatcttgtagcactgggtcgtctcgtcgaactcgacggtcatatcctccatctcgaaggtcttatggttcatcttgaagctggggcccacgagcttggcaaggtaggcatccacatccaccgaggggagcaggagctgctcggtgtcggggtcggtgttgtagttgtcgaaactgccctgcgtctcctgaatgctgtacacgcagccccagaccgccgcttcgcggagggtcaggtcgtcgatgttctcaatgccgtcgaagggcacggggtcgaagaggacaaggccttccagctcatcctcgtattcctgccgctgctgggtatcgtcaaacagctttgccacggtgcgcacacccgcgcgcaccacggtgaccgcgcccaccagcaccagcactgccaccaacaggccaagggcctgacgggcacggcggcggtggagccgggcgtgttcttccggggtcatataggttttcatcttgattttcgtctcctaaattggactgtagtcggtcataccgggtcttagtataccacgttttgccccgaagtgcaaaatccggggagtggattttttgtgaaagcgcgttttattcccacgttttccagacatccggctgatagcccacggtggctttgcggccgttgcggacgatgggcgtcttgaagagctgctggttctcgaagagcttatcctccttctgccagtccacgagggcgtccagcagggcgagggtctgcttgtccttggccgccgggtccaccagctgctcccagccgcccagcgcgcgggccacgttctcgaactcgccgcggctcatctccttttccttcaggtcgatcatctggaaccggatgccccgctccttgaagtagcgctgggcctttttggtatcgaagcacttgctcgtgccgaagatctggatgttcatgcgtttgtcctcccaaaagtctcttctcattgtatcatactccggcccggttgcatagggatatttcacggccccgccgggcagactagcggcagactgaagtttggaggtatgttttatgaaagcattcgttgaccctgacctgtgcatcggctgcacccagtgtgccggtatctgcccggaggtgttctccatggagggcacgctggccgtggcccagcccggcgaactccccggcgaactggtccccaccgccatcgacgcggcgcagaattgccccgtctcggccatcaccatctcggaataaggaaaactccctgaaaattttcaaatatccctccgatccctgcgattttgtgctatactataaggtgtgaaattatggatcggaggaaaatcgcccatgcgtttactggtcattgacggcaacagcatcgccaaccgcgcctttttcggcatcaagctgctgaccaccaaggacggccgctataccaacgccattttcggctttctgaatattctgaactccctgctcaaggagtgttccccggacgaggtcgccgtggcgttcgacctcaaagcccccaccttccgccacaagatgtacgacggttacaaggccacccgccacgggatgcccgacgagctggcccagcagatgccggtgctgaaggagctcctgaccgacctcggctaccggcaggtcaccgccgaaggctgggaggccgacgacatcctcggcacgctggccgccgcctgtgacgcccggaaggacgactgcttccttgccacgggagaccgggacagcttgcagctggtaagcgagaccaccaccgtgctgctggccaccacggcgctgggccgcagcaagaccgtggccatggatgtggccgccatcgaggaaaagtacggcatccagcccaagcagctcatcgaggtgaagagcctgatgggcgatgcgtccgacaacatccccggcgtgcggggcatcggcgaaaagaccgccctcgcccttgtgcagaggttcggcacgctggaaaacgtctacgccaacctcgacgacaagagcatcaagcccaagcagcgggaacacctgctggagtgccgggccgatgcggaactgagccatgtgctcggcaccatccgcaccgatgcccccatcgacaccgccgagggggcttacaaggtcggcgaagggaacaagggcgccgccgtgcggctgatgcaggagctggagctccacaccctcatcccccggttcgggctggacggcgtagccccggaggccgcgcccgaagaggtccccacgctggagggcaccgtctcccagctgcccgaaacccccgccgggcattatctggtggccacccgccccgccgtcatgggccgcgcgggcgtgaaaaatgtcgttttgcagccggaagcgtggtacgccgtgcagggcagcaccgtctaccccctgagcagcggcgagctggtgcggctgctggacgcccccggcgtgacgctggacgtcttcgactccgctcccctctacgcgctggccatggcccacggcggctggggcagcagcatcgtctgggacggcaagctggctgcctacctgctggacgcctcggcctccaagtatcaggtcaccgagctgctgaccagctaccgcgccaaggccgccttcacctgtgaggcgtggcccgacgcaggcggccttgccgacctgttcgccaagatgaaggccgagatcaccgcgctgggcgaggacaagctctacaacgagatcgaattcccgctggcacaggtgctggccgacatgacccgcaccggcatccttgtggaccggcagggcgtcgaggagttcgggctgcggatgcgcaccgagctttcgcaggtgctggcccgcatccagatggagaccggcagcaccagcttcaaccccaacagccccaagcagctgggggaaatgctcttcgacaccatgggcctcccccacggcaaaaagacccagcgcggctggtccaccgacgcagaaacgctggaagccctgcgggactacccgctggtggaagacattttgcagtaccgcgcctaccagaagctgaattccacctatgtggaagggcttttgaaggtcatgggcgaggatgaccgggtccacacccggttcaaccagaccgaggcccggacgggccgcctttcctccgacaaccccaacctgcagaacatccccatccgcaccgagctgggcagccagctccgggcctatttcatcgcgaagcccggctgtgtgctggtggacgccgactacagccagatcgagctgcgcatcctcgcccatgtcaccggcgacgaacacatgcagcaagccttcctctccggcgaggacatccaccgctccacggcggcccggatctacaatctgccgccggatcaggtctcgccccgcatccgctcctcggccaaggccatcaactttggcatcatgtacggcaagggtgcctacagcctttccaaggacatcggcgtgtcggtgaaagaggccgacgccttcctcaagagctatctggccgcttttcccaaggtgagcggctatatggacaagaccatcgccgacgcgcgggcgtgcggctacgtctccaccctgttcggacgccgccgcgccctgccggagctgaccagcaccaaccacaacatccgggccagcggcgagcggatggcccgcaacacccccatccaaggcaccgcagcggacgtcatcaagctggccatggtgcgggtctggcggcggctgcgggacgaaaaaatggagagccgtctcatcctgaccgtccacgatgagctgatcgtggaggcaccggaggcagaggccgaaaaggccgccgccatcctgcgggaagagatggaaggctgtgtgcagtacgccgtgcccctgagcaccgacgtccacatcggcaaaaactggctggaggcccactgaatcatgatcgtattaggaatcgaatccacctgcgacgagaccgccgcagcccttgtggaggacggacggaagctgctgagcaacgtcatctccaccagcgtgaaggaacaggcgctgtacggcggcgtcgtgccggagatcgccagccgccgccactgcgagttcatcagcgccaccgtgaaaaaggccctgctggacgcgggcaagaccatcgacgatgtggatgccgtggccgtgacctttgcgcccggcctcatcggggccgttctggtgggggtgaacttcgccaaggggctggcctattcggccggcaagccgctggtgcccgtgcaccatctgcggggccacatcgccgccctctacctgacccacccggagctgaagccgcccttcctctgccttgtggcctccggcggccacagtcacatcgtggaagtgcaggactacacccactaccacatcctcggccacaccgtcgatgatgcggcgggcgaggcctttgacaaggtggcccggacgctgggcctcccctaccccggcgggcccagcgtggccaacgccgccaagaccggcaaccccaaggcctaccgtctgccggtgccccacgtagagggcaagtacaacgtcagcttctccggcctgaagaccgccgtgctgaacgaagtgaatcaggcccagatgaagggcacggaagtcaacgtgcccgacctcgcggccagcttccaagagcggatcgcgggcatccttgccgaaaagctgctcctcgccgccgccgacaccggggccaagcaggtctgccttgcggggggcgtagccgccaacggccgtctgcgccagctggtcaacgatggggcccagaagcttggggccaaggtctacttaccggagctgaagttctgcggcgacaacggcgccatgatcgcagcccaaggctactaccagtacatcgccggccacaccgccgggctggagctgaacggtctgcccaccctgcccatcgactacgaataagaaagagagcaagaggtctgcgccacgcgcagacctcttgctctttcctgttccactttagtatttgaaatagaaccggacctcgccgatcttctttttccgcagcaggaaggccgccgggatgaggtagaccagcaccgacgagagcatcgtgatgtcgtagccgctgacgctttcggccaccgtctcggtgccgtagagcccgcccatcagcatggacagaatgtccatcccgccgtggaggaagaccgtgacccagaggttgccggtgcggaaatagatggccccatacagcacgcccagcgatgtggcgaagacgcactgcatcagcacccccagcggggcgctggtgaacaggttggtcaggtgggcgcagccgaacagcacgccggacagcagacacgccttccagatgccgccccggctggtgccgaagtgctccagcagcgtttccgcgaccacgccccgaaacagaaactcctccgcgacgcccaccagcatcatgttggcgaaaaagctcaggatgcgccacagcggcagcagggtgccgtccgccgcgaggccgaacaagagcttcacgtacaggttataggccagcagcgccgccgggtacatgcccaccagcagcccattgaaaaagccgcagccccgccgcgtcagcaattgccccttgcccgtgcgccgcagcagcgccaccgccacgccgatgcccaccagctcctgaatgcagcccagcaggtaatcatccgcataggcaaagttgaagcggaacaggagcagggcgatcaccacaagatacgatgaaacgaacaggctccccagaaacactgcctccgccccgatacaataaatgagcggatggttcttgcgcagacgtttgagcatggcgatttcctccgttgctgaaatgttgcttttattgtatcatattgagaggaattgttcaaataaaacgatgcagcgccggctcggagcccacgaaaaaaacttcgaaaaaagtgttgacaagaggggtgtttgatagtataatatcccttgtcagcggcgcttaccgctcctgacaaaaccgaatattggggatttgcatagtggtagtgcggtagactctgactctacttgtgggagttcgattctctcatccccaaccagaccgcagccgaaaagctgcggtattttcggggcatagcgcagttggtagcgcgcttcgttcgggacgaagaggccgtgggttcaaatcccgctgctccgaccaaaattgcacgtcgatctgttgaggattgacgtgcttttttctttttccgcaaaatcctccgtatcttcaggcaagaagcacaaggtcggatgcacggtacagcacccgcaaggcacgttcaaaaagagcataaaacaaaaatccagcgtaattactacgctggattttttggtgggcgcgggtggattgcgcgagccgcgcctatgataaggaatccgggttgcggctcccagcgtctgcttctctgccgctcgcatcctgctggccgcggccccagcctcgcctccctgtttccgccacaggcggcggtcggctccgctgctgttcgaatccaccctagatagtgaaactcaagattccatgtaaaacaaaaatccagcgtaattactacgctggattttttagtgggcgcgggtggattcgaaccaccgaagctgaaaagcagcagatttacagtctgtccccattggccactcgggaacacgcccagattcacttttgtgcggccatcgctgaccgcctgtatatcttaccatcgaatctgaaatttgtcaaccattttttgcaaaaaaatcttgacatcttttgtcagccggtgtatactacaaccaatgattgtggttcagacgcacaaattaaaacagaaaggagactattctttatgacgactgaccgcgaagcatttctcgcatcgttcaaggagtatcttgccaccaccccggctgtggaactgctgaacgactatacctatttgttgatatacatcaatcacgacccctacgatgagcaggaacggtaccagtaccttgtggatgcagtttctaccgtaggcacgaagttttctcaggtcgatacatggcgtgccgggtgcgccaagcgccagcgtgaggacgacaacgccttttgggaatccgcaatggcatggcacgaccaccactacgccaaggccccggagccctgctgtctgagcgatgtgccctgcgaggagaccgaatggctggtgccggatgtcctgccgcggggcgagatctccctgctgggggccgacggcggcaccggcaagggcatctggcaagcccagctcatcgcctacgtcaccgccgggcagaccagcggcttcttccccgaaccgcccgcccagaccggccgggtgctcatccttgcgggcgaggacgaccccggcaaggtgctcaagggccgcatcgccgccgccggagccgatatgtccaaggtgatggtcgtcagtgccgacgactactacctgcgcaccggccaccagctctgcatcggggacgacgacatcaccacctttgtggcgaagatcaaccccatcctgttgatcttagacccgctgcaaagctttctgccccccgacgtggagatggccagccgcaaccagatgcgcggcgctgtgctgcccctgaagagcctgagcaccaagtaccacctcgccaccctcatctccatgcacaccaacaagcggccgggcgtttcgggccgtggccgccttgccgacagctcggacctgtgggacattgcccgcagcgtactgatgatgggccgctgcaagaacagcaccgagggccagatctacctcagccacgagaagagcagctactccaagcccgcccagaccgtgctgatgcacatcgaggacgtgaccgtggacggcgtgcccaccgcgcgggccatcttcgacggctccaccgacaagaaggacgcggacttcatggaggagcgccgcctccgccttgcccaaaccaaggacgacaccaccgccgccatcctcaacgcgctggccgagagccgccttggcagcatggccagcagcgagctgcgcgccgccgtcaccaaggaggtcgggtgcagcgagcgcacctatgaccgttcctatgcagaccttgtcaaatccgggcgcattaccaaaaagacgatccgccagcgggacggaaagaacaagtggtattcctacctcgactgcggagaatctgatggcgaagttcaaaaataataatttacctacgttctatctttgatcttcgccaacttggcgaacttgctttgcttggcgaagttccaactccgccagccttttcgaattccgtcaccttggcaaagttcgatttttagcgatacatcgtcgctcttttcgatgtccgccaccaaaccagcttgcagtagagatgcaaaaggccccagagcagtgaagctctggggtcttttttcttggagcgagtgacaggaaacgacattccagcacagctcctttcacttacagcccaaacaagtcggggtgtgtaccagtcgcaaccaagtacagttccgtatctgtctgccgataaatcagcagccaatccggctgtatatggcattcacggcagccggtatagttgccggtcagattgtgatctctgttcttctggggcagtgtgtccggcactcgcagcacatcaatgaccgcttgcagcaagtccatattgtaatgccgctttatgcaggtcttgtaatcttttttgaactgcgtggaagtgttcagttttaacacggtttagccctccgcagccaactgggcgaagaaatcagcggtagaaccctcaaagtgttcccccttgcccgtcctgatcatctcgtctacttcatcaatcgccgccaacgttctgacgttgggaatctctgcgtcttccggcgttgtcacgccctgaagatatgcgacaacatacagcagcttgctttctggcacctgatccagcagggttcgtgccaattctcttgtgctcattctacacccatcctttcatgtgtaagttgtgggcttctctgtgggagtttatgcggtttccttcccggctgcttcctcgccttctgcaccagccgggcacacatccagcagaatatccagacaataccgctgaacgctcttgccagcgtccgcagcagccttgcgaatccttgccccatcctctttagacgggcgaagcatgatattatcctgcctacgattataggctgcatttgatctcttcttcgcttcactgatcggcatggtatcacctctttaagatgattataccacaggatcaacggcacgtcaacgtgtatattttgaacagcaaaggcaagttaacattgtgcagtttgcagcgcatacaaaagcaaaaatcccacgatacacgccgttgttttaacggtatatcgcaggatttttcttggagctagtgacaggagttgaacctgcaacccactgattacaaatcagttgcgctgccattgcgccacactagcacaggttacctgaa

SEQ ID NO: 297 - DNA, 10990 bp, unidentified
  source 1..10990: mol_type = unassigned DNA
ttggagaatcagtatgcgatcgaaatgctgaacatcaccaaaaaattccccggtattatcgccaatgacaacatcaccttacagctcaaaaagggcgagatccacgccctgctcggtgaaaacggcgcgggaaaatcgaccttaatgtcggttctcttcggcctttatcagtcggaggagggcatcatcaaaaaggacggcaaggtcgtgtccatcaaggacccgaacgacgccaccgcgctcggcatcggcatggtgcaccagcatttcaagctggtggacgtgttcaccgtgctcgacaacatcatcctcggcgcggagacgacgaagtgcggctttttgcagaagaaggaggcgcgcaaaaaggtcgaagagatctcgaagcgctacggcctgaacgtcgaccttgacgccaaggtcgaggatatcacggtcggcatgcagcagcgcgtcgaaattctgaagatgctgtatcgcgacaacgagatcctcatcttcgacgagccgaccgcggtgctcactccgcaggagatcgaagagctgatggccacgatgaaggagtttgcccgcgaaggcaaatccatcctcttcatctcccacaagctcaacgagatcatggaggtctccgaccgcgtgagcgtcctgcgcaagggtaagtacatcggcacggtcaacacgagcgagaccaccaagcaggagctttccaacatgatggtcggccgccccgtgcagctcgaggtcacgaaggacgaggccaagcctgcgggcgaggttttgaaggtcgaccacctctgcgtccattcccacgtgcagaagcgcaacgccgtgaacgacgtttcgttcaccgtccgcgcgggcgagatcgtctgcatcgccggtatcgacggcaatggtcagacggagcttgtctatggcctgacaggccttgacaagccgtcctccggcacgatcaccctctgcggcaaggatatctctcatgcctccatccgccaccgcggcgagcacatgagccacattcccgaagaccgccacaagcacggcctcgtgctcgacttcacactcgagcagaatatggtgctccagcgcttcaacgagccgcgctttgaaaaccacggctttatcaacaacaaggctgtgcgcgactatgccaactacctgatcgacaagttcgacgtgcgcagcggccagggcgcgattacgcgcgcgcgttccatgtccggcggcaaccagcagaaggccatcatcgctcgcgaggtcgaccgcgacaaggacctcatcgtcgccgtgcagcccacgcgcggccttgacgtcggcgccatcgaattcatccacagccagctcgtcgccgagcgcgaccgcggcaaggcgattttgctcgtctcgctcgagctggacgaggtcatgagcctctctgaccgcatcctcgtcatgtacgagggtgagatcgtcggcgagctcgacccgaagaaaaccaccgtcgaagagctcggcctttacatggccggcgccaagcgcatggcgaaggaggaggcggccgtatgaaaaaagaacacttcctgcaaagcgaaggctttaagaccgtcgcagcgtccgtcctctcgatcctgatcggcctcgccgtcggcagcatcgtcattttgatcgtcggtctcacgagcccgaacctctcgctctcctcggcgtgggacggcatccgcatcgtgttcggcggcctgttctccacgggacgcgacgcctccggcacgctgacgtggggtttcaacccgacgaatatcggcaacatgctcttccgtgccgcgccgctcatcatgacgggcctttccgtcggcatggcgtataaaacaggccttttcaacatcggcgcgccgggccagtatctcatcggtacgctcgtgtcgctctccatcgccctcggtcttccgtccgagacgatgtccaccacgctcatctggctgctcgccttcctcggcggcacgctcgcgggcgcgatctggggcgcgatccccggccttttcaaggccctgctcaacatcaacgaggtgctcgcctgcatcatgacgaactggatcgcggcgaacctcgtcacgtggctctttgatatcagcaactttaagaacgtcaccgagtccaccaagaccggctacatctacaagacgacctacaatggcgtcgccaccgcaaagatgggccttgacaagctcttcccgaactcccaggtcaacggcggcatcctcatcgccatcgtctttgcaatcgccgtttacgtgatgatgtccaagacgacgttcggctatcagctcaaagcctgcggctccaaccgtcatgccgcgcgctacgccggtatcgccgacaagcgtaacatcgtcatctccatggcgatcgcgggcggactgagcgcggcgggcgcttcgctctactatctctccggcaacacagagttcttctggtccacgtaccagtcgctccctgccatcggcttcaacggcatccctgttgcgatgctcgcctcctgtaaccccatcggcatcatcttcacggcgctgttcatgtcgatgctcgatatctcgggcctgcagctgacgaacctgacggcctataacgagtacatcacgaacgtcatcatcgccgtcatcgtgtatctgagcgctttctcgctggtcatcaagatgtggatcggcaagctcggcaaaaagaaggacgacggcgcggatgccaacgcggagcccgccccggcggcagcttccgcaccagccggtgcacaagcggaaacggagaaaggaggcgacgcgaaatgacattcctcattcagcagacgctcatttatgccgtccctctgatgatcgtggcgcttgcgggcgtgttcgccgagcgcagcggtatcatcaacctggcgctcgaaggtatcatggtcttcggcgcgttcatcggcgtctggttcgtgcgcattctgcagacgagcgacgccatcctctccctcaagcagagcggcaactgggtcgcgctgcagggcgtggagcttctcacgatgctggtcgcggcggccttcggcgcgctgttctcgctgcttctgagctttgcctctatcaacctgcgtgccgaccagaccatcggtggcacggcgctgaacctgatggcccccgcactggtgctgttcttcatccgcatcatcgccaaccagaatacgctgcagatgctcacgggcgacgcggcgagctggttcatgatcaaaaagtctacgctcggcatcgacaagaacaccgacctcggctttttcggcgagacgttcgtcaacaaggtctaccttgcgacctacgtctgcatcctgcttttcatcatcctgtcgatcctgctctataagacgcgcttcggcctgcgcctgcgcgcctgcggcgaaaatccccaggcggcggattcgctgggcatcaacgtctacaagatgcgctacgcgggcacgaccatttccggcgcgctcgcgggcatgggcggcttcgtctatgcgctgacaacggcaaactgcgcctcgaacggcgacgttgcgggcttcggcttcctcgcactggccgttatgatcttcggcaactggaagcccgtgaatatcgcggtctcctcgctgctgttcggcctcttcaagtgcatcgcggcaagctatgcgagcatcgacatcaacggcgacggcgtcttcatgttggcggagatcggcatcagcgcccatctctaccgcatgctgccgtatatcgtcacgctgctcgtgctggcgttcacgtccaagagctcccgcgcccccaaggccgagggcatcccctacgacaagggccagcggtaacgtacatcaaaaagcggtatggcaatgccataccgcttttttgcaaatgaaatctatggagagaactatggagatcagagaaattacgactcccgatgaaaagcggcgcattacgcgcttgattttagaatcgctgcccgactggtttggcattccagaggcgcgcgaggaatacatcgaaaagagtgttaagcagccgtttttcgccgcgttcgacggcgagaacgccgtcggcttcctttaccttgccgaaacggggagggatacagcggaactctatgtcatgggcgtgctgaaagaataccaccgccgcggcgtcggcaagatgctctttgccgcagcgaagcagcgggcgaaggagcttggctactcgtttttgcaggtcaagaccgtgcagatggggaagtaccctgagtacgacgcgacgaaccgcttctatctcgccctcggttttggcgagtttgaggtattcccgacgctctgggacgagtggaacccgtgtcaaatctacgtgatgagcctgaaataagaaaatgttggaactttttcccgctgttttgcgtctataaaagcagaaaaacaggggagggaagcatatgaccgtccgcgaaccgaaaaaacgctctaatttgcggctgaagctcggcggcgcgtattttagcgcgcagcgaaaactcagatggctttcgatgcggaagcattttgcgcgcgagcgcagcggggaagacttagcgtatcaggcgttttcccaccatacgccgctcatgcgaaagctcaaggacgtcgacatgcagctccagcgcaacaaggtgacgaatctccgcctcgcctgtgcgcggctcgacgggcttttgctgcgccccggtgaaacgatgagctactggtatctcatcggaaagccgacggcggggaaggggtatctgcccggcatgatcctgcgcaacggcgggtatctggccgcgacgggcggcgggctctgccagctctcaaacctcatctactggatgacgctgcacacgccgctcacggtcgtcgagcgccaccgccacggctacgacgtctttcccgacgcgaaccgcacgcagcccttcggcagcggtgcgacctgcttttacccctatcttgacctgatgatccgcaacgacacacaggacacctatcagatgcgcgtccgcgtcggcaaaacagaccttgagggcgagtggcgcgtgagcgccgagccgaccgagcgctatgcggtcgtcgagcgcagccacgagatgcgcgcgcagtactggggcggctacatccgccacaacgagctctaccggcagacgtttgatttgcagggcaagctgctcgcggagacgcctgtcgccgtgaacgacgcggtgatgatgtattcgccgtatctcgaagaaagcaaaaaggaaggctgacaaagtcaaccttccttttatcttattcagccgtttcgtccgcctcttcgggcgtatcctcttcctcgggctcttcccacggctgcatcgtggcgacgcagcggttgatgttcttgccctcggcatagaatttggcctcgtagtcggtcatcacgccgcgctgtccgttcgcgtgcagatcgcgtgtgacctcagagagttcgaagccaaactgcgggatctcctcgatcgaccactcaaacagcgggtcgttgtcggtcttgaaatgaatttggccgttgtccttgagcaccttgcggtagagcttcaagaaattgccgtgcgtcagccggcgcttggcctgccgcttgggcggccacgggtcgcagaagttgacatagatgcggtcgacctcgcctgcatcgaaaatttcgggcagctggttggcgtcgatgtcgatgaagaagacgttgtgcagctctgccttcgccgcgcgctccatcgcgacgaccatcgcgtcgggcaccttttcgaccgcgatgagcagcacgtcgggctccgccgcggccgtctcgacggtgaagcggcccttgccgcagccgagctccacgcggatctccttcgcctcgggcatcaagtcgtgccagcggcccttgcgctcgtaggggtccttgatctgatacgccccgcaccgctccatgcggggaagcaggtttttctttttgcgcattcgcatagaatgaacctcgttttcctataattaaagcctatcatatcgaaaattggtgcaagagacaagtcattttaaaaattttatacaagagttgctgcattgggagaaaagatcattaaaaatgcaacgtttcttgcaatggcaccggaaaagtgtgaaacttttttgaaaaaagtgatttttctcttgcaaatatgccttgccgcccatataatagggagcagttgaagaagacgggaggagacacacgatgtcttttgtcaaatatgaacccaagggcaacattgcctatctcatcattgaccgcgaaaaggcgctcaacgcgctcaattctcaggtgctcgccgatctcgatgctgcgctcgacgcggtggacttaagcgagatccgctgcctgatcgtccgcggcgcgggcgagaagtcctttgtcgccggcgcggacatcgcgcagatgaaggagctcagcaaggaggaggccgaggccttcggcaagcagggcaacgacgtcatgcgcaagctcgaagcgttccccatcccgacgatcgcggcggtgggcggctatgccctcggcggcggctgcgagctcgcgatgagctgcgatttccgcatctgctccgataccgccgtcttcggccagcccgagacaggccttggcatcacgccgggctttggcggcacacagcgccttgcccgcctcgtcggccccggcatggccaagcagatgatctacaccgcccgcaacatcaaggcggacgaggcctaccgcatcggccttgtcaacgcggtctatccgctttctgacctctacgccgcggcggaaaagctcgccggccagatcgctggcaacgcgcccatcgcggtgcgcgcgtccaagcaggcaatcaacgacggtcttcaggtcgacattgaccgcgccgtcgtgatcgaggagaaggccttcggctcctgcttccagagtgccgaccagcaggagggcatgggcgccttcctcgaaaagcgcaagcacgagccctttatcaacaagtgattccatagaattatctatttatattgtaggaggatacacacaatgaaagttgcagttttcggcgccggcaccatgggcagcggcatcgctcaggtcttcgcggccaagggccacaccgctctgatgtacgcttccagcgtcgcttccgctcagcgccacaaggataagctcgccgcttccctgcagaagcgcgtcgagaagggcaagatgaccgaagaggccaaggacgccatcctgaacaacatcctcgtcgaggagaagtctgccgcggcggacgccgacctcgtcatcgagtgcgtggcggagaacatggacaccaagcgtcagctcctcggcgagctcgacgagatgtgcaaggagagcaccgtcttcgcgaccaacacctcttctctgtctgtcaccgagatgggtctcggcctcaagcacgccgtcatcggcatgcacttcttcaaccccgtgcccagcatgaagctcgttgaggtcatccgcggcgccaacaccacgcaggagaccttcgacttcatctacaacctctccaaggagatcggcaaggagcctgtcgaggtcgctgaggctccgggcttcgtcgtcaacaagatcctgatcccgatgatcaacgaggccatcggcctggtcgagaccggcgttgcctctgtcgaggatatcgacaaggccatgatgctcggcgcgaaccaccccatgggccccctcgccctgggcgacttcatcggccttgacgtgtgcctcgccattatgaacgtcctctacagcgagaccggcgatccgaagtatcgtcccgctctgctgctcaagaagatggtccgcggcggccagctcggcaagaagtccggcaagggcttctacgattacagcaagaagtaatccgtccctaaaaggataaaaaggagaggcagtttacaaaaactgcctccccttttctcttttggaatggaaaggattcctgaaaatgacagaaaactgtcataaaaggaacggaaatgtcaaaaaggctttaatgaattcggcaaaaagcacgaattccaaaaaggaatgatagttccccttgcgaaaatgaaacgcacaggatataatgagagtcacggaactgatttgtgaaaaattagacaatccaattatttttatagtgaaggagcaaaagactatggatttccatctgtccaaagaacatctgctggtccgcaaaatgtatcgcgaatttgcagaaaatgaagtcaagcctttagctgaggaactcgatgaggaagagcgcttccccatggagaccgtcgaaaagatggccaagctcggcatgatgggtatttacttcccgaagcagtacggcggcgccggcggcgatgttctcagttatgccatgtgcgtggaggagctcgctaaggtttgcggcaccaccgctgttatcgtttctgcccacacctccctctgctgcgctcccattttcgagaacggcaccgaggagcagaagatgaagtatctgcctgaccttctgtccggccgcaagatcggcgcgttcggtctgaccgagcccggcgccggtaccgatgcctccggccagcagaccaccgctgtcaagaacgagaacggcgactacgtcctcaacggcagcaagtgcttcatcaccaacggtaacgttgcctccactttcgtcgtgttcgccatgaccgacaagagcaagggcaaccacggtatcaccgccttcatcgttgagaaggacttccccggcttctccaccggtaagcacgagaagaagatgggtatccgcggcagctctacctgcgacctcgtcttcgaagactgcgtcgtccccaaggagaacctgctcggtaaggaaggcgaaggcttcaagatcgccatgaagaccctcgacggcggccgtatcggtatcgcctcccaggctctcggtcttgccgaaggcgccatcaacgaggctgtcaagtacaccaaggagcgtatccagtttggtcgccgcctgagccagttccagaacacccagttccagctggccgacatgcacacccgcactcaggctgcccagtacctcgtttacgctgccgctatgaagaagcagaatcacgaggattactccatggacgctgccatggccaagctcttcgcggccgagaccgcttccgacgtcacccgccgcgctgttcagctcttcggcggctatggctacacccgtgagtatcccgttgagcgcatgatgcgcgatgccaagatcaccgagatctacgagggcacttccgaagtccagcgtatggtcgttgccaagtatcttggtgtgaactaaaaaaggaggtaaagatataatgaagattcttgtttgcgttaagcaggtccccgatacctccggtaaggttgccgtcaatcccgatggtaccctgaaccgcgcttccatgcagaccatcatcaaccccgatgatatgaacgccgttgaggccgctctcaagctcaaggatgagctgggctgcaaggtcaccgtcgtcaccatgggtcccccgccggcagaaggtatgctgcgcgagctgatggccatgggcgctgatgacggctatctcgtttccgcccgtgagttcggcggttccgatacttacgccacctcccagatccttgccgccgctctcgacaccatcggtctcgatgacgacgacatcgtcttctgcggccgtcaggctatcgatggtgataccgctcaggtcggtcctcagatcgctgagaagctgcacctgccccagatcacctacgccgccgatgtgaagaaggaaggcaacaccctgaccgtcaagcgcatgctcgaggacggctacatgaccatcaaggctcagactccgtgcctgatcacctgcatcaaggagctcaataccccgcgttatatgagcgtctccggtgtgtttgagtgctattccaagcccatgaaggtcctcgattacgaggcgctgaaggatcatgaactgatcgacgccacgaccatcggcctcaagggctccccgaccaacatcctgacctccttcacgcccccccagaagggcgccggtcagatgctcgagggcaacgacatggctacctgcgagaagctcgccggcatcctgctcgaaaaacacatcatttaaggaaaggagatcaatacgatgcgtaacgaagtgaaacttgctaatcccaactatgactcctccaagatcgaagagttcaagaacgtatgggtcttctgcgaacagcgtcagggccagatgatgtccacctcctatgagctgatctccgaaggccgcaagctggcggacgagctgggcgtgaagctctgcggtctgctggtcggcgacaatgtcggcgatctcgccgagagcattggcggctacggcgctgatgaggtcatcgtctgcgaccaccccctgctgaagaactacaccaccgacgcctatgccaaggtcatctgcgacgtcatctccgagatgaagcccgaggccttcctcatcggcgcgaccaacatcggccgtgacctcggcccccgctgcgcagcccgtctgcacaccggtctctgcgccgactgcacccacctcgacgttgacatgcccatctacaaggacttcctgcgcggcgcttccacgctgcccgaggccaagatcgacggcatggccaccgcgaaggtcatgggtaaggaccacgatgtctctcgcgacctgaagatgacccgtcccgcgttcggcggcaacctgatggctaccatcatctgcccgcgcttccgtccctccatggcgacggtccgtcccggcgttatgaagaaggctgcttacgacgaggcgaaggccaaggccgttaaggtcaccaagtacgacgtcaagctcgacgccgccgatctccagaccgaggtcgtcgaggtcgtcaaggctgccaagaagctcgtcgacctgatcggcgctgactacatcgtctccgtcggccgtggtatctccaaggacgtcgagggcggcatcaagctggccgaagagctggcggac

SEQ ID NO: 298 - DNA, 18605 bp, unidentified
  source 1..18605: mol_type = unassigned DNA
ccccaaatgccccagagggcaatggttcggatttgggttgcttcgctccaccaaacatgagtcaccaactttggttggtggctcttttttgttgcattctcgttcgtaagtccgtgtatggagaattagggactcgaacagggcggcggtgcgaagcaccgtaagcaatcagcccagtgggctgttgcttagcccgcgggtcctagacctgtaggaatgtctaccggggacacagtgcttgccggagtgccttttcaacaaacgtaagtccgtgtatggagaattagggactcgaacagggcggcggtgcgaagcaccgtaagcaatcagcccagtggactgttgcttagcccgcgggtcctagacctgtaggaaagtctaccggggacacggtgcatgccggagtgccttttcaacaagcatgagtccgtgtgtggagaattagggactcgaactccggcggcgacgaaattttgagcagaaaataacacaaaaaggcagggtatcatcatggtgatggtgtcctgccttttgtgctatatggcgcgtttggggataatcgctgcgcacatggtcggtacgcacgtacgcagtaaaaagggcagggtctgatatataacagtagtcttttattgtgtaatatgatatactcaagtcaacataacaattgtgaacgagctatctaaaaaaggaggtatttgctatgaaaaaagcatcgaacatttgggttcgcagaggtcttttgcttcaccgtttgcatggacaggaattggcattagctctcctattaaagcaaaaaccgatgtctgctccacaaatttgctcgtcccttttggaaaaagaaatacgctttgaccgcaagaagattggaaagcttttggcagaccttgaatggtggggagttgtctctaacgatagtggtgtatatagctgccaatgtgctgtgctggataactgtcaagagagctataacgagagccaattgattgatttgattgggttgactcaaaacactgtgaatggccaatctttttatagttctatgcctccgatgagcgtcagttctcgtggacccagtggtgcataattgtgtgatttccaaatagtaagaagcagggtccggggcaggcacgccccaacaagaacacttcaaaaacgcgggagcgttgcagaagtgcagtcccggaagggtgcaacattttcaagaattgaaaatttgtggccacgggacgttttttgtccctgcgttttcctgaaaggatcgaaagagctaaaatgattcaaaaacacgaactgcctattttagagtacgattccaactcggaagaagtcataaagccaaatcatggtgcagaacagctgaaccttcccgaaaaatgcgtctatgcctttcttggagaagcagttgatgattatgctttcgaggcagaagccaccgttgctgaaacttttgaaaccataacccggaactatcctgtttacatcgtaaagcaggatggcatggaattttgcctttgcgctgccccgctgggcgcacctgcggcagcacaactgatggacttcctcatctcctgcggttgtaagaaaatcatttcgactggttcttgcggtgttctgaccgatttggccgaaaacgaatttctcattccggtaaaggcgttacgagacgagggaacctcgtatcattatcttccggcatcccgctatatagagcttaacaaaaatatccgggatgccatcgagcatactcttcttgtgcagaacattccgttccgggagtgtgttacatggacaacggacgggttcttccgggaaacacaggatatggtgcggtatcgcgtagcagaaggatgtacaaccgttgagatggagtgtgccgcattggctgcttgcgcccggaagcgaggtgcatctttcgggcagattctctatacggcagattcccttgcaaacgttctgaaacacgatgaacgtgattggggaaagaactctttacggaaagcactggaactctgtatcgctgtgctgcaaacgatttgaaggttcggctgctgtggacaatgctccaccaaacaggagtcaccaactttgattggcggctcttttttggtgcattctcgttcgtaagtccgtgtgtggagaattagaaactcgaaccccggcggcgacgaaattttgagcagaaaataacacaaaaggcagggtatcaccgtggcggtggtatcctgcctttttgcatgatagagcgtgttttgaggggaaattttacgcttcccccaccacaaaggtcaattccgctgtagcggcacatttgccgtccacataagccgacgccttgccgacgccgaccgggccgtgctgttccaccaattcgcagtggagggtgagcacgtcgccggggatgacctgtctgcggaagcgggcgttcttgatgccgccgaagagggccagcttgcccttgttttcgggcagggagaggaccgccacggcgccggtctgggccagcgcttcgaggatgagcacaccgggcatgaccgggtggccggggaagtggccgttgaaaaattcttcgttgcgggaaacgcacttgcggccgatggcccagcggcccggctcgtagtcgaggatgcggtccacgagggcgaagggatagcggtggggcaggagggcggcgatctgtgcgctgtccagcgcgttcgcgttctcccgcacggtgcggggttctgccatggtcagccctcccatctgcgcagggcgatgcaggcgttgtgcccgccaaagccgaggctgttgctcaaagcgtaggtcatggcctgtgcacggcctacattgggcacataatcgaggtcgcactccgggtcaggctgctggtagtggatggtgggcggggcgaactgatcccgcagggccagcgcggtgaacaccgcctccacgccgcccgcgccgcccagcagatgcccggtcatgctcttggtgctgaccacggtgagctgctttgcgtgttccccgaagaccgcgtggatggcggccgtctcacaggaatcgttcatgtgggtgccggtgccgtgggcgttgatgtgatccacctgttccggggcgatgcccgcatcggccagcgtcagcttcatgcagtcgatggctcctgcgccgccgggggccggggcggtgaagtggtaggcgtcacagttggcaccgtagcccacgacttccgcgtagatcttggcaccgcgtgccttggcgtgatccagctcttccagaaccagcacgccgctgccctcgcccatgacgaagccgccgcgccgcgcatcgaaggggaggctggctgcgtccgggtcagtggccgtggaaagggccttcatgctggtaaagccgccgatgcccaaggggctgatgcagctttccgcaccgccgcagaccatggcggtctcgtagccgtcgcggatgcggtggaaggcgtcgcccacggcgttggtgccgcccgcacaggcagtgaccgggcaggtgcagatgcctttcaaaccaaagcggatggcgatttgtgccgccgccatgttggcgatggacatgggcacgaaataggggctgaccttttccatccccttttcctcgccgcgggtgtgctgctcctcgatggtgggcagcccgccgatgccgctggaaaggatgacgccggtggtcttggcatccgcttcggtgtcgaggccgctgtcggcgagagcttcggcggcggcggccagcgccagcagggtgaagcgggccatcttgcgggcttcttttttgtccacgacggtctctgggtcaaaatccttcacttcgcccgccagcttgcacttgaaatcggtggtgtcgaattgggtgatggggccgatgccgcatttgcctgccctcgcggcgtcccagctggcagaaacgctggtgccaagcgggtttacggtgccgaggccggtgatcacgactctgcgtttttccatgagaagtttctccttttacattgccatgccgccgtctgcacagagcacctgcccggtgagatagctgctttgttctgcggcgaagaacgccacggcgtttgccacgtcctccggattgcccggccggcccagcgggatgccttttgccatttcggcgcggacggcttccggcagggcggcggtcatgtcagtctcgatgaagccgggagccaccgcgttgacggtcacgttccggctggccagttccctcgccagactcttggtcaggccgaggagccccgccttgctggcggcgtagttggcttgtccggggttgccccgcagagccacgacgctggaaaggttcacgatgcggccataccgctggcgcaccatccggcgggcggcttccttgcagcagaggaacgcgcccttcaggttcgcgttcagcaccgcgtcgaagtcctcctcgctcatccgtaagatcaggttgtcgcgggtgatgcccgcgttgttcacaaggatatccacccggccaaaggcggcggctgcttcgtcaaagagccgcttgcagtctgcggcgctggccacatcggcctgtacggctacggcgtttgcaccttccgctttgcagagggccgcagtctcggcggcggcggcttcgccgtggcagtagttcacgacgacgttgcagccctgctttgccagcgcaatgcagacggcccggccgatgccccggctgccgccggtgacgatggcagtgcggacgattttttcttcgctcattgttcttccttccatgcggtcagcaccgcatccagctgcgccggggtctccaccgatgcgcagacgacgccgggcagggtctttttcacaaagccggaaagggcgttgcccggcccgacttccagaatgtgatccaccccaagctgccccaagcggcggagggtgtcctccatgtaaacgctgctctgcacctgcttcaccagcagggcggggatgctgctgccgtcgggcatttcgcggccaaggcagttgaagagcaccggcacctgcatttcgccgaaggcctccgtctcgaaccgcttagccagcgcgtccccggcaggggccatgaggcgggtgtggaaggggccgctgaccttgagcgggatgcagcggcgggcaccggcggcctttgccaattcagcggctttgtccacggccgccttctcgccgccgatgacgagctgacccggacagttgtagttgcagatctgcacacagcccagcgccgacgcctcttcgcagcagacggcgagggcatcccggtcaaggttcagcacggcggtcatcccgcagtcgatgcccttggccgcgtcggccatggctttgccacggtaagcggccagctcgatggcctgtttcgcggtgaacacccctgcggcttccagcgcggagtattcgccgagagagagcccggcaacataggagggctgtacgcctttttcggccagaacggcgctgacgccgcacgcaaaggccaccatgcagggctgggtgtattcggtctggttcagaacgccgtccgggtcctcgaagcagacgcggtgcaggtcgaactccagcgccgcgctgtcgaaggccgcccggaaagcgggaaaatcttcgtaaaattctctgcccatgccggggtgctgggcaccctgaccggcatacaaaacggcaagtttcataggttgtgcctccattcggtgacaagttcgtccatcagttcccggacactgcgcatccggtccaactgccccacattggccccgcagaagaagagtccttcctccacgttgcccttcacggcctcaatgagggcgtgggtgatgcagtagggtaccttggcggggtcgcagctcttcaggcagcgggcgcagcgcttcggcgggaagcgtctgccttccgccagtgcctgtaccagcggggtgttcagcgcccgccccggcatccccaccgggctgtggatgatccgcacatcctcggcgctggcgttcagcagaacgtccttgtagccttgggaggcgtcgcactcgtaggtggggatgaagcgggtggcaagctggactccagccgcacccagcttggtgaagtgggccatgtcggccccggtgtaaacgccgcccgccacgaaaacggggatggggtggccgaactgggccgcaaagggcttcacctcggccagaacttccggcaggatggtgtcgaggggctggcaggtcccggccagcagttcttcctcggcaaagccgaggtgcccgcccgccttgcagccctcgatgaccacaaagtctgcggtgcggccaaaggccttggcccagcggcgcaggatgagcttcgccgctcttccgctggaaacgatgggcgcaatggcaacgtccggtgtgttcacaaggccgggcagttccagcgggagccccgcgccggagaccaccgcgtccacccccgcttccacagcggtgcggatggcggcggcgtagtcctgcgtggctaccatggcgttgatggccaccatgcccgcgccatgggcaatttccttcgcttttcggatctctgctgccagtgcgcggtggttggcggctgccgggtcgcgggcaaagtccggctcccggtagcccgcgtcggcggtggagatgcagcccatgccgccgcacgcggccacggcaccggccagcccgccgagggagacccccacgcccatgccgccctgtaagatgggcacggacagggtctttttgccgagggtcagcattcgtcgctcagcgcggcgatgcgctgcctcccgccgtcccacaggtcggccagaatgtcgaccacggggcgcacctcgtggagcatcccggccacctgcccggccatcaggctgccggtggcggtgtcgccctcaaagacggcccggcgcagactgcccagcgtatacttttccagttccattttgtcaaccccggccttttcctgccggacgtattcccggctcatccggttcttcagcacccggacgggggagccgccgatgcggccggtcacgatggtgtcgctgtccttggccttgagcagggcggctttgtagttttcgtggatggggcactcctcgctcacgaggaggcaggtgcctacctgcacgccgcaagcccccagcgccagcgcggcggcaagctgccgcccgtcggcgatgccgcccgccgcaatgacgggcacgttcacagcgtccaccacctgcggcaccagcgccatggtagtcatttcgcccacgtggccgccgctctcggtgccctcggcaatgacggcgtcgatgcccagcggctccaagtgcttggccagcacggctgcggccaccacggggatcaccttgatgcccgcagctttccacatgggcacatatttgccggggttgcccgcgccggtggtgacgacttggacgccttcctccaccacgatcttggcaaattcatcggcctgtgggtgcatcagcatgatgttcacgccgaagggcttgtcggtcagctccttgcagcggcggatattttggcgcagggtgtcggcgttcatgccgcccgcgccgatgaggcccagtgctcctgcattggaacaggcagcggcaaactcgccggtggcgatgttggccatgccgccctgaatgatggggtacttcgtccccagaatttcgttcaacaatttcatattcactctctatactgaaaaatcgcgccgccccatgtcaggccgccgccgaagccgatacaggccagcggctgcccggcgggcagaagtccgcgctcggccagctcgttgagggccaccgggatgctggcggcgctggtgttgccgtggcgatccatgttcttgtagaacttggctgggtcggcgttcagcgctttcacgcagtggtcgatgatccggctgttggcctgatggcagaccacccacgacagatcgccgagggtgagctgcgtttcgtccagcaccgcgtggaggcacttgggcagggtctccactgcaaagcggaagaccgcccggccatccatcgtgatgggggcggagccgttccggtccggtcctccggcgtggaggacatcgctgccccgtgcgcccagcgtcagggcgaagggggtgtcagccagccggaaaatggcggctccggccccgtcgccgaagaggacgcaggtggagcggtcggcggggtccatcaggcgggagagagcctcgcacccgatgacaagggcgtactgcccgcccagcgtttccagcagcccccgcgccacggccatgccgtacaaaaagccggagcaggccgcgttgatgtccagcgcgggccggtcctccggcagacccagcgccgcctgtacctgacaggccacgctgggggtggcgtccggggcggagagggtggcgcagacgcagcaggagatatcagaaggggagaggccgctgcgttccagtgcctgacgggcggcggcaatggccagcgtggcggccgattcttccgccgtgcaccagtgccgggtgcggatgccggtgcggctttcgatccacgcatcgctggtgtcaaccagctggctcagctcgtcgttggtgaccgtgcggccgggcagggccccgccggtagcggtcagtagtaaaccgttcatgcgttcctcgtttctccgatctggcggtattttttgtagcgctggtcggtaagctgtttttcgctcatccggcagagctctttcaggtgcatccgcaaagcggcgtccagccgctcgaacagagctgcatggctgcgctgggccccgcccaccggctccgggatgacctcttccacgatgccgccccggtacaggtcctgtgccgtcagcttcatcatctcacaggcttcgccgctgcgggaggcgtccttccacaggatgctggcaaagccttcggggctgaggacagagtagaccgcattttccagcatcaggatgtggttggccacgcccagcgccagtgcgccgccggaagagccttcgccggtgacgacggcaaggaccggcacggtcaggccgctcatttccataagattccgggcaatggcctcgccctgaccccgctcctcggcgtccttgccggggtatgcgcccggcgtgtcgatgaaggtgaggatggggcggccgaacttttcagcctgtttcatcagccgcagggccttgcggtagccctccggccccggcatcccgaagttgcaggccagattctcgtccagcgtggagcctttccggtggccgatgacggtcacgggcatcccgtggaaccgggccacgccgcccagaatggcggggtcttccttgcactggcggtcgccccgctgctcgaagaaatcggtgaacagggcggaaatgatctcgtcgatgtgggggcgctccgggtgccgggccaaaaagacccggtcttccgccgtcagcgggccgcaggtgcgaaggatctcgtcctcctccacggccagctcggccagttccgaagcgtgggccgtcagggcgtccatgtcattgccgttgcctttcagcgcggcgatctgggcatccagcggggccagctgctctaaaatttccttgatcattcgtgttttcctcctgcatggagctgcaagacttggatcagcgtatcccgcagctggctgcggggcacgacctgatccacgaagccgtgctccatctggaactcgctgcgctggaacccggcgggcagcttttcgccgatggtctgttcaatgacacggggcccggcaaagccgatgagggctcccggttcggccagcatgatgtcgccgaggctggcgaagctggcggtgacgccgccggtggtggggtgggtgagcacgctgacgtacagcccgcccttggccgaaaagcgctggatggcggcggacgtcttggccatctgcatcaggctgaaaatgccctcctgcatccgggctccgccgctggccgaaaagatgaccagcgggagccgcttggccgcggcgtactccacggcgcgggtgatcttttcgcccaccgccgtgctcatgctgcccatgaagaaccggctgtccagcacggcggccacacaggccaccccgccgatgcgccctgccgccgtgacgacggcctcgcgcagcccggtcttgttctgggcggcggaaagcttctcgccgtagccggggaaatccagcacatcctgcggggcaaggtcagcatccagttcccggaagctgccgtggtccagcaccaagctgagccggtagtacccgccgatgggcatgtgatagccacagttggggcagacgtacaagcttttcgcccacagggtgcgggcagcgcggcggccgcactgcttgcactctacgaactgcggctcgtgccagacggccccggcgtcccgcttggccttgagctggaaggtgcgctcccgcatccggccggggaagagatctcggatatcgttcatggttctctgcctcagatatgtgcggtgatgtagttgtagatgtcgcccacggtcttgaggtttgccagctcctcgtcggggatggacactccacaggcatcttccagagccatgttcagctccaccgcgtccaagctgtcggcttcgaggtcctcggtcaggctggcctccatggtcaccttgtcctcctcgcagttcagggtatcgacaacgatcttcttcatttcttcaaacgtcatggtagtgttctcctttttgattgataaattttattatctaaaaacattgatgtttcttgcgaacacgaccattataacgaaatcgttggataagtcaagacaaatagttaaaaagttttagattttacaattctgacacaggtttcttcctttaaaaataggggccatacagcaaacgacccccgtcggctctgttttcacacagcagacgggggttcgttaaagccaaggactgcggcacacatggcaccgcagcccttggctttacgaaaacggaacgctgcaaaaaagatcggatgcgtcggaaaagctgccataaaaatttggcttgcgcagcgccgccgtgggatcgcgcagggaggcggtgttgtgcagagccagcggcatcaggccctgcagtcccgcctccgattgctgaacctcaacgattgtgatgttagtatactgcaacaacgcacagttgtcaagcaaaaaaattgagatttcgccattttatagaaaaaacattgcattccctcaatgagtgcgctataataaacgcagaagcaacagaaaggatgggaaccattatggcagaaaaggtcgaaagcttttccaagcggctgcggatcgggctggaccggaagagcatgacgcagacggaactctcgatccggtcgggcgtctccaaatcgagcatttcgcggtatctcaaaggcgactgggaaggcaagcaggaggccgtgtacgcccttgccggggcgctgggcgtctcggtatcgtggctgatggggtacgatgtgcccatcaccggcgtcgaagcgcccggcaccatcccggcggggttcgagccgctgccccagatgaccaatgtgccgctggtgggttccatcgcctgcggcacccccattctggcggaggagaacatcaaggagtacatcggcgtcccggcggcgtggcgggccgattttgcccttgagtgccatggcgacagcatggccccccgcatctgcgacggcgacatcgtctgcatccgccgccagccggaggtggagtccggccagatcgcggccgtccgcatcggggacgaagccaccctcaagcacttttaccgcagcggcgacgtcgttcagctcatcgcggaaaattccgccgtctgcccgcccatggtctacgcgggcacccagttggaggagatggccgtggaagggctggcggtgggcatctgccgcagtctggtgtaagaaaggaacgtttctatgaagtatattatggcactggatgccgggactacctcaaaccgctgtatcctgttcaaccaagcgggcgagatgtgcagcgtggcccagaaggagttcacccagtattttccgaagcccggctgggtggagcatgacgccaacgagatctggaccacccagctgggcgtggccctttcggccatgaaccagatcggggccggcgcggcggatatcgcggccatcggcatcaccaaccagcgcgagaccacgatcgtctgggacaaggagaccggtgagccggtctaccatgcgatcgtctggcagtgccgccgcaccagcgtctactgcgacgagctgaaggcccgcggcctgaccgaaaaattccgggaaaagaccggcctcgtcatcgacgcctacttctcagccaccaagctgaagtggatcctcgacaacgtccccggtgcccgcgccaaggccgaagccgggcggctgctcttcggcaccgtggaaacgtggctcatctggaagctgacctgcggccgggtccacgtcaccgattacaccaacgccagccgcaccatgctcttcaacattcacacgctggagtgggatgaggagatcctgcgggagctgaacatcccgcgccaaatgctgcccacgcccatgccctccagttgtttctacgccgaggccgaccctatgcacttcggcgcgggcatcaaaattgcaggcgcggcgggcgaccagcaggccgccctcttcggccagacctgtttttcggcgggcgaagcgaagaacaccttcggcaccggcggctttcttttgatgaacaccggcaaaacgccggtcatctcgcagaacggcctcgtcaccaccatcgcgtgcggcggcaacggcagcgtgaattatgcgctggaaggttcgatcttcgtggccggcgccgcgattcagtggctgcgggacgagctgcggctgctggaagacgcccgcgactccgagtacatggcccagaaggtcaaggacaccaacggctgctacgtcgtgcccgccttcaccggcctcggcgcgccccactgggatcagtacgcccgcggcaccatcgtgggcctgacccgtggctgcaacaaaaaccacatcatccgcgccacgctggacagcctgtgctatcaggtcaacgatgtcctgcacgccatggaggccgactccggcatcgccatgaaggctctcaaagtggacggcggcgcgtgcgccaacaactacctgatgcagaccatggccgatatcagtaatttgcccgtggagcgtccctgctgcgtggagaccacggctcttggcgcggcctaccttgcgggccttgccgtgggctattggagctccacggacgaggttgtgaagaattggtcggtggatcgcaccttcctgccgcagatcaccgccgaggagcgggccaagcggatcaagggctggaacaaggccgtccgctgctcctaccactgggcgctggacgaagaggaatcatgaaagctttggaggaacattatggagattcgaaacgcaggaacagaggatatcgcggcgctgaccgccgttgaggcagagtgcttcccaccggcggaagctgccactgcgcaggagttcgtcgagcgggtccggtactacgggaaccatttctggctcctgtacgagggggacaagctgatctccttcgtggacggttttgtgacggacgaagccgacctgaccgatgagatgtacgagaatgccgccatgcacaacgaggacggcgcgtggcagatgatctttggggtcaacaccctgccggaataccgcaagcacggctatgccgggcagctgctccgccgcgccatcgacgacgccagacagcagcaccgcaaagggctggtgctgacctgcaaggagcgcctccttccgtactacgcccaattcggcttccgcgacgagggcgtgtccgataaatccacccacggcaacgtcgtgtggcaccagatgcggctgacgttttgagaaacccgccgcagttgctggccctgcggcagatcctcgccagttcaaaggacgccatcacaaaatattggaagtaacacaaacgaaccccggccctttcccgcattcagcatgggaaagggccggggttttatcgtttcaggttccggtgggtgcgcttaccccatcacgacggtgacctccacggtctctccggcgggggcgaggggcaggacattgccctcaatggtcttgccgttgacggtgacgcgcttcacgcccttctgcacggcagcggggttctcgacccggatgtggtacacggcaccgcgataccggcgggtgaccgtgaagcccggcagagtgtgggggatgcaggggtcgatcttcaggccgtccagcgtgggctgcacgccgaggatgtactggctcacgttgcagaaggtccacgcagcggtgccggtcagccaactgttcttcgcctcgccgaaggtgggggcgtccttgcccgcgaccatctggctgtagacgtagggttcggtgcggtggatgtcggagatgtcctcgatgtaggcggggcaggtcttcttgtagacctcaaaggcccggtcgccgtggccgaggacggtctcggcgcagctgatccacgggttgttgtggcagaagatgcccgcgttctccttgtatcccggaggatagctggagatctcaccaaggttgaggcggtaggtggtgtaggcaggctgcagcagcaccacgccgtactgggtatccagccgctcttccacgctcttgagggcctgttccgcctgaccggtctccttgccgatgcccgccatgacgcacatgccctgcggctcgatgaagatctggccctcgtcgcattccttgctgccgacgggcttgccgaaggcgtcgtaggcgcggcggaaccatgcaccgtcccagccggcggtcagcgcggcctgttccacctgcgcaatggcggcgcgggcgtcggcggcttcgtccgggaggtcccggtggccgcacaggtcggcgtattccttgccgtatttgacgaacataccggcgatgaaaacgctctccgccacagggccttcgctggggccggtgatctggaagctctcgcccggatgctcggagaagcagttcaggttcaggcagtcgttccagtcggcgcggccgatgaggggcagaccgtgggggccgaggtgggtgcgggtgaagttgaagctgcggcgcagatgctccatcagcggctgagccttgctctcgtcgttgtcaaaggccacggactcgtcgaggatgctgtagtcgccggtctcacgcagataagcggcggtgcccgcgatcagccacagcgggtcatcgttgaagccggtgcccacgtcccggttgccctttttggtcaggggctggtactggtggtaggcgctgccgtcctcaaactgggtggcagcgatatcgaggatgcggctgcgggcgcgttcggggatcatgtgcacgaagcccagcaggtcttggcaggaatcgcggaagcccatgccgcggccgatgccgctctcgtagtagctggccgagcggctcatgttgaaggtgaccatgcactgatactggtgccacaggttcaccatccggtccagcttttcgtcgccggagtccagctgcagggcggacagcaggtcgtcccagtgggcggccagcgccttgcgggcctcgtccacctgcgcgtcggtggcgtagcgggccatcatggcctcggcgcgggccttgttgatgacgccgggggcggtgaacttttcggccaccgggttctcgatgtagcccagcccgaagaggatggtcttcgtctccccagcttccagcgtgaggtggaagtggtgggcgccgatgggggcccagccgtgggccacgctgttggagcagtgccctgccttgacggcttcgggttctgccgggccgccgtacacgccgcagaaagcgtcgcggctggtgtcgaagctggtgaccggagtgttggcccagaacacagcgtagtggtcgcggcgctcgcggtactcggtcttgtggtagatggcgctacccaccacctccacctcgccggtggagaagttgcgctggaagttggagctgtcgtccatggcatcccacaggcagaactccacatagctgaacacatccagcgtgcggggggcgtccgtcttgttctccagcgtcaggcggtcgatctcgcacgcatcgccgcggggcacgaacagctcctgctgggcgcggatgccgttcttctcaccggtcaggatggtgtagccgaggccgtggcggcagctgtaggaatccagctccgtcttggtgggctgccagccggggttccagatcgtgccgccgtcgttgatgtagatgcggtggccgtccatatccagcggggagttgttgtagcggtagcgggtgatgcggcgcagccgagcatcccgataaaagctgtagccgccgccggtgttggacacgaggctgaagaagtcctcgctgcccagatagttgatccacggcaggggcgtgcgcggggtgtcgatcacgtattcccggtgtgcatcatcaaaatgtccgaatttcataagatctgttcctcctttgctgaaaaacaggaaacgcgctgcaaccatcagaaaagcgaaaacgattgagaacgcgccgcaaagagaaagagaacgattacgctgctttaagcatagtcgatttcgcgccgaaattcaagggggtttatgaaatatacaacacacccgacgaaacacgctctttggtcggcttgtaagaattttgtaattattttgaaggaagcaacgaacttttttctcataaagaaggaggggcagcaaaaatccgatggagagggagccgaagccaaaaccgcccaaagcggcaaatcgggaaagaaatttcccatatataaagtaattatagaaatccagcctttgcttcgcccattgacgaaacgccagaacgaaattccattcgaaaaatagcgaaactggccgaaaatggagcaaactgcataatttggccccggcgcaatcgagcaaactgccaaaatgactctgtttagcacaaaacttttgattttgagcttgatttttggtacggaatgcgctatattgaaattgcgaaaacgatttaggattcgttcagagccaaccggttcctgagaggaggacgacgacatgtcatccctgaaagatctggcgcaggaatgcggggtctcggtggcaacggtgagcaaggcgctcaacggccagcccgacatctccgaagccacccgcgcccgtgtccgggaggcggcccgccggatgggctatgtaccaaacatggcggcccgctccatgaagaccaaccgtacttacaacatcggcgtcctgttcgtggacgaacagcagagcggcttggcacacgagtatttctccgccgtgctggacagcttcaaagtccgggtcgaacaattgggctacgatatcacttttatcaaccgcaacctcggcggcaggacgatgacctacctagagcattgccactaccgcggggtggatggagccgtgatcgcctgtgtggacttcaacgatccgcaggtcatcgagctggtgaacagcgatgtgccggtcgtcaccatcgaccatgtgttcaacaaccggatggcggtcctgtccgataacgttatgggcctgtcggctctggttcggacggcatacgcccaaggccaccgccgcatcgcttttatccacggcgagcgcaccgccgtcaccgagaaccgcctcgcgggcttctacaagagctgcgatgagctggggctggaagttcccgatgcgtatgtgcgggagggcatctaccacgacgccgcccgctgcgcacaggagaccaaagccctgctggctctgccgcagcggcccacctgcatcatcttcccggatgacttctccgccatgggcggctacagcgccatccagcaggcagggctgcgcatcccgcaggacatctccgtgatgggctacgacggcatctacctttcccgcgtcatgagccccaagctggtgacctaccagcagaacaccatgatgctgggacgcaccgcagcggataagctggtgcagatggtcgagcacccgcgtgtgacgctggccgaacaactcctcgtgaccggcaagctgctggatggcagctcggtaggccggccgccccaaatttagttcccaagctccgggcggaccggagtttagaaaaaatggatttaggatgaacgagaaaaccattgaaggaggtttttcattatgagaaagatttcgcgtcgtaatttcctgctggcttctggtgcagtcgcagtgaccgcagcgctctccgcatgcggcggcagctcttcttctaccgcaggctccaccgcttcctccaccgccgcttcttctgctgcagcttctgagtccgcagccgctgagggcaaggtcctgaacatctggtgctggaacgatgagttccaaggccgcttcaacgactattatcccgaagtctccgaggtcgccgcggataagtccaccaccaccctgaaggatggcaccgtcgtcaagtggaccatcaacgccaacgagaacaacaactatcagaacaagctggacgaggccctgctgaatcaggactccgcagccgatgatgataagatcgatatcttcctgatcgag

SEQ ID NO: 299 - DNA, 26420 bp, unidentified
  source 1..26420: mol_type = unassigned DNA
ttgctttcttcttttaaaagccggataatctcggagcagatgagcgctttttcttcgctgtattccagaatttccaagtgcagattgttgtgaattttgagttgatcgatgacgaacgagcggttttccgcctcgcgcatcacggtggaggagaccacgcgcacgtttttgcagttgtagccctccagcgccgttgtgaattttgtgaggatagaggagagttggcgcaggctttcaaagctgatgcgtcccgtggtgaagacctcgtggccgaagaacacaggatattcgagagaatccagcatttcgatctcgccgtgctttaactgcgagacacgcatgcgcaccgcactggagccgatctcaatgaccgcagccggcccgcccggaagttttttattcaatatgagcaccgcctttcaatgtagagcaactaaatcggagcgccgccgaaagcgggcccgcaagaattcttgagatatttactttattatagcaaacccgagaggaaaaagcaccctgttttcgccgaattttacataaaatatacgtgagccatacaatcgaataaaaaagatacaacttgctatatagttttaatatataaatgtgcaaatatttcgcacaatattgcctaaaagaaaataaaatgaaatttttttgaaaaaacacttgcatttttgaaagacatgcgctataataatacccgtcgcttggagaggtattctaatggtaaggagccacattggaaatgtggtgtgccgcaaggcattgtgcgttcgagtcgcatcctctccgccagtacccggataacggaagttatccgggtttttcttttatccgcattgctttttgataacgcagactatatactattatatagtgaaaaagaagcaagagcaatatgcccaaacgtttaaatttggaggagtacacatgacatacgaaaatccaatcctgccgggtttttacccggacccgagcatttgccgcgtaggtgaagactattatcttgtcaacagctcgtttgagttttttccgggcgtgccgctttggcatagccgtgacctgctgcattgggagcagattggctatgttttgacgcgcgaaagccagttgccgctggtggactgccgcacctccggcggtatttttgcgccgacgatccgctaccacgacggccgattctatatgatcacgacgaatgtgacaggcggcggcaatttttttgtgtggacagatgacatccgcggcgagtggtccgacccgatcaggatcgaccatcagggcattgacccgtctttgttctgggatgcggacggcaaggtgtattacaccggtacacatacggacgaaaacggcaacaactgcatcggacagtttgagattgatcttgagaccggcgcaaagctgagcgagacaaagtgcatttggtacggtaccggcggcaaatgcccggagggaccgcacatgtaccgcatcggcaattggtattacttgatgattgccgagggcggtacggagtacggccacatggagaccattgcgcgcagtagaagcgtgtgggggccgttcgaatcttgtccgcacaacccaatcctcacgcaccgcaatgcacagcgcgtggagtttcaggcgctcggacatgccgaccttgtagagacgccggagggcaaatggtggatggtgtttcacggcattcgcccgtctgttttcatgctgcatcacaccggccgcgagacgatgattgcgccggttacatgggaggagaacggctggccggtcgtatacggtgacaaggagattcagcccatcatgacggcagagggtgaaggagacgtgcgtgttgcgcgcagttggcacgatgatttcaacacagctgcacctgcaccgcgctggagctatctgcgtacacccgaccgcatgaagtatacatttgataagagcggcgttacactgcgcggcagtgaggcgacgcttgacgagctgaagacggtcacattcttcggtgtgcgccaacagcagtttggtttgaactatacgaccgaaatgacgcttttcggcgacggcaaagcgggcatgacggttttccacacgaacgagcaccactatgagctgtttgccgagcgtaaaaacggcggtatggaggtcacgctgcgccgccgcgtggttgatatgctgatcgagagtaagccggtgttcttcccggaaacggacacgctgacgctgtgcatccaggccaaccgcctgcgctatacgttccttgcgggtaaagccggggaagagatgaaagagatcggcaccggcagcacgcagctgctatccacagagtgcatgaactgcacgtttacgggctgctttgtgggtcttacggcgcagggggactgcgaagcaaagtaccgttattttgacgtttctgtgcccgcaaacgaataaaattcgaaataattaaaaaaacacttgctttttccaccggtttaacgtataataaattttgttaagccggtgtgttggaattggcagacgagacggactcaaaatccgttgatggcaacatcgtgcgggttcgacccccgccaccggcaccacactgagatcccaaacttcttagaaatgagaggtttgggattttttattttacccgtcagtataaataaaagcggcgccgagaaattttttgaaaacaaaatacacgaatgtgaaaaaagcgcagttggtatgatatgtcccccaatactggacacccagtattggggggcatatcagtatgagaaaccgaactgcgcttttttctggttttaggggggatgttttttgatggatttaaagtggagtatagaaattttgctttatctcatagcattgaaactttataaaatacatataaaagcaaagcttagatgggcctgtgaattcaaagagcaatattaggtgaatttgagtaatggaacaaaatataaggggttaatgtcgaaaaacgcaaaataattacacaaatttgaatcaaattccgtcgaattagtcaaattcactaaaaatatcgggggggggtcgtgcgtttgcacataaatgctaatgattttcttgtcgaaatatagtagaataaggataaatttgtgcaactgattttcttcccttcgttgatgggaaaacggatgtattccttttatatatggggtgttcgcagatgtgcagaaaaaagaaaatttggaatggggaaaacaagtgggtaataacagagaaaacgaaacagagattgatctgctgcagcttgcaaaagccctgtggcacaaagcatgggccattgtgcttgtgacgcttatcacggccgctatggcatttgcgggcacaaagctcttcatcacaccgctttatacggcgagcgccatgatgtatgtgaacaacagttccatttccgtcggaagcacgcaggtgaacctgagtgacttaaccgcagcgcagagccttgttgagacctacatggttattttgaagacccgcggcacactggaggaggtcattaaggaagcaaatctgccgtatgattacgagcagctttccggtatgatcgaagccggcgctgtgaactccacggaggtcttttccatctctgtgacgagcgcgagtccggaagaagctgagaagattgcgaacacgattgcagagctgctgccgaaccgcattgcagacatcgtagagggtagttccgtgcgcatcgttgattacgctgtggtgccgtccaagaaaacttcgccgagtctttctaaaaacacgatgctcggtgcagtgctcggctttgtgttgagctgtggcgtgtttactgttctgtatcttctggacgatgttgtgcacaacgaagattacgtacgcgtgacgtttgacctgccgctgctggctgtggtgccggatctgacggaaaagaattcgagaagcaactattactattatagagatggcagcaaaggtgggaaggaggaaaacgcatgagaaaatataggaatgcagcctccgactacgagtacggcgcaatgctcggtgaaaacctaagctttgcagcttccgaagcatacaagcttctgcgtacgaaccttgactttgcgctttccgatgagcagaaatgccgaattatcggaataacgagttctatgcgcggcgagggcaaaagtaccaccacactgaaccttgcgtattccattgcggaagccggcaagcttgtgcttgttattgaggcggatatgcgtctgcctacgtacacaaagcgtctgaacattcagacaaagaagggtatttccaacctgcttgcaggccaatgtacgggcgcggatgtgctcagccgctgcgagctgcacaagaacatgtgggtaattcccgcaggcgatattccgccgaacccgtctgagctgctcggctccgagcagatgcgcattacactggatgttctgagtcgtgatttcgattatatcctgttggatcttccgcctgtaacggctgtttccgatccgctcgttgtatcgaagctcatgaacggcatgctgcttgttgtgcgccagaattacgctacacgccgttcagtcgcagaaaccgtgcgtcagctgcactttgcggaagcgaagatcttgggcttcgtgatgacgaacgcagcgttggagggaaagaaaaaatactataaaaattacaactatggctacggctacggtgagaaaaataagaccggaaaagagaaataacgcatgctcgatattcattcccatattctgccgaagatggatgacggcagcagcagtgtggaggagagcctgaagcttttgcggacctccgcagagcagggcatcaccgaaatcgctgcaacgccgcatttttacgcttcgcagaacagtccgcagaagtttttggagcggcgggctgcctgtgccgcgcggctgcaggaagctttaacgccggatctgccgcgtgtttatcttggcgcggaggtttgttactttgacggcgtcagccgtattgacgaactggaagcgctatggctgcaaaacacgaacatactgctgcttgaaatgccttttgcaaagtggagccgccgcatggccgatgaagtggccgagattcaaaatcgacgggacacacaggtgttattggcacacattgagcgctacctgccgtttcacaacagtgatgcattgcaggcgttacgggcgcagggcgtgaaaatgcaatgcaacgctttgttctttttaagctggaggacaaagcgaaaagcagtgaagatgctgcagcgcggcgagattgatgtgctgggctccgactgccacaacatgactacaagacctccgagactcggagaagcaatacaagtgattcaaaagtccgttgagcgcgatgtatggcgcgaatttcaacgaaacctgccggatctttcaggaaagggggaacgcctgtgaaacagcgcgcactgatcattttggtcgcgatactgggcgctacctgcattgtgctcggtatttttctgcttcgcggcggaaaacagccggaaacggcagaccccacaccagaagccacggctacggttacaccgacagcaacgccggaagcggtatcttccgcatccacagattccgcagtgccgtatgtgagtccgattgactttgcgtcactccagaaagaaaacccggatatttacgcttggctgtacattccgggtacagagtttgattttccgatcttgcagcgcgcgggggacgatgattactacctgacgcacgacagcgacggaaacgataactccatgggtgcaatcttttccgaaagctcttataacgacggaaaaatggacgaccccgctacggtgctttacggacaccagatgcttgccggcacgatgttcggcaagctgcagcaggtctattccgaatcgaatgcgctgacggagcacggcgatatcaccgtgtatctgccggaaaaggaaatgcactacaaggtgtttgcagctgtgccatatgataaccgccacattttgtacacgtatgatttcacgagcaagcgccgatacaatgcgtttttgaatagcattttcgatgtgcgtgagatcggtgcgcagcacagtacagatgtgtccgttaccccagaggataaattgcttatcctgtccacctgcctccagggcaattcacacagacgatttctcgtcgtcgcaaaatgcgtcgatgaggtcgaataataaatggttctaatcacccatttaggaaaggaagttttaaccatgaagaaaatcgtagtaatcttatcggcaatcctgctggtagttgctcttgctgtgccgtcttttgctgctagctttacccctagcgttgtgcagaagggtgcaccgacagttgtttccgcaacggatgccgacggtaacgcgtttgcagacggcgaagttattgtaactccggtttccgctgcagacagcgctgatgcggctattgcagacggcttgaaggctgcttacgagcagattaaggctgctgcaacgctcaccgacatcgcaccgtccatcggcgattacctgaaggagatcggcagcgaggcttctgttgaggatctcgttgttcgtgacctgttcgacgtttccgtcacgggtgccgcagcagagagtagccctatcaccgttcgcttcaatctgggtctttcccagtctgcaacgctgatcgttctgcacaactatgagggctccaactgggagatcatcccgaaggaccgcgtaaagcagaatgctgacggtacggtcgacgtaacgtttgacagcttctccccggtcgcttttgttgtagacaagcaggaaactgctgacacaacgacgccgagcaccaatgctccgtcttctccgcagaccagtgacaacggcgttctgcgtgtagcaggcgttgctgctctgggcctcggatgtgcagctgtgatcggctctgttgttgcttctaagaagcgtaagggctaatttatgaagctgcgggtaaatatgcgtgtcttaaaaggcatggcaatcgggttatccgtcctcatgcttttgatgacagccgctcttttactccggaatttggatgaaaatcagggacaggatactgcccctgatgtttcctcaaacgcagagggaagcagttcctctgcgcttgaggaagccggagatacgcgggagctgacgtattataacggcgggtggtatgcgcgccgcaatgatcttgagaccgtactgctgatgggtctcgataaatatgcggagacagaagaaagcaactatttaaataatgaacagtctgactttctgatgctgctcgtgattaacaaagagaccggcgcttgcacgccgatccagctgaaccgcgatacgatgacgaagattcagatcttgggcgttcggggcgatgtggccggtacatttaccggtcagcttgcgttggcgcatacatacggttcgggtgagcgggacagctgtctaaacacggcagaggctgtttccaatctgctgtatggcgttgatattgaccactacatctccattacaatggatggtgtggcaattttaaatgatctgatcggtggcgtcgaggtggaagtgatggatgatttttcctccattgactcaacgcttgtacaaggtgagaccgtaacattaatgggtaatcatgcactaacttatgtgcgcacacgtggcgggctagaggatagctctaatctgcgcagaatggagcgccagcgtcagtaccttatagcactgcaaaagaagctaaccgaaaaagccgacagcgatgcgtggttcgctacgaatgcgattctacaggtcagcgattatcttacttccgactgcacagctgaaaagctttctaaaatcgcggacttactcagtaaaagcgatgtttccgagatccgcaccatagacggtgaagccaaggtagggcaggaatacatggaattctatcccgatgaagacgctttgcaggcgcttgtgatgaatgttttttatgaaaaagtgaaaaagtgatatttagaataattgagggatttaatattgaacgaataaaggagaggtttcatgtccaagttcaaacacgatttgcttttgcggctgattaagctttggaatctgaaaaatgaataaaggggaaagaaagtatgtatagaaaagattctacaggatggataaaacatgtggattttatcatcttggacttgatctgcttgcaggtggcgttcgttctggcgtatgcgttaagcggatacggagttaatccatatcagctaattctttacaggaatatggctgtctttatggaagtagcagatttggtagtgctgtttgcaatgggaacattaaaaaacgttttgaaaagagggtactataaagattttgttgtaactgcacagcatggagtaattcttggagcatgtttattgctttatttgtttatgcttcaggaaggacatgcatattccagactggcattgatactgaatatcgttatctatattctacttacttatctggtacgagagctgtggaaacatttgcttagaaaggaaatggaagatggcgaaaatcgttccttgcttcttgttgtttcagcagatgtagtgagtgcagtagtagagagcatgaaagagcataattatgcccggtataagattgctggaattgctgttatagataaggaaatgacaggaaagtatattaacggtgtgaaagtagtggcaaatatggaaaatgctgccgaatatgtctgcaaagaatggattgatgaagttctgattgtgacatccggtgcagttccatatccaaaagaactgattgagcagtttacggaaaccggagtaacagtacatctaaatcttgcaaaggtacaaagcgtgccgggaaaaaagcagcttgtagaaaaagtcggagattatacagtactgactaccagtattaactatgcatctacaagagatttgatgctgaaacgtctggtggatattgccggaggtttggtaggatgcttgattactggaatcttgtttatatttgttgctccagcaatttacatagcatcaccaggaccgattttctttgcacaggaacgtgtaggaaagaatggaaagagatttaaaatgtataagttccgaagcatgtatatggatgcagaagaacgtaaggctgaactgatgaaagataacaaactgggtgatgaaaagatgttcaaattggattttgacccacgagttattggaaataagattcttccagatggaacacataagactggtattggggaatttattagaagaacaagcattgacgaatttccgcagttttttaacgtgttgaaaggcgatatgtcaataattggaaccaggccacctttggtttcagaaacaaatttttatgagctacaccatcgtgcaagacttgcgattaagccaggaataaccggtatgtggcaggtaagcggacgaagtgatattaccgattttgaagaagtcgttcgtcttgataaagagtatatcacaaattggaatattgggctagatataaaaatactttttaaaacagtaatggtagttctgaaaaaagatggctctatgtaaaaagaaaaaaatatgtgctttgatctttgaaaggttggggcacaggaaaatggataagttataagtataaatatcggatagaaattagaatacatgcaaaaacggagggataaaaatgtaaaaaaattatacgattgcagttgctggaactggggctagagatataatacgcggctgtcataatagggggtacggcagagaatgaaaggctccgctacccaaagttcatattttcttacccgaagaatgaacgactgatctttttgggtggcagaaatgctgcacaggaagaaatctcgaccatgagggtggggtgacagccagcggacaggtgcacgagcctatccgctctttgtgttggctgaaatatagatgaagaaattgagtgggattgtgggaaaggtttatgagtaagaaacttgcgattgcgatgttcggacagaagcgattatcgagagaaggcggagtagaaatcgttgtcaaagagctctgcacccgaatggcacagaatggttgtgacgtgacctgctacaacagagcaggccatcatgtgagtggtgcagagtatgacaaaaccattgaatatgatggtatccgtcaaaaggttgttccgaccattgagaagaagggacttgcagcggtaagctcttcctttttcgcagcactttgtagtgcatttggaagatacgatgtggtgcatatccacgccgaaggaccggcgttctttgcatggctgccgaagatgtttgggaaaagagttgttgttaccgtccatggcattgattggcagcgcgagaaatggcaatcaggacttggttctaagtttatccaccaaggcgaaaaaaatgctgcgaaatatgcggacgaggtcattgttctgagcaaaggagtgcaggactattttaaggaaacttatggaagagaaacgcactttatccctaatggcgtgaataggccgcagattcgggaagcaagtctgatcacggatcattttggactggaaaaggattcctacatattattccttggtcgtttggttccggagaagggcattcgatatctggttgaggccttcaagaatgtcaagacggataaaaaactggtcatcgcaggcggctccagcgatacggattcctttatggaggaattgaaagacctggcgaagggtgacgatcggattctctttactgggtttgtgcagggagcaatgctggatgaactatacagcaacgcatacatctacacgctgccgtctgatctggaaggaatgccattaagtctgctggaggcaatgagctacggcaactgctgtttggtttcgaatattccggagtgcgcagaggttgtggaagataaggcattgattttcaaaaagtcagatgtagaggacttgcgagaaaaattgcaagatgcctgtgaccatccagaaatggttatgaaaatgaagaatcaggctgctgactttatctgcgagaaatataactgggatgaagttgtaagggaaacgatgaagttatataggaaatgatgaagaataattttattgataaacatctctgctattgttttatctggacaggaaatacgaaataaagcaaactcacagaaaaggaaattaggatatgcggattttacttgtaaataaatttatatttcccaaaggtggagcggaaacgtatacattcgatgtaggaaaaatgttagaagaacatgggcacgaagttcagtactttggccttgagaatgagaaaaatatagtaggaaatcgagtaggctcatatgtgacgaatatggatttttctcaaggaataagagcaaatttaaatgcgccttttcgtattatttactcaagagaagcacgaaaaaaaattcgtgcggttttagatgactttcagccggatgtagtacatctcaacaatatacagtatcatctgaccccttctattattctggaaactaacaaatggcgtaaagaaacaaaaaaagaatgtaagattgtttacacgacacatgactatcagcttgtttgccccagccatggaatgttcgatgtgaacatgaagccatgtgaacgatgcctggatggtcattatattcactgccttcaaactaaatgtttgaaaaattccagagcaaaaagtctccttggaacgttggatggatatatgtggaaatatagcaaagcatactcatatgtagatgcctatatttgctgtagcttttttcttaaatcaaaactagacacgcagaaaagattccgtgataaaaccatcgggttgcataatttcaaaaaagagatgccgcacttggataacattcaaaaaaagggttatgtattagagtttggccatctttcgcgagacaaaggtacggatactttgcttgaagtagccaaaaagatgcccaatactgaatttgtgtttattggctatggtccgtcggctgataaaatgaaggatattccaaatgtgaagtatctgggatttaagactggagaagaactttatcgcattattgctgaggcagcaatcagtgtctgcccgtctgaatggtatgaaaactgcccgtactctgttatggagtcggtacttttgggtacgcctgttattggatctaaaatgggaggtatccctgaattaattgagcctggtaaaaccggagaactgtttgaagcaggaaatgtggaagaactaatgaaggcgataaagaaagttcttcaaacgcaagatgtattggaaagatatacaaagaattgtagtcaggtgaattatgaaacgacagagagctactatataaaactgatgaaaatttatcgaggagaaaagaatgcggaacaagtttcttcgtaacccacttcatattgtcaaagattatgagctgagaaaactgctttggcaatcggggggtggcacagcggtttgtaaaaaatatctgaagttcagagatattgctcctgaaaagctgacgttcccagaaaaccaagtggatgagcctatttggttattttggaatacagggttggagcaggcacctgagatagtgaagacttgctatcaatctgtaaaaaaatatgccggcagacaagttgttttgcttacagaaaacaatgtgcagaactatataaatatgccggattatctgaatgagaaattaaaaagcggagtccttccattagcgatttatacagatttgatgcgtgtagcattattggagcattatggtgggacatggatggatgcaacaatactgctaacagatgaaactccacaggaaatattaaatagtgatttttttgtgtttcacaattcactcggcgaaattgataatcccgtattgtatccggtctggttcatccacgccaagcaacataatagaacgatttgtgagattcgtaatgttctatttgcctactggaaacgaaataatcatgtaccagaatatctgttttcaaatattgtaattacacaaataatgaggtcatcaccagaggttgagaaaatgatgccttatttgaatagtgactacagcgaatatctggttagagtattaggagataaatttacagaggaaaaatttaattggattaagcggcttaccgggatacataaactaacctataaattagaaccatcaattgataaggaggaaacagtttaccattatctggtgcggaatctatgagccttttgaatagtagtttctgcaagataaagggagacaattaaattattatgctgaatgactactatcaaaatattggcatgaaaggatttattcaaagatatggaattgtgaatgccgtcaaacgaggggcatttatgtttatcaaattgcatcttgtcaaggattatgaggtgcggaaggtattgtggaaggaacatgcttcttccaagataaaaccatatttaaagtataaagacacagatgcttatggacttagctttccccaaaatgatgtagagaatccgatctggatttattggaacaaaggtattgaacaggcaccgatcattgttcagaagtgctatgaatctgtatgtaaacattccaatcaaaaaattatcttgctgaacgatcaaaatcttgcagattacattagattgccagattacattgaaaagaaaaaggatactggacagattccgatagcgagatatgcgaatctaatagagttcgcattactggaacattatggtggaacatggattgattccacggtgtatcttacagatcctattccagatatgattttaaatagcgatttttttgcagtacgaaattcactgctgctgatagataaccctgtgctgtatccggcttggttcctacatgcaaaaaagggaaataaaacaattcgagaaataagaaatgttgctttctcgtattggctcaaaaacgaatatgtaattgagtatctgctgccgaatttgattatcactttagtggtgaagagcaatccggaagttgagcaagcgattccatatatgaacagtgattatagcgagtatcttgttaaagttttagccgatgattattcagaagagaaatggaattggatcaaaaagcttacagggattcataaactgacatataaattgtcgccgagcattgacgcagatggcacattttataaggcactgattgaaaacagtataaaatgaatattacaaattagattggaaaaaagtatgggagcaattgagttaataaaaagcgatttgtttcgctatgccggaacaacatcatctaaggcatttattaaaacatatgttaaagaagctggttttcgcttctccgtggcatttcgattggtaaatgctgggggggggagtgttaaaactgtttggaataatcctatggaaattgagaaatcaccagcagattcagatacttcgaaaaacaaaaattggttatggactatatataggtcatggtgggccagtggttataaatccaactgctgtgataggaaataactgcaatctgtctcagtttgtgacaattggcgcaattgatggtgatgcagcggaaataggagataatgtgtacatagggcctaattgctgtttgattgaacatgttagaattggcgacaatgttacgataggtgcagggagtgtcgttacccatgacattccagataatgcaacagctgctggaaactacgcaaaagtattgaattacaataggcctggaaagtatgtagaaaatagatgggatgaggcatacaattaaaggaagagattatgaataacagatctatcccttgaaaggaaagtagcatgagaaagatattgtttgtaataccttcaatgagaatcggtggtgcagaaaaaagcttagtcaatcttttgaatttgattgatctaaatgagtacgatgtgaatctgttaatgtttaaacctgaaggtgatcttttacagcaaattccatcgggcattcatattttagagacagagccgtcacttttttacgcatataagtgtgataaaaatgtattttctcataaatcgggaattcgctcggaaatgcttcgaatacttagtacgggaatttgtaaaattttgtatggcgattgcgcaagacaaaagaggtggattgatttttataggccactattaccaaagcacatgggcgagtatgacgtcgcaataggatatttggaaggtgatgcgtcctactatgtcattgataaggtgaatgcaaaacggaaaattctttgggtgcatagtaattttgaaaatataaagaagaatgaggatgcagctgcttataaggagtatttttgtaaagcagatagggttgtcagtatttcggataaatgcgtgcaagttttgcaaaataactatcctgatctgaaaaacaaatttgtgtttttgccaaatttgacatctagtattgttttaagtaatactgcaaaggcagatattgatgaagttttttcaaaagatgattttaatatagtgtcagttggacgtttgacagaagcaaaagggtttgatatggctattgatgccctaaaaattttaaaagatcataaggtgccagttcattggtggatcattggggacggcgaacttagaaagtgcctagaaaaacaagcaaaggataatagtgttgaggaatacttgacttttttaggattcaaggctaatccatatccgtatatgaataaagctgacctgattgttcaaacgtctcgttgggagggaaaatccgtcgttcttgacgaagcgaaaattctcgggaaaccgattcttgctacggattacgcaacggttaaagatcaagttgaaaatggtaaggaaggcgttatagtcgagatggatgcagaatcaattgctagggagattgagcatttggtagaagatgagtctgtgctaaacgggatacgaaattatctcatggctcgaaattatgggaatcaaagtgaaattgtgaaatactataaattgtttgatcaatgatacctacgaggagaaaacctaatgacttcatgttccacaaataggtttgtgataagcaaatcgaaaattcaaggatatttagcgatatatttcatgctgataactaatcagtcaaattttagtgagatttatatgactccatatagaacagtcattatggcaggattgctttgcgtgtttttgtttactgcaaaaaaagaaataaaaacatactgtaccttgttttttgcatttttaatcatgtatgccttactaatacgattgagtgtgggtggaatagggatacgcataattgcgcaatttctagttgatatacttgttgtttggctggctgtttcgattaataaacaacatttctgggaaagatatgtaaagactgttgtttttttggcatctattagtttgatgttatggcttttgagcattttgcaaatcaatatatgggatcaaataacaccagaaattaatagtttgatgtcatatagagtatattcggattcaatcagatatcaggagtattcatttaagttgcatgggatgtttctgtattcacatagaactgttgatatgagaaatgtgtcgatatttacagaacctggaatttatcagatggtattgaatactgcgatttttgtgcttctgtttttacgggataaattagtgtcatttagtgataaagaagttggacgtgcattggtagttttagcgtttgcgttactttcaactcaatctacaactggatatatatcaatttgttttattatattgttctacttgctatttgaaaagagagataccacagaacaaaactggaaacagaaaattcttattgcgctgttttctatactactcttcttgatgattgattatatggtgcgtggtagcgagagttttattcaggtttcagttttctcgaaactcttttcaagcaaaaacaaggtttctcttgatgcatccggtatggcgcgtgccgatttgatttttctggcactccaaagtatggtgagacacccgtttggcgtaggatattcaaaccttggcgcacttatgaatgtagaaaatacaggaatggcaggggcggccattatgcagtttggtgctgcatgggggcttttaccgcttatcgttgtcgcttggtggatcttttacccggtgctgaaattttgccgaaaaagatatgtggcagttttgtacatctttatgtatatcaatactgttttggctcaatcggatcttttttatccggtgttaattatgatacctattggattatatagtttgcattgttttgatacaacatacttcgcaattagtaatgatggaaaggagcatgcgaaaatatgaagttactatggatgtgtaatgttccgacaaagagaatagagttgatgcagaatacgcaacaaagtacctgtgttggcggatggctggaggggctttcggagtctttactggctgataaagatatcgaattatgctactgctatcccgagtataagagtcaaaagctgggacacggcaaaaaggataattttaaatactatgcaatacccataagctattatcaggcgactgtggcaatgcaagaacaatgtgagtgtggcaaaatatatagaaaaatactgacagatgaaaaacctgatgttatacattttttcggtactgaatttttgtatactagctattttataaagattgcatcggaggaaggatacaaagataggatagttacttcaattcaaggactggtgtccgtatactacgatcattattctgcggggctaccagattacattatgcgacggaagacattaagcgaaataaaagggaagtgctccttaatcgataataagaagaattacttacatagaggtaaatatgaacaagatgccttggtagcttcttctaatataatagggcgcacaacatgggataaagcatgtgcacattttattgcaccggagtcacgatattatttttgcaatgagaacttgagatctgtattttatgatggctctcagtgggaatatgaaaaatgcaataagtatcagatagcaatcagtcaggcagggtatcccataaagggattacataaggtgattgaagcagttgcattgctgtgcaacgagttccccgatatcaaagttaaagtgggaggggcaaatatatttggaggaaactggataaaaggaaatagctatggtatatatattaggcaactattaaagaaatataatcttcaagaccaatttgaatttgaaggttttttatcagcagaaaagatgaagcgacttcttttagaaagcaatgtttttgtatgtccatcttctattgaaaattcacccaactcgctgggagaagcaatgctactgggggtgccttgtgtggcatcagatgttggaggaattgcagacatgctgacacacaacgatgaaggattcctatatccgtttgatgattcctataaaatggctttttatataagaaagactttcctagaaatagaggatacaaaaagaagagctgaatgtgggaggaagcatgctgttattacacatgaccgcaagaaaaatgcagaaacattaatcgagatatatcataagatttgtatgaatggaagcatttgttaaaacaatcaagactgaggaaaattaggatgttggatataagcgaaaaaaacgtgcgaaaaaacatgatacttagcacagtttacagagcgttgtcgatggttattagctatttatacgttccggtagttctggcctacttaggcgaagtaaaatatggtgtatggacaacaatattaaatgttttgtcctggattacatatttcgatattggaatcggtcatggattgagaaataagttggccgaaaatctagatcgggaaggaaacgaaattaagtgtagaaaatatgtctccagcgcatattttgcttttggattaatcgtcctctgcgcaatgtgtggatttagtgtggcggcaatctttgctaactggaatagtattttcggcgtttcaaaagacaatgtaagtgacaacttaacatgtgtgatgtgcattagtgtgatttttatgtgcatcaattttttgctgtcactctgtaagagcatttattatgctctgcaaaaaaatagcactgtaggacttatgggcgttttacagcaatcgcttatgttgatgggagtgctatatttatcagtaacaagcgaagcaagtctgctcaaggttgcgatattctacggcctatctgattttattgttgaaatattattcacactgattttaacacgtaagagcgaagtttttgtgccgagccttaaatttgtctcgaaagaagaaacaaaatccacaacaaatcttggaatgctttttttcatttctcaaatatcggcacttattttgttcacgacggataatctaattatttctcatttcattgggtcggcagaagtgacatcctatagtctggtaaataaactgtacacggcagggacggctgtctttgcgatgctagtcacgccatattggtcgagaacatccgttgcaaagtctcataatgattatcgattgataaaaaaaggaattcatgagatgcaatgtttgttaggattgggtattgtgggtgtattagtgcttatggctatatttaaacctcttgctagaatgtggcttcaaaaagagcttgactatgcaccaggattgattccgctgatggctgtgtatgctattatatatatgtggaatgcagtatattcacaggttgctaatggattatctttaatgcgggttattgttccagcaggaatcgttcaaggaattgtaaatattccgctctcgctttttttcctgttgaaaatgaatatgggcgttgtaggtgtgctgctgggcacagtattatcttttatggtttctgctattgctgtcccgattgcggtaaataaagaaattcgtatccatatgagagataaaagttgattagaaaggaggaaaaatggtatgaagaaaatattgtatgttggtcagatagcgattgagggaagtgcgtcatgcacacatgttcgaaaccgagctagatttttcaacaatattggttatgaagtctatggtcttagtgagtgtccaaagaatgaatgcgacaaagtagaagatactgattttctcaaatacgtctatatgaaaccgcttcatggaaaaggtaaggttagaggcgcaggttggatagcagaccaattcttgggcattcatacgtataatgagattattagagcattgaaattcatttcaccagatattataattctgtatgaattgaattcaattgttgtggaagaacgtattagagcttattgtgaaaagcacaatatcaggctaattatagaagtaaccgaatggatggaggttgagaacagaaaagaaatcgcaacaagaggaatcgtatggcaaaaagatattcaaaaacgttatatcgataaaagatgtgggaatattatagccattagcgagttcttatacgaacactatagaaatcagggatgtaatgtaatacggctgccaccattggtttacgattttgcggacaaagatcaggtctttcgtgatagagatgttgtgaaattgcaccaggttaggctcgtgtttgcaggaacaaccgattttaaagactatctggaaccgatattaaaggcaatacgaaagatgaacgatgccgaaattaagataatttttgacgtggtaggaccaagtcctgatgcaattgagagtatgttggaatgttccagcccaacacaatatggaataaattgctatggccgtttatctcatgagaatacgttatcgattgtaagaaaagcagatttctctgttttgatgcgtgaaaataaaaggtatgcgaaagctggagtatccacaaaatttgttgaagcaatgagcttggcagttccaagcatttgtacagctgttggtggaacagatgcttttgtaactgatggcgttgatggggttcttataaaagataatagcgtacatgaagtgttagacaagttgatgcagattgtcaatatggattcttcgaagattcttcaaatgaagttgaacgcattaaatacagcaaaacaagtgttttcggaaggacagtattataatgttgcgaagtgctttctggaaggagaagaatttgatggacagaacaaaggagaagccaagctataagttgataagcacatataaaacagaattgatgggagtagcggcaattagcgtacttattggtcatgcgggcactgcaattatggcagacacaggtgctattttattggtgcctaaaatggctacattaatttgcacgctaatgtatatgtttttctttctttctggatttggatgtttttattcgttgaacaaatctaatgacatacataaattttataataatcgtattaaaaaagtgctgttgccatatttggtgattagttccatagcatatgcgattaagtattttatccttgaatttagtttccgtaaatttattgaggcagagtttttcatttctttttggatgaaaaatgaaggagcgtggtatattgcggttgtggcagtgttatatgtggtttatccagtgctttacaatatccaaaaatccacaaaaggtaaaaaaactatagtagtagcattattgattattctctgttcgactgttatgatgggctatataaatgaaccttggaagtacaatgtgaactattcttatgttggacattttggtggccctcttatgggaaccttttgctttattgttggaagctggattgctgaagaatctcttgataaaaatgaatactcctatttattggtagcggttatggttttgatttggcctttgtcaaaaatgattccaaccataagatatagctcgtcaatatctttaatagcaagtgtgtttttgagaatgtcaggagtttttattttgccattcggatttcagaggatgccacagagggttaaagaaaaaagtttgacatttttaaggaaaataggaggggcgacactagagctttatctaacaaatatatatgttaacgatttgctaggtcaattgaatgttagatttcctaatgatccgtatcgaataaaatatagcatctgcttcacaggcttaggcgtattattagcgattatactgattgaagggaaaaagcgtattaagcgtttatacgctaaataagaactctttgaaatttgtttatgaggtgtaaagattatgaataacaaaacttttgataacgcaacccttatgatcactggtggtactggttcttttggttctaccgttctgaagcacttcttggattccgacctgaaggaaatccgcatcttctctcgtgacgaaaagaagcaggatgatatgcgtcacgagcttcaggccaagcacccggagaacgccaagaaggtgaagttctacatcggtgatgtccgcaatccccagtccatcaaggatgccatgcccggtgttgattacatcttccatgctgctgctctgaagcaggttccttcctgcgagttcttccccatgcaggccgtccagaccaacatcatcggtactgataatgtgttgcacgccgctattgacgctggcgtcaagcgtgttgtctgcctgtccaccgacaaggctgcttaccccatcaacgctatgggtatctccaaggccatgatggagcacgtcatctacgccaacgcccgtgtggccgctgagcgtggcggcaccaccatctgctgcacccgttacggcaatgtcatgtgcagccgtggttctgtcattccgctgttcatcgaccagatcaaggctggcaatcccatcaccatcaccgaccccaacatgacccgctttctgatgaacctggacgaggctgtggatctggtcttgttcgctttccaacatgcaaatcctggtgatttgttcatccagaagtctgatgcttccaccatcggcgatttggcaaaggcagtccagcagttgtttggtgataccggtacgaacatcatcggcactcgtcacggcgagaagctgttcgagaccctgatgacccgtgaggagcgtctgcgcagccaggatatgggtcattacttccgtgttgccgctgacaaccgtgacctgaactatgacaagtttgtggtcaagggcgaggtacataccatggcgaacgagtcctacaccagccacaacaccgagcgacttgatgtagaaggcactgtcaagaagattctgaccactgaatatgtccagaatgagctgaaaggcattcccaatgtctaaggaaaagctgttgatggttggtgctggtggctttggctgcatggtggctgaacaagcgatgatagaatatgactgtgcctttgtagacgatgggcaacctgtgggcactgacatctgtggcattccggtggttggcagtcttgctgatttgccggagctgcggaaggagtacggcttgctggtggtgggtatcggcaacaatcggttccgggcacaggtgtatgagaaggcgaaagcccttggctatgcgttccctaacatcgttgtacccagtgcctacatcagtccatacgccaagttgggatgtggttgtgtggtgctgcaaaacgcttgtgtccagaatggtgcgtccgttggcaacggggttctactgaatgccggaacggaagtccactgtgatgcaacggtagggaactacgccctgatttacaccaacagcgtcattcgcactggtgcgactgtgggcaactttgcccgtatcggcagcaactgcaccatctgcaatcatgcaactgtgccggacggcgcagatattccggactgtaccgcagtacattaaagagaggtgaaaggatgaacattctagtcacaggtgccaagggcatggtgggaaccgccctatgcaacaacctaaaaaacatccgggatgggaaaaacaagacccgcccggcattgcatattgaagaaattttcgagtatgatctggattccaccccggcggaactggacgagcattgcagtaaagcagacttcgtgttcaatctggcaggcgtgaatcgtccggaaaacccggaagatttcatgaagggcaacttcggctttgcatccgaattgctgaactgcctgaaaaagtacaataacaaggcaaccatcatgctgtcttcatccattcaggcgacgctggctggtcgtttcggcaacagcgagtacggcaggagcaagaaggcgggcgaggagctgttcttccaatatgctcaggagaccggagcaaaggttgccgtctaccgtttcgtgaacctgatgggacatagccgccccaagtacaacagcgccgtcagcactttctgctgggcggttgccaatgacgagtccttcaccgttaatgaccgcagtaccgagctggagctgttgtacatcgacgaccttgtagaagggatgttcgacctgctggaaggcaaggagcagcactgtgaatttgacggtgtggagactgttctgaaagcagacggtcgctactgctgcgttccagtgacccacaaggtcacgctgggagaaatcgtggatcttctgcaggagttcaaggcacagcccacgaccctcatgatgcccaagatgccggacggctcctttgccaagaagctctactccctgtacctgacctatctgcccactgacaagttcaagtacgctttgaagatgaacgtggacaaccgtggctctttcacggaactggtgcacaccgctgattgcggtcaggtgtctatcaacatcagtaagcctggtatcaccaaggggcagcactggcacaactccaagtgggagcttttcattgtggtcgctggtcatggcttgattcaggaacggaacattaacaccggggaaacggtagagtttgaagtttccggggacaagattgaggctgtccacatgattcccggctggacgcacaatattatcaacctgtctgagacggagaatctggtgacggtaatgacctgcaacgagatttttaaccccaatcacccggataccttctttgagcaggtgtaaaggagaaaaacaatggctgattatagcaatgtatcatttaagaataacggcaagctgaagctgctgattatcgtgggcactcgcccggagattattcgcctggcggctgtcatcaacaaaactcgcaagtatttcgatgtgatactggcgcataccggtcagaactacgactacaatctgaacggcgtgttctttcatgatttgcagctggctgacccggaagtatatatgaacgccgtgggtgcggatttgggcgagacaatgggcaacattatttctgagagctataagctgatggttgccatccagccagatgctgtgctggttctgggcgataccaacagctgcctgagcgttatcggtgcaaagcggttgcacatccccatctttcatatggaagcgggcaaccgctgcaaggacgagtgtctgccggaagaaaccaatcgccgtatcgtggacatcatctccgatgtgaatatggcgtactccgagcatgctcgccgctatctggcagacaccggtttgcccaaagagcgcacctatgttactggttctcccatggcagaggtgctacaccagaaccttagtaagattgaagcttccgatattcacacccgtctgggactggagaagggaaagtacatccttctgtctgctcaccgagaggaaaacatcgacacagagaagaatttcacttctctgttcaccgctatcaacaagatggcagaaaagtacgatatgcccatcctgtactcttgccatccccgtagtcgcaagcgtttggagcagagtggcttcgtgcttgacaagcgtgtgattcagcatgagccgctgggcttccatgactacaattgtttgcagatgaacgccttttgcgtggtgtccgactccggtacattaccggaggaaagcagctttttcactagcgtaggacattccttcccggcggtgtgcatccgcacctctaccgagcgacccgaagcactggataagggcgactttatccttgcaggtattgatggtgaccatctgttgcaggcggttgacgtggctgtggagatgaacaagaataatgacttgggtattccagtgccggactatatggatgagaatgtgtctgataaggtcgtcaaaatcatccagagttatacgggtgtagttgataaattggtttggcgaaaacattaatgttacttgacaattagaggaaacaggatatgcttttgagagcagagcagagcagagcagagcagagcagagcagagcagagcagagc

SEQ ID NO: 300 - DNA, 40929 bp, unidentified
  source 1..40929: mol_type = unassigned DNA
aatggatattgtatatatttttttatttgtagagttctccaaaaaaccgctacaactcccaaaatcaaaactaatactgaagtgacttttaataaaggtgtatcaaataataaactatttcctgcacaaattatatgaaaaatatataagtatttaaaccacgttattatattttccattacagtatcacatctcttcattaatcaatttctccttcgcatctttatgcataaatacattttaaaaattaaagatttcttttattgcattgttttgttgaacaacatcaaaacaatatttacattctgacaaattaagcgaatctctgtcataataaatattactcaatattgcatctgcccacttatcagccgattcagatattgataaaaacttgcacctttcactcaatgcagtttctttagaaatcctatcactaattataacctttagtccggatacctgtgcttcaattgctacaataggaagtccctcgaacctagaaggcagaataaaaatatccatagcctgcattaattcatttacatcttttcttgatcccatcaatcgtacagcattctctagctttctttctttaacccttttatttatttcatcaaaatcactacctgtacctatcatcagtaccatggttttgggattcttcctatgcagtgcctctgctatatcaactacgaattctgaatttttctgataggaaaatgctccaacctgtccaattataatacgattttcaagatctaactcaacacgttttttttgtctaatttcttcgctgaatttaaatcgttcaaccctaaccgcattattcataatatggaacttctgactcgaaagtacattctttggaaacatccattctcctgcaacatatgaacatgtatagaagtcggttgcacatcttcccactatcaaatgcttcattattgtgtgacaaaatgttttaatatatcttaccgtctttgaatgtgaattcacccctgagctatgactgtgtacaacaatcttcttaacatcacatctatgtgcagcaagcagaccaagactattaaaagcttctgatatattaaagtatgctatatcatactttccttttcgaataatggctttcatggcacaataatggctataagggtgcttcaaagttggtatttccaaaagtccaacgcctaatttatctaatctgcttttcaattcattatctatatgattagttagacaatctattttaacattatcatttttaatctgatcaatgatatttaggatataattatctatcccactatttttcccatctataagatatccaattaaaatttttttcattttctatttcctgctatctattttcctgccaacttccagcacagtttatatactggatatccaaaactaagtgctataacagcaagcttatctctctttggtgccttactgttttttatcacacaatctttattctttctaatatatgatatcaattcttttttttcattcttataaccatttacattttgaaattggttaagtgtactaaatctggcataaagttgtcgcctccgtatcgcagtcttaagctgtggatattcttttaacacatcctttgccataatatcagtcatttcaagaagttctaattttttcatattaaatttctgataaacaattgacgagcttcttagcatataaaaatactgacttttatatccacatgcaattgtgccacactccataaaaaacttatatgttgtagctatatcctcgaacaactttcctaccggataaggaaattttcttaccatttcagtctcatacagttttgcccatgctgatgtattaatcacatcatcataaagcatcctttcaaggcatatctcagtggtcagcacctcatctttgccatttccatatataatattattacccttttcaaatacaaccgtatgtgtacaaagtgacattctcgtatggtatttctctattaaagaatacagatactctacatatgtatctgtaacataatcatctgaatcaataaatgtaatatattcaccatttgctatctctgcccccttatttctggcatcggacaagccaccgttttgtttatgaactactacaattcgattatccttttctgcatatttatcacaaatatctccacagtcatcaggagaaccatcatctacaagaattatctccaaattgtcataagtctgactacaaacagactctatacatcttggcaaaaattgtgcaacattatatattggcaaaataacacttattaaaggtttcatctgtgtatacctatctttctctcaagaaatttagttccctttactaaccagttctgtttttccataaattcaaccggtatattaatatacgtcaacttatttgttttaatccatatatcaagaagtctttcacttacaaacccgaaaactctggcatcataagcactataatcggatatatcaagtcttttttctaattcaaacaaaatatcaaacatccactcacaatagctgtcaaaaagttctgatttcatgataaacatattaaaccggtgaccaatggtacttttcatagtctcatcaaatgcctttacataatcaggatacttttcatccaaaatttgtcttgtaacatccaaatcctgtgcatgatgagcgtgtacatactgactataatttgtctcaataaaataatttctcggatttggcaaaataatatctgtctttttaagtaattcttccaattgttgacgattaataactttctcttccttggttcccttagagcccttaaccataaaatgacgcctataatgagataatcctttataatctgctttcaaattcttccatgcccaatataatcccgttaattcacagtaattggtatttttatctgaaatattatctcctgtatcatcaccctgataacctaaatctgtttttccttttttcccaacatgaaccggtaagtatatatcatctgatggcatccaatattttttatgtgtagccacaattatttttatatccattcttactgtgctccttctttctttataactgaaataactgtcttaaataaaatttttatatcaagccaaagactattatgttctacataatacatctccattttttgacgttcaccactttcgtatgtggcattatttctggcataagcctgccaatatcccgtcaacccgggctttacactaagaagtttttccacatcatccccatatatctgtgtttccttttccactataggtctaggtccaactatagaaatatcaccttttaaaatattaaataactgcggcaattcatccagactaagctttctgaggatattaccaatctttgttattctaggatcattatctattttaaattctgttctatactgctctagctgctctggtgtaagaagtttttcaagatttttaacattcatcttcatgcttctaaacttataaaccttaatcttctttccatgatatccaacacggatatgtccatagaaaatgttccctccatcttctcttttgaccaaaaatgataaaagcaaaaatattggtgaaagcagaataattcccaccaatgaaccagctatatctgtcaatctttttataaaatgatatatatgtttctttttctgcctgtaatcaatatttgaaatatgagcatactccaacggtctttcctgttctattatttcaagtattgcttctctttcctgagcgagtgccccttcatttactatttcaaaactttttgaccagcatttaacaatataccatataaataagcaaattactattgttgcaattatccaataattcataattacctcgctttatttagtaaaaaataattttaaagatttgacaataattcctaaatccataaaaagtgaccaattatccacataattttcatcagattgctcctttgtaaaatgttttctctgaacctgccataatcctatcattcctggtttcatgctcattacatttctatttttgtgcgaatactccaaaaactccggcaaagttggggcattaacacctacaacagacatattatcccaaaggatgttccacgcattaggcaaattttccatacccaatgctttaataaatctgcccataattgtatattgtggtataccattcccagcaccggcttcaatgcctttttttctcaaggttctgaatctcagcatatagaatcttcgaccatttttgcccactcgaagtgtctgaacaataacactaccgggatctccttctataaataaacctattgccataataaaatacattggaataaaaatcatcattcccacaatagcacaaactatgtcaaatattctcttaatcgcaacatacctgattctataatgtcttgacgaaaatgttgccacagcaaaattcccaagaaattccaattctctattaccatgagcataactatactcttttaatctgacacgcacattttttcccatagagcgtatctgactaatcaatcccttataatcaagaggcacttcatcatctacatgaaaaaataccgtatcaatttcagatgtagaagcaatctgtatcagattatcacagtttgctactacctcaagaccttctaattcttcaccaacaacatttttgtctacaatagctaaattcgaaattctaaaataccagttacgagtttgtttaatcttattcataacatcagaaacttgatcataagttgtaacaagcataattttttcgttagatcccgaacgatgatacgatttcaaaatgaatcgtttcaaaatctgtcttgttataataacacatactatacttccgccaaaatatatagccatctgaactcgtgaataataccagcttgtctgtgtaataaaaaaatatccaacagtaagagcaattatatatatctccattttcaccacatcaaacacttcctgtatccagttgcgatatattattgattcacgtgaaggtatgaaaaaatagactattatataaaatatcaaagatgttgtaaacactcctaaataataatcttgcggattatttagtcctgttctaaaattaccgaactttatataatttgcaaccagataaactgcaaacattgttaatatgtctgtaataattgcaatatatctcactaacgtttgtttagaatcatgcattcttttttctccttctttatactcaaatcggcaaacacacataaaataaacggattatacgctatatctaataaatggtgttccataaatgaatgtaatgaaataaatgcaatggcaaaaaccatggtcatacgaccggcataagcagctcttcgtgacacaataattaatattgccattacaaccacaaatactataataccatattccaatagtattcgtatataggaatcatcaagaaaaaaataatccggtctttcaactacactttttccccatcctttttcctcaatatattttccaaatagattaaacccatttattccgaatcccttttttgaattctcaagcctgtcgctcagcttttcatttatccataaccattttgcattattattatcatatgcaactgtcataaatatatatattgacgcaaacagaattggtacagcactaagcaattttataaatatattatcttttattttttctttttttgttttgcatataatatatcctaatataaacacagaaaaaacaaccatgcagataaggctggttgatgcaattgtccatttatatacccaaaaagcaattatcattatcataaaaggttctacaatattaactttcctattatataaacatattgcgaccaacactatataaaaaatatgtgcagcaaaatctgttggatacacagagcctaacgcaaacctcatctgttcgtttttccagtattgcagattctcaatcatacctaattgactacatacaaatgcaatcaacataataatgctgtctataagcaaatatactttcaaaatcttatcaatagatacatccttcgctccaactattaagaatgctagcataaacaaaaatgaatacatatcatttttaaaagcacatattaaaaatgacgttccaataatcaaagcaaaaaccgtctctgtttttgtgtaagtgaacttctttattccctttactatgacatataccataataagaaaatacgtaaacaatccaaaccgtgatggccaaaaatcgggtaacattgttgttccccacattgtaaatattaatattattgcaaatataactaaatacgatacttcccaccaatcaagttgtattttccttgaatccttaaagatagaattaaacattatataaatatactccagagttctcaaaatatctgtgaaattataaacgcattatctgcttttttcaagatgttacaattttattaagataaaattaatatttagtttgttttacattctattattattttaccatatcattattttatttgctattgattattgcatattgacttcagccactattgtcaaattccatgcatttgacagtttttcttttgcaaaaataaatatattagtaaaagtcatgtaaattcgggcattatgttacactttcccaaaatatgaaaataaaacaagctatgaatagtataaaccatccatagcttattgcaagttctatttattctagaacttaaatgtattctccagtgtctcccacttctgatccttatcacttaaattgattggtgtgccatcctcaagtgtgtatccgcttccgtcggcgcttcccggatactctccgacaagctgtggccactcgatgccgattgccggatcattccatgcaagtccgctctcgtctccaaggtgccagaaatctgttaccttgtagcagaactctgctacatctgagagtactaaaaatccgtgtgcaaaaccctctgggataaggaactgcttcttgttctcttctgtaagctctactccaaaccacttgccatatgtctttgaatcgcttcttaagtctacagccacatcaaatactgagccttttactgcacgcacaagctttgcctgtgggtattccttctggaaatggagtccgcggagcactccctttgttgaacaagactgattatcctgtacgaataccctgtcaatgcctgcctcctgcatgtcatttgaattgtatgtctccataaagtatccacggttgtctccgtgtactgtaggctcgatgatgcaaagtccttcgattccacctacgtttttctgtactttaatctgtcccatgatttctatgtcctttctaaaagttaatctcctgcaaatatctgtgcagcgcatcctgccatgtagggagcggcttaaatccattctccacaagcttgttcttgtccagtctgctgttaaacggacgtgctgcctttgacacaccatactctgctgtggtaacaggtgcgactgtaagtctgtcctcagaatactctgtatgaccaagctccactgcctgcttaaagatttcttttgtgaaatcataccagctgatatatccgccctcgttcgtagcgtgatagtaaccgtatttatcggtctctatcatatctacgagcagtctcgaaaggtcgagtgtgtatgtcggtgtaccaatctgatcacttactactgtgagcttgtcatgtgtcttgccaacattcagcattgtcttgatgaagttcttgccatttacgccaaatacccacgctatacgcacgataaagtacttctcaagggtatttgccactgcaagctctccgtcgagctttgtctgcccatatacgttgagcggtgcatagtccttgcagtcaggctgccatggtgtggtgccctgtccgtcaaatacatagtctgtgctgatatataccattttggcatctatcttcttgcaggcatccgcgatattctgtgtgccgtctgcgttgattgcatgcacctttgcttttttatcatcatcctcggccagatctactgctgtccatgctgcacaatgtactaccacgtcaggcttaagctctgtgattgttttttccactgcatcacggtctgtgatgtcgagtgagacatatggcatctttgtaactgctgtgccatcatctgctccgctgtactgtggtgctatatctgttccgattccttcgtaaccgcgtgctgcaaggtcgttcattacgtcgtgtccgagctgacctgcaactcctgtaacaaatactttcattttgggtctcctttttacaaatattcgtaaacaggcccaacatatatgcgcaatcccgcatgctttaggcatgctttcccgctgcttacgcagctaagattgcttatatacgttgttcctgctctattctagagcctcaaagaatcaaaatgcgcttatgtaagcgagcttacaacacgcatttcgattcttcaaggtttacgaatagcagttatctattcgcgtacatcttctcgtaatatttctggtactctccgctgatgattgtctcccaccactcacggttgtcaaggtaccatttgattgtcttcttgattccgtcctcgaacttggtctccgggagccatccgagctcgttgtgaatctttgtagggtcgattgcgtaacgcatatcatggcccttacggtctcctacgaatgtgataaggctctccggcttattgagctccttgcagataatctttacgatttcaaggtttgtcttctcattgtgtccacctacgttgtaaacctctcctacacgtccgttgtggatgataaggtcgattgccttgcagtgatcctctacatagagccagtcacgcacgttctcgcctgttccgtataccgggagtggcttatcattaagtgcatttgcaatcataagtgggataagcttctccgggaaatggtatggtccgtagttgtttgagcaacggctgattgttacaggaagtccataagtgcggtggtaagcaagcacgagtaagtctgctgctgcctttgatgatgaatatgggcttgatgtatggattggtgtatcatcatggaagaaaaggtcagggcggtcaagtggcaggtctccgtatacctcatctgttgatacctgatgatatcttttaataccatacttgcggcatgcgtccataagtactgatgttccgatgatatttgtatcaagaaatacctgtgggttttcgattgaacggtcaacgtgtgactctgctgcgaagtttacaactatatcaggatgctcttcctcaaataatttgtatacggcgtcacggtctgtgatgctctcctttacaaaacggaagtttggattgtccattacaggctcaagtgttgagagatttcctgcatatgtgagacagtctaagcatacgatacgataatccggatatttgttaagcatgtgaaatacgaagttgcttccgataaatcctgctccacctgttacgataattgtcattttaatttcctccttaatataactgctcgcggtattttccatcaagtacatcctttaagtactgtccgtactggttcttctttacgagctcatatgtctttaatacttcatcctttgtaatccagccgtttaagtaagcgatttcctcaagacatgctatcttgcggtgctgatgtgtctcgactgtcttgacaaagtttgtggcatctacaagactctcatgtgttcctgtgtcaagccatgtgaagccctgtcctaaaagctctacattgagtgcctttttctcgagatagattctgttaaggtctgttatctcaagctctcctcttgctgatggcttaaggttctttgcgtactctactacattgttgtcgtagaaataaagacctgtgacacagtaattgctctttggatgctccggcttttcctcgattgaaatagcctttccctctttatcaaactctacgataccgaatctctctgggtcatctacatagtagccgaatactgtggcgcccttaccgccctctgcgttttcaactgctgctcttagtctcttgttgagtccgtgtcctgcgaagatgttgtctccgagaaccatggctactgtatcatcaccgatgaatttctcaccgataacgaatgcctgcgcaagtccatcagggcttggctgtacctcgtaggtgaggttgacaccaaactgatgtccgtctcctaagagctccttaaatcttggtgtatcctgtggtgttgaaatgatcaagatatctctgatgccggcattcataagcactgacataggatagtagatcattggcttgtcataaattggaagtaactgctttgatgttaccattgtgagtgggtaaagacgtgtgcctgaacctcccgctaatataatacctttcatgttgttctccttcaaactgaaactacgtgctgcatttgatgctttcggtctgtagaatacactgacctgattcatcatttacctgcattataaaaggtgccccaagggcaccttcaagtattattttaaattttatgtattttgtccaaaacaattatttctttgcaataaaaacaccggcatctttggttatttttaagcctttatcagtcttttcctttacaaatgcaacaaattccttatatctgtccacaatgaaacgattctgatttccatggcaggaaagcacatactccacaaccggttcataatccgtcacataaagcgaatcatcatactgcagccagctgacatctgaaaaatacttttgcagctgctttttcccattttcttttccaaaatgatcatacagtctgtcagcagaaagctcaatcctgtcatcaaactctttcaccaacgagcttatctccttcatatgctctgaaccatatgtactgcatataaagatgccctccggcctgagcacacgatgtacctcactacacaccatatccagattatcacagtaaaacagcacatgattggctataatacggtcaaagctgtcatccagcttatatatttgatgagcatccattacctcatatctgaactggctgccattatccgatagatttctgacggcatctcttatcatgccatatgatatatccgtcagcaatatatccatatttgccggtatgcgctcaacattccgcgaccatagagatgcatctccgcaccccagttccagcacactatagcccgattcaaatgcacattgattaaaaatccactcaaaccagcttacagggtttagagaataatccctgtgaagattaatacgcgcagagatatttgacgcatccttgtattgtttcttaagcttctgctccatctcattcatattgaccaggtcaagcatatggctccaatcagcgtccgctccacgctctatgatatcagaagcatccttaagagctgacttcatcagctccagctgctccatacgctcctcaataagccccatctgcatatgaaaggagtcaagtattgtcttgctgtcgacctcacgcagagtcatttcctttatatcatccagcgaaaaaccaagatacttaaaaaactgaatctgttgcagctttgcaaaatcattatcattatagaacctggctcccttatcagtgacataggacggtttgaaaatattatgctcatcataatatcgcagtgtcttctttgtaatatgagccttgtgggcaaattctcctgaggagtagtagccgggtagtttcatcgttgcgttgcctttcctcttattttcttacttttatatctaagtatatcataattttctaatacaggatttattaatatttacttattttcactgtttatgcttgtttttccggaaaatgtacttataattatattatcactatgtaacaaggagaatacaatgaaatacgattatttagtagtaggttccggtctctacggagccatcttcgcccatgaggcaaaggccaagggcaaatcagtgcttgttgtggacaagcgtcctaacatagcaggaaatgtctacaccgaaaagcaggagggcatcaatgtacacatgtacggagcccacatattccacaccaatgataagagggtctggaactacatcacacagtttgctgagttcaaccgcttcacaaacagccctgtagccaactacaagggagagctttactctatgccatttaacatgtacaccttcaacaagatgtggggtgtggtgacaccggaggaggctgctgcaaagattgaggagcagaaaaaggaaatcaccggtgagccaaaaaatctcgaggagcaggctatttcacttgttggccgtgatatctatgagaagctcgtgaagggctatactgagaagcagtggggtcgtgactgtaaggaacttccggctttcatcataaagcgtcttcctgttagacttacctttgacaacaattacttcaacgctctttatcagggtattccaatcggtggctacaccaagatggttgaaaatctgctcgacggcattgaggtcagattgaataccgactaccttgagcacaaggctgagcttgatgctcttgctgacaaggtggtatacacaggtccgattgacgcatactttggctttaagctaggtactttggaataccgctcagtgcgctttgagaatgaaaccctcgatattcctaacttccagggcaatgccgctgtcaactatactgaccgtgagactccatggacacgtatcatcgagcacaagtggttcgagttcggtaaggatgaggatggaaatgatctgccaaagactattatcagccgtgagtactcttctgagtggaaggccggcgatgagccttactaccctgtaaacgatgagaaaaacggacagctctatgccaagtataaggagcttgccgataaggagaccggtgttatattcggtggtcgtctcggcgagtacaagtactatgatatggatactaccattgcttctgtacttgatatgtgtgagaaggagcttggctaataatcaggctctccacaaaatgctttgtttatgtcacacaaaaccgcccatagcaattttgccacgggcggttttatttacattatttttttccggccagatttatctcagccgcaggaatatgctccctaagacactcatatccatactccttcgaatacgcatatatagccggaagctgtcttgacagaaagagcgccggtgcttctgtcaccgagtatgcaccacagtgcccgaactcaagaacatcgccaagcttaagcttcttaagcctcacctcgcgtactagcacatctgccactgtacagaggcttccgcatagtgtatagtctgtgcccggcaattgtgttaattccacaccggcagctctatatatactaatcggtggcacctgcatagccatcctctgcccgaagtaattcagatggtggattcctccatccagaatcgcataattggcatcgcctgtcgatttaagatcctttacctgtgtgtaatatttaccgcatgaggctgctaggaagcgtcccatctcaatgccaagcggatattcctcggcaaattctctaagcacctctgctgcctcatcaagtgattgtttttccttttcctgccagtcttcctcaaaatactccacgcaaagccccggaccatactctacaagctgtggctcaaagccatatttgtcctttaacatggtaagtgcagactttattttttccaagtccttatttattttgcgaagactcttctgtgtgccggaatagtagtgaatgcctattaccgtgatgcccttaaactcatccggattcgatatgatgtattcaatatcctcaagcgacatgccaaactggttgccacttgtcaggcgcagtatgacatgtgctttcgtttcggcaaactcggcttcctgcgcgccttcagacatacattcaagcatcacctctgatataagcgtcgcatgtcttatgctttcacaggtcagtatgccggcgccatacgaaacggctcgctctatatcgcatttttccttcatcacgcctgaatagatgatgctctccggcttcacgccaagtgctatacatatctcaagctctcccgggctgcacacctccacatggtctaagcccgccggcagcctgtgaagcagaaacggatttgcctttatcgaaaaacaaagtggtatcctacgtcctcctttacaatcaagagcagcccttatcatggctgctctcttcgcaaactcgtccgtatcaaatacatagtacggtgtctgtctcatatgctttattcctccacaagctctttcacaagcttctcgattgcatcaactgagttgaaattctcaggaaccagatcctttggcctgattgtgatgtcaaactcatctgtcaactccgatacgagtgaaactatatcaaatgactcaagaattttgtcatcgatgagctttgtctccttctcaaaatccacatccggtcttaattcctctaaaatctctaaaattgtgtctctcattttacatttcctccagttttttcatatcatattttccgtttggaagcttaggaagctgctccagcttcttgattttccttggcaccataaagcccgggagctcgtccctcagtgccaacgcaaggcttctcctgtcacagtcacctgtgtagaaaagtatcagcacctcttttgctttattatatataacgcagctttctgcgactccatcgaccacattggcggcatgctccacctcgtcaagctccacacggtgtcccatgtgctttatctggcggtccatacgtccacagaaatgaagtatgccgtcctcatcgagccttccgtaatcccctgtgcggtacatccgctcaggataagccctgttgagtggattgagtgtaaatgccgcagctgtcctctccggatcattataataacccagcgccaggattggtccacatacgcatatctcgccctgttctcctacagccggctcatttccatgctcatctatcaggaaaaccctgtaattgtcataggcttttcctataggaagcacctcgtcctcttccactgtatgatccacgctataatatgtgcatgatgctgtggcctctgtcggtccatactggttcacaaaatgtgcttcaggcagattttcctgccattttctgagcaccctgcatggcattactgagcctgagaagcagatttttctgagactcttaagccctacttcctcaaatgccccaagcgatgtgaggatggtaaatgccgaaacactccagccgacactgctgaccttcttatcattcatgtaatcaaacagggcatttggctccataaaatactcttttggaataatcgctgtgctgcaaccggtctttagcggcagataaatgtccctgattgccgcaatatagtcaagcggcgactgattgcctagcgcatcactttcctctatatgcatcacatcacaatatgcattgatgtatgtcataagtgacagatgcgatgtcatgactccctttggattgccggtggagcctgacgtgtagatgatatacagtgggtctgtcatggacatctgcctgcggactacagcgagcatatcccgtgagctgtcatctatttttcctgcacagcctgccacaacaccaccatctgtatcgttctcactatccgtcacagcgtctcctgctgattcactgattttacaattactatcagcgcacgccacctgctcgaagcgcgatatattctcagcaataaatatctgcggtctatcgaaaccttctgcctttgccagctcatccactatgctctccacatgctcaaggctttccctgtcagccacaatagcccttggacacagattttcaagtattttttcaattctcttgtcaggaagcgatgcatcaatcggcgcatacggtctgcctgcatataccactcccaggaagtatgccggtgttaccattttccttccggcaaatactgcaacaggggttctgtccactccaagctgttctatcagatatgctcctgtatttcttgctatatcatacacctgcgcaaacgtaatgctgcattcagtatccgaaaatgcaggcttgtcagggtatttttctactgtggcctcaagccactccagtacatttttcatcttagtcctctttcatgcattaataaacgttgccgaaaaaattatagcatataacatccgaaaaaaatgtcatgtgctatcgaattaagaattcttaagaaagccttaatttttttctgtaggtttttctatatttgattctcctattaaatatatcggtctgtcctttgcctcgagatatagcttcgacagataaagtcccaaaatgcctatgctaagcagttgtatcccacctataaaaagtatgataacaacggtcgaagcccagccggctaccggatctccgaatacaagtctcctgataatgataaagagcattgcaattattgcgacaataaagctgaacactccggctattgaagccatgtatagcggagcgttggaaaacgccactattccgtcaaggctatacaaaaagagttgccagaatgaccactttgtctcacctgccaccctgtttacattctcaaactcaagccacttcaccttaaagcctacccatccaaacaatccctttgaaaacctgttgtattccttaagcgaaagcagtgcatccacgtatttcctgttcatcagcctgtagtcacgtgccccatcaaccatatttgcctttgatattctgctcatgagcctatagaactttctggcaaaaaaagatctaatcgctggttcacctttgcgtgtcactcgccttgtaccgacagcatcataaccttcttccataagagccttgtacatctcaggcagcatatccggcggatcttgaaggtcagcatccattatcgccacatattcccccacagcatgctgcaagcctgcatacatggctgcctccttgccaaaattgcgtgaaaaggatatgtatttcacaccggaatcatttacagcaagctcctttgcgacatcgagtgtcccgtccatagaaccgtcatccactataatcagttcataggacaatcccgctgtctcactctcttgactcatctgattaaacacctgagttattttattataaaaaagaggcagagcctctttctcgttaaagcatggtaccacaatgcttatcttatttttttccataccagccaccctgcatataatatcaaataaataaaaaatccgattgctgctcctgccgtatttgtcacaaaatcatcaagctgacaatatcccctgccggtaaccagctgcgtgtactcaattgctgcgcttataagagcaccaacaggtattgtaaaccatctcatccaatttttaaaaaccagtggaaataaaagcccaaatggtataaacaatactatattttctataaaataagcgtgcatctgaagtgtcatgccccatgtgctccacagcaccatatcggcgacgccggttctgcttcccggctcccttgaataatacactatcattataagcgtatacatataggccacaaaggtgccgcagaacagcatatgccagattttgcccactatcttttttcttctctcatctgcctgtgatacctctctcattgtgaaaagatatctcagcagacacacaaaaatatacatcgcaatgcagattaaagccaaatataccgctgacggaagatatttgaacttttcctgtatgtctcttattatataatcctttaaactcaatgtccttttttatgctccttgtaggcgcgaatgaactccagctgtcgttcatcgtcctttttctgttcgtcatcagacatatgactcactttaataattatacacaatattatgccaattacaataataccggcacataatataaaaataattaagatttcaggcatagactatttcctccggcagaatttaattactattctctctacagattaaattatatccacttaatttatcttaattcactcatttatgaaccctcataacagcaaaagctgcatgatattctcacacagcttttgtatattacgtgtattatctttggcattaacctttattttaattttgcaacaaccatatccacatatttctgacagatttcctcactctctgcttcaaccataacacggataacaggctctgtacccgactcacgcaccagaatacgacctgtatcgccgagctctgcagtaacctggtcgacagtcgcctgaacctccggattggcaagtgcctcagccttgtcagccacacgcacattctgaagtacctgtgggtagatactaagtccctcacagagctggctcatcttctgttttctcgccatcatgacctccatcatcttaaggctggtaaggataccatcacctgttgatgcatacttagagaagatgatatgtcctgactgttctccgccgatgcggcagccgttctgctgcatatactcatatacatatttatcacctactgcagtctttgcgtagccgattcctatctcatcaaatgccttgtagagtccaaagtttgacataacagttgtgacaacagtattgttatcaagctttcctctctctttcatgtactttccatagatatagaggatatggtctcctgtaattacattgcccagttcgtctacacaaagacatctgtctgcatctccatcgtatgcgaagcctacatcaagtccattgtccactacatatttctgtaagccctcgatatgtgtagagcctgcattattgttgatgtttagaccgtttggctcattgttgatgacatagcactttgctccgagtgcctcaaaaacagactttgccatgttccatgagcttccgttggcacagtcaaggcctactttcatgcccttgaatgagtagacaccaagcgatatgaggtatcccatgtaacggttacggcctgctacatagtcaactgtgcatccgatagcatccttatgtgcataaggcaattccttccactcctgaccaaacaggcgtagcttgccgtctatatagtcctcgacaaggagaattgtctcctcatccatcttctctccattgctgttgataagctttattccattgtcatagtatggattatggcttgccgaaatcatgataccacagtcaaaatcatcggttcttgctacatatgccactgatggagttgtggtaacgtgtaatagatatgcatctgctcccgatgctgtaagtcctgatacaagtgaatactcaaacatgtagcttgaacgtcttgtatcctttcctattactatcttcgccggctcgtcgagctgcttctgcttcttaagctctccataataccagcctaaaaatctaccaatctgatatgcgtgctctgctgttaaattgacattagcctctccacggaagccgtctgttccaaagtattttcccattgtcgtccccttgtgaataaatttttcttatattatacacttaataaatatgtttgtgtagtaaaataagcttattcgttaaattattctacttcataaaatcaattgtttataaatatgataaaaccaacatatgtatataaaccaaagctacatagatatcttatggcactccatatagtatctcttctcattcgcttctccaattgagaatgtctttctgggcagcaccccgcccgcatttattgcagggaacaatgtgcttttgtctatcgactgaagaaaaattccacatcccttagtctccttaaccagtccgtgaagtgcctcatcaccatggatatagtctatttccacattgccatgtgtctcaagatacttatctaaaataccctggagtatctcaaccgggaggcggtcacctctatttgtgatattaattccggaattctttattgcggtagcgcctgattcaacatactcaaatactatctcatcaccctcagtgctcgcaagtccttgttttgtgatttcagcttcgaaaaacgacagtatgtcctttacatcaacatttgtaagcagtctgtgaataggcttaaactcaagcgcctcactgtgcagattacagatttccacaagagcatgccttgcaggatggtttttcaactgctcctctgtgaattttccgatttttttgatattttcccagcaggtcttcgctgttgcaagggaatggtttccatcacctactgcaaacaaaaagcctccacagctattctgttttgctgcgaatgcctctgtcacctgctttgctgcctcaccctcgacagcatagccgcggatatgtccgcctccctgcatgagctctgtatcgtaaagcttacgaagagtgtccctgatggcatacacatactcgattattccatgctttacagctgctatatttactgcatcttcctgtgtagcaccctggcatccatcaatcttttgtctgtctataggatcatcaacaagcagcataacatgtggcagctcaatagctgcattctctcttatttttactctcggaggtatacgtgagattactgttccctctgttgctctgatgagagtcttctttttcgggtcgaaatcatagtcatccagatcaataagtcctactattccaagacgaacccctgactccgtagtacgctcaactagcacatagccatctgccaccgcttgctttaaggttccatctgtgagatatgtctccatagtggtattaatatatttgattctctcatcatctgtcattgaagcatattttgtttttctgccggtttctttgtcatttttgacaccatcccctgacgaattgcaatcattctcctgtttcgtaattgttcccagatatatctcaggaaacacaacattaagcgttgatggtgcatcagccacatgcttttccacagcatcccaataatcagcctgacttgtgaactggtcacaggcgataactgaccatttttccatatctatacaatcgtttggcaaaagaatatttgccggattgaaacaatttgacatatcaacaattctcctttaaatatacaaaatatataacagaaatccgctatactctatagtataacggatttacttttatttgcatatattaaattccttttgttgttagaattcttcccactgcatcatctaatttttctgccggtatctcgccactgttaactgcagacaacactgcattataactgctctcaaagcctgttgaaacataaagcatgctcattcctgccttaacagctgccacagccgcctcatcctgtgtacataccttattaagagatgcatctgataaatcatctgtaatcaaaaggccattaaagcccatggtagttctcatatagtttacggcacctgctgatgtagagcatggcgtggtttcctctcctgtcacactctggcaaatcacatttcccatcatgactgccggaacacctgcttcaattgccttttgatatggcacaaaatcagatgcctcaagatcctccaacttgtctgtcatccagagcattcctgtcgctgaatctgtagtagcctttccttttcccggaaagctctttgctacagaattgattcctgcaccattatagctgcttacctgtgctgcaacacagtcacctacagtcgctgactcgctgccaaatgcatatgtatcgttatctgcattatcaccatatgctatatccgctgtcggtccaaaattcatattaaggccattggtagccatatatgagcctatctttcctgcactgctgcccgctgcgtcagcatctccaagctgtgatggtgcctgctgtgcctcatatccattagctgaagcaagaggaagtctttctccaccttcttcatcaattgcaagaaacaaattcacgcctagtcgctcctgcgaaaatgactgcagactgctcatcatctttataactgcagcctctcctgagaaattctcctgtctgaaaacaaaaccaccaagaggatatgtaccaatagctgcctttgtcttgttaccggcctgagtgaactgtgatacacctgtaatctcctcaggtctcgtaatgaatagctgggctaccttttcctctgttgtcatagaagacagctttgtcttgacagaatctgacggagtaaatgccggtgctgcctgctgtccatcagcttgtacctgctgaattccatccgtctcctgagtaggattctgtgtctcctgctggctttctgttattttcttattcgccttattccccggcatcacaaaatgcactgctccaaataccagcacaactatcagtgcaattacttctattatgatgaggtacttatctccattttgtctgaagttcatatttaatccccaaaatttgtatttgttaaatcgttattaggcccgcttacttttcctgataatgcactgctgtattcgtttacagttgcactaggagtatagcctgtatcaccttcaaggaactgatgcactcctgtagccatgtctgcaagtgtagtaggcacctcaacccatgcaccatcaacctttccaccatagaacacctgtggatatgctgtagaatcctctactgtatagtctgcaagatttttaaatactgaaagaatctcatcagtattatagttagtattgacatgtccaatcagatctgataccatcttaatctttgccgctgtattcatctgcttagctgattcaaaaaccttgaacagcactgttctctgtctttcagcacgcttatagtctcctccggctgtataacgtattctggaatacgcaactgcctgagttccatcaagtgtatatgtgccggctgaatcaatatgggatgagcttgttccacgaaccttattgacctcatcaatatatccgtttatcacctttgcctcagatgcatcaatatcctgtacaatgcctcctacctcatctacaatctcaccgactgtattgaaattgactgtaacataattctttatgtctaaatccagatttttgttaagtgtatctactgcaagctccggtccgccaaacgcatgtgcatgtgtcaccttctggtatccatgaccatcaatattcatcatacagtctctgaaaatagataccatgcggattttcttagcatcatgatcaaccctgactaccataatggaatcggaacgtgttcctttatcaagctgatctgagcggctgtcaacaccaaataacgcaaactcctcaatacctgatttgtctgtagtgctgtcatcctcagtctgagtatcggcttttgtcttaactgcctctgtacccggctttatgcctttaacttctttattcttaacattactgctgttaacctttacaagtattatcgctataatagcaataagtacaatcattactgccgtaataattatatttttcttttttttcatctgcacttattctccgtcattcatatgtgtctgcgcctgctacttttcgtcatcgtccctgccatagtaattaccatagtaattaccataatagtttccatagtaatgaccatacttagactcctcaaacctgcacttattgagcacagctccaagaatctttactcccgagtcctcaagtgtacgctttgtattaatgattgcacggctgcttgtaacattctgggcagcaactattactgctccgtctacattctttccaactacggctgcatcaatcgcagcgcctgtaggaggtgtgtcaacaagcacgtaatcaaaatttttctctccaaactcgataagctctttaaactcttttgtttcaagaagctctgtcggattaggcacctcatgacctgcaaagagaataaacactcctttgatgtttgtcgcatatactactttgtccaaagatacctgacctgagagataatgtgagagtccgtatatctttccaccgctctccactttcgctctgagtcgtcctacaaggactgacttacgcatatcggtatctactacaaggactgacttcttagagtccgccatcgaacgagccagatccataactacggttgtctttccttcatttggcacgctgctggtaaagaggatggacttcacgccctttccactgaaactgatgcttgttttaagagctcgaagagactccttcattgtatagctctggtcttttatctgattaataactattgtttccattaaactgccctcttcttactcttgctatcgtctgatttagatgattgagttttcttcttttttcttctctttgtcttggctccatcatactctgtctcatcaacaggaagtgatgcaagcaccttgaggcctgttctggtctccatatcatctgcattggaaattgtatcgtcaagcatgtatccaagtacaactatgccggtagcaagaaacagtccgagtacagctcctataactgtattcttaaggatattattattcaccggtgtctttgaagcatatgctgtctggataatctttggctgtgactgatccatattgtcagcgatatactgtgatgaaacctttgcaatctcatctgccactgtttttgaagcttctaaatcagtgtctgtaaccacaatcttgagcacacgtgtatctgtcggattctctattgaaaccctcttgctgagctgctcatatgtctcgtccatatccagattgtcaattacctgtgataaaactgtcctgcctgtgataacgtactcatagtcgtttgtcagactcgagcctacctgaatatcagcaagactggtgatagatgttgacttggtcagtacatacatctctgcagatgcctcatactccggtacaaaagtaatcttggagtataatccaaatactgctgcaagaagcaccattgatgccacaagtgccttccagtgcttcactaattcgtgaaacagcgctactaaatcgatttcaatttcctgatctcttattggttcgttgttttccattttcctaccctttacaaattgtaacattatttttcggtttaatcctatgttatattactacacttcatttcttttgtctatttttagaagtcacaaaaaaaatattaagaatatgtcatattttgtaaataattatgcaatataatagaaaagtgccgtttccggcacttttctttgttgtattttcatttgctatattttatttgttcctgttctattgttgctgttctagttctgctgtggctgttctgatggttcagtcggtgccaccggctgtggttgtggttttgaatttactgtaacggttattgaactgcttgcgctattccagcctgccatttcacctgctatagctgtaatctgtacgctaccagccctgtaaatggtcacatttccggcgccatctactgacgcaatcgaaggatcacttgactggtaagaaagcgctgctccgtttgaagcacttgctccgagagaaaatggtgcatctccctctgttacagttttattaccgcaacctattgtcacagatggtgtctggtttggctgtggctttgcatttacagtgattgtaattgtcttgctgccggccttatagcttgtagtagcctcagacttgacagtgattgttgcagttccgacacctgctatcgtcacattaccgttctcatccactctcactacaccattattatcacttgagtatgtgagctttgcattatcctctgctgtcacaccgagattgaatgctccgtcgccctctgtcacattataagagtcagctccgccaagactctgtgctttgccggtcaccttgtcaacaccaccatatacaattactttttcatctaatgttacattctcatatagcttctttgcagctgaataaggcatatttatgcagccatggctgccgctgtacaggtagatatttccaccgaaagtacttctccacgaagcatcatggaagccaattccaccattgaatggtataaagaaattaacccatgacttatatccgtctccccttaagtatctatccttatctcttgagaaaatagaatacactccggtaggtgttccgtgtccttttgaaatacatcctgtaacacactgacttgatacaacaagctctccattcttgtatacatataccatctggttggtaagatccacttcacagtaattgccaccatatgtgacatattcacctgtttcttcttcctttgcctcactgtaaactgcttccactgttgcagactttttattgtttattgcctcagcaatcgcctcatacagcttgtttccatctacagtctgtcctgatgatgctacaggcacatttattatacttccgcctgttgtcttaaactgtcctgttttcttctttgacacatcatgctttttggctagctctgtacaatatgtagccatattctcgccatcaagcgaaactgacaatccgtcattgtccactataagccactgggctatctgatcctttcctacagcctctgtagcagcttcacctgttgccggtgtgaaattacatgtcaccgtcacatcaagatatgcattggcttcttttaaggcattctttacctgctcgctgtctgcagccttttctccatcaacatatcctgttgtggatgtaagctccaccttatccttcagcttctttacagcacttgtaagatttgcagctgcattgtcatacacaggcgcatctcctgatacaccgtcaacaccctcaaattgtcctgcctctgcattgtaggctattgtagcacgatatggaacaattgatcttatatcaaaggtctgtgtgtctgtcgcagccttcttttgttcgtcatcatttgcatctgtatccgtatcactctgagccgtagcatcagactgtgactgcgtttttgcagtgatataagagtctacaagagccgtctccagctcatcagacttgtccattttaaaaagcttcacctgcttttccggtttcttatccttattggccgcatttatcagttcctgaagatctgctttgtcattgtacttgagtcccaaatcctcagctgtcatatcaaatgatgcatcgtcaagcttcactgatatcttatacttgcctactgcagtctttatggctttctttgcctcgtcagcagtcattccacctacatcaactgatgcaagcttgtacttttcagggaatgtcttatatgctttctttccacagcctgacattcccaacgccataagcacacaggccaaaactaccaggagttttatatttttcttcttcatctttgtcctctttgtcctctttatcttaatttttatattattctcacagcaccatattttatcactttcttatatatgcctcaagtgagatttgtcacatattttccgattatttaaacatattattcatcattatgataacaaaaagcttgctaatgacgcacaatatgtaacaggcgtataaaatagttctgataaaccttatcgctcatatgcattttattcaacatacaaaatactttataattcttatttacacatttatacatatctgtattctttttttcgatttgactgacaaacagcttcatcctttttctaagctgttttttatcagtgtttctaatcaggcaaagctgcaaataatcgttgataaatttgcttgttttatcaaaccacagctgctttccgcctatactaaagtgctccgcatcccggcctgcctcaatcaatttcatgataaccttctcataatggtcaagcctcttcagtgagctttctatcgaaacgctctgatttacgtcaccgactctatactcataaagtgccttatcatatgcatagatactttctgcatatgccattgggattattgaaaactcctgatcctcgtaaaataccccctcagagagtgtcagtcctgtatttctataaaactgcgtattatatatcaccccatgcagactcagcccccaccagaaatcatacagatgctcgtccacatatcctgcattatatggtccaccattttttgttatatatttatcgtcgtatggatactcatcagtattttctctctgcagcacatatgatctatagctcatcagcactgcatctgcgaaattctcatgtttattttcattatctttaagataacaaatagtttctttcaacacatcagtgtttacccagtcatcagcgtctactaccttaaaatagcttccttttattatttttactccttcattaattgccgagccatgaccaccattttctttattcagtatccggtacacgtcaggatatttatttacatatttttgtgcaatctccacactattatcggtagagccgtcattcacaacaataatgtccagcatatttaaaagagagttatcatcaataataaatgatgataaccctttatccaaaaactttgccgcattatatgtcggtattattattgatagtatctttttattttctgtttccatatcctatctaattcctgtttctatatgttaatttccacttatatcgctgtctgtcaccatatttgacaatggtagtcagtattattttctgtatagtctgtctgctctgccaacccttttggcaaactcaagcagctttgcaaattgattctcgtaaaagctgttgctcacatgcagcttattaaacagccaaaatactttatatttacgctgtactgcctcatacataagtgcacttttttgagcaagcttcatgttaaactgctctactatcgctctgccggattgtctgtcggtattttttatcaaagctatttgataatagcttgtgattatgcccgacgtctttctgataaagtgttcctttccaccctgtggcatttttgcaaagctcttctctgcctcaagtacattaaatataacctgctccaaatccggaagacgcttcacctgacttgctgctgaaacactttgatttacatctccaactctgtatacatacaactcttcctgaataaatctgacagtttttgcatacgaaaacggaacagttgcatactcctggtcttcgtaaaatacatgctctgtaagcttatatccaagtgctttatagaaccctgtgttatatatcactccgtgaaatgatagaccatcatatacatcatcccacatatttactatatcctttaaattgtactctcctgtaaaatcaggcacactcacatctgccggtctgtactcatcctttgatatgtcataatacctgaagctttgtatcaccgcatccgaatctacatgctcgagatattcaaccaggtgctttagcgcaagcgtatctacccagtcatctgcatcgaccacctttaaatactttcctctcacatgctccacgcctgtgttgattgcagaaccgtgtccaccatttgttttatttactatgacaaaagtatccggataccagtccacaaatttctgtgccacttcaacacttttgtcaggtgtgccgtcatttacgactatcacctcaagcttatcgagtatagccttgtcaatatctatttcctcaaagcggccctccgttgccattttacagttgtgctgtgctgtctgtgcatctgtatccctgcataccagaaatgacgacagccccttattcagaaacttttctgcattatatgttggtattatgattgataatattttactcattaactgttctatccgtcctgattactattattaaaaagagtattgcatactcattaacgcctattcatgaaattaattaccacgcagtctgctatagacccatgctgccatcggaaatatcttaaaacctgtttttctaagcatccagacgctcttcctgctgcacgcccggtacactcccgggtgctcctcacgcagcatctcgtcaaacttcttcatatgctcaacgttccttgtatcattgccctttgcaagaaatatctggtactcatcatcgactgcctcggctatgccgcgctcaaggtactgcttcttgtaggtctgcagattgccgtgcacgttgttgtactcaaacagtgcatcaagcaccttaaggtgctggtcatgacgcttgatcatcatctttatgtccacgctctggccactccttccaagtctgtactgatacagcggcagtggtgaaaacgtgatgcttgtgcagtatggtatagggtagagtatatactcctggtcctcgtagaagcagtgctcatccacacgaatatcattcttctgcaatacatcagtacggatggtcatggaatgtatagtgatcagcgggtccatgactgcctcagcaaagccccactccctgttgtagtgataagagttggacactgcctttctgcgctttgtgaccttctttgtcttatcatccaccaggttgaagtcattggatatgacatccgagtgcgtgtgcttcaaaagctgtacaaattgtggcaaaaggctcttgtccagccagtcatcaccatccaccaccttgaaatactttcctgttgcacgcggtatcgcatagttgatggtagatccatggcctccgttctccttagagagcaccttgaagctgtatggatatttctgctcgtaggtatgtgccaggctggctgtagaatctgtggaaccatcatccactatgagtatctccagacttctgagcacagacaaatctataaacgagtcaagacagttctttatatacttttcaacattgtaagccggaacgactatggttaaaagcttctccatatatgtttctccatgtatacctgtttccttgtgtactactctccgagtccatccttgatgtactgtataagatgttcaagcgcctcactctcatcctcgccattgcagataagctctatctcatcgcctgactttatgcatgctccaagcactgaaagtacactctttgcattagctacatttttctcgtcatatataaatgttacctttgatttaaatttcattgcctctttgcagagattgccggccggacgtaaatgtaatccggtaggattcttgattattattttttgtgctaccacttttattacctcttttcggttatatatctatcaatgtgatgaactgtcagagccgttatttccggtgtttcctgacgatgtgctgcccgatgacgatgaaccgcctgtgccggtgtcgcctgatgttgtaccgcctgttgttgagcccgaggctgttcctgtaccatcagttcccgttgtgccgcctccgtcaccttcccttccgataactatctgaacctttatctcgccccatgtgtacttggtctcatccagatttggctttaccgtcactgtatgtgtacctgtaccaaggcctgtcacatcaattttacccttcagtgtagttcccgaaagtgtatctatatcagactgggtgccgcttactatgacactgctcttatctgttacaaatgtaagcgtatatccctcttccagtccgtcatatgtgatattggaactgttcagcgtcatggttgaagtcgcatttgtttcaatctttatatctatactgagctttgccttggatgagttcactataaaaactccatccggcagatatcctgtcaggtcaacagatgtacttatatcgtctgttgcgcccgatatatcaattggtcccacatctatagatgtgatattgttcaatgcttctgcattacctttgagcattacagactcctctgatagttctactccgagcacgctctttcctcctgccggtgagcctgtcgtagtacacttgataggcacctccttggtacttaggacatcaactgtcactgctatagactgatactggctgtccacatcaagctttgatatatctatctcatcgccattatcatcaatcagagtgagatcaccgcgatcagttatctgattatctgatattatggtattgtcatcgacctttatatttacattggccgatgctatagttgaaacaatggactcaggacctccgatctttactacctttggatttgcctgtggcttgtttcccagtgctttcgcacctgagagacttccatccaatgatacctttacctcaaactgcttctgcatatatttttcaaccgaaagcgggagcatatggtctccaccgttgaaggtaatcgaatgtctgtacttggtgcatccaatatctacctttacgcttgccttattcgtatcatccttatctactatgatatttgcaaggtcgacatttgcgtaaaaatcagaatcatcaagctcgttcagatagcttctcttgcctgataccgaaaagctgatggtcttttccgaatccttgatggtaggccatagccccttgtcaacaaccgaatcacggcctgtgacggtgactgttgtggtaaatgtctttgtcttgaccgggtcattgagattgtagaccacaagccagagtataaatgcaaatgctatcgcaagtattttaaagcctatattatttgtgaaggtttttagaagcttctttcccattcttaaacctccttttaattaattcaaatttacccggctccctatgtctgttctgcagaagcttaagctgtgtgcgtagatgatcggcatctatatcgtgctcaatctgccccttgtatgctgtagaaactgatcctgtctcctctgaaactatgatagtaagcgaatcacttacctcgctgactccgaccgctgcacggtgtctggttcccaaatccttcgagagtgacaggctgtctgatagcggaaggtaacatgtagctgacaccacacggttgccacgcacgataaccgctccgtcatgaagcggtgtgtttttctcaaaaatattgatgaggagctgacttgtaagtatagcatccacatctattcctgttctgatatactctcccagatttatctcatcctccatgactattagcgctcctgtctttactctgcccatcgcaaagcatgcacgcaccagctcatcaattgtcttgtcggagaatttctcaatttcgcctctgccggtattaaaaaaatcacccaaaaaggtctttccaccaatattctccaaggcatttcgaagctcaggctgaaaaataacaacaagtgccacgagacctatattaaagagtttctcagcaagccacagtattgtatccatctggaacaatgctgcaacaagcacaaacaacagtatgataataaggcccttgaacagattccatgccctcgtggtctttatccacaaaagtatatgatagaagagcactgaaataataagtatctctataatgtctatcacaccgattttgatgcccggcacatttgtgaatgtaaggaactgatccttgaagcgtatcaatacaccactcacattatccatagcgccctcctttctcttatactatgtaactatttgtcatcctcaaatatattttcgtctatttcgagatcttttgcaatagcctctttgctgatattttcctgattatgtctctgaatcttctttccaaggcttcctgtattgccaaagtgctttacaaccttttcctccttggcaatcatcttctttggaactgccttgacgtaataataatattcatcatcctcaaactgtacattttctgtacgtgcatagtcaagattcataaatataaactgtatgacaacacctgcaaaaatagctgctacagtgctgagcacaagccagattatcttctccggcagtccgagcaccagataagcaacaacaagtgcaaccaactgtacgagtcctcctgctatggtagcaacagtccatgaattgttgattttcaatcgtctgacctgatacaccaccagtgtggtgataacaaagattgccataactataaacatctctttgttgtcaagaagctgtcccattgtcacattgagctttgtagtgctctgcccctttttatctaccacctctgcaagcgctgatgcattctgtctgattccgtcaaggaaatagtacaacagtgtgccacatattattgcaacaaccgaataagctcttcttaaaagacctgctgcaaccggcataacagatggtatgtgaagctgaaagcatataggtgtgagtatcacaagcatgccatccttcggtgcaaaacgaaaatagacaaaatacagtactaaaaaaagtacaaatgtgatagcaaaaacctctatggacagcgcatacatatctaaaagtatcataatcgaagcaatccagagtattgcattcaccggaagcagtgcacacacaagcgctaaaagcagtgccacaagcatcgagcttattttcgccatatagccgatattcaaatctattgttataaatgcgataaatgcaacggcaaatctcacaaccggaagtataaagtgctcatactcaccgcaaaatttgactgccttatccttaatttccagtaacttgttcataaagcctccctaacgcttaatcttttcctcacgggaatatattctgcccactgccttcaggtgatttgcgtatttgcgcacttctcttctgccggccttatatcttgcagtatacaccacaattgtgacaaaaatgtaaaccgccataaatgcaatatacagtatgcctattgtgacacccattgccttaaaatcaagcttattgattctgtccaaaagctctgctgcattgacagcaacccacatcacaacaagccctgcaaatgcgaatgtacctgtaaagaagctttttaagccctctttccatatatagtcccatccgtaatagcttgcggactgcttctgcacacggctgtcatcgcttttgctgtcacatagagcaatattaaacagttcccttactttttcttcgtttatcataaatcatcctcttacctgttacttgatatatctcatacggtttttgtcatcctgctgccacagctgcctatcctggctctttggtgtgtcaagggcactgcgtagtgtgtttgtgagcttagtcttgcactcatcacaaaatctacctgtacgtatcatcctgccacagttctcgcatggtataccatatgatgaatccggtgaaaacgaaagcctttcctcacgtatccacctatttatctgcttcatggatgtatccgtctccttggccactgtctcaaccggcacatttggattatcctcaacaaatctctttactatatcaaatttctcatccatttttttctggcagttcgggcagtactgctcatctgacagtacattaaatattctgccacagcccttgcaattagatattctcatctgataaaaccctcctaacttccctgtcctatgcaaatacacagcacatatacacggccgggacatttctttgctatctcgtgcccaatcgactccgccgtactgcctgtagtatatatatcatctactattagtatttggtcatattgtacaatactatccgccacttgaaaagccccctctagacaatttctgcgttcaacataccccattgtcttgagtggactggtatttttcactctgcgcacaagcccttttaccatccttatgcctgttttttcagacaatgcctttgcaaaacactctgcctgattgtagcctctctggcgcatttttttacggtgcatcggcaccggaataataacatctatcccacatcttagtatccagtccgaatatctttccactgctgtctgtgcaaaataagccgcatactcacgtctgtttgaatacttgaacctgtacatggtctgctttatgctgcccttgtatgcaaaaagcgccttgccctgcctgtagctgtcatcttcccgcatctgcctgtgatgctctagtgcccgtgcacagtcgtcacaatactctcttcgctcagacaaaaccggcttcccgcagcgcatacactgcggctgctcaaccggaaagagcttttcacagcatctgctgtgtatatatctctcaaccggaccaattataccatcacataccggacagcgcggtggaaataccagattgattacgcctctcccaatatcctttattttgttcactaatccccctgactgtaatatccccatttgtaacaatattaacaaaaaagcgacaatacattcctgcaatgcagggacatatcatcgccctcacggctgcctgttataaaacgtatattctagaattcttcatctctcttgcctgcaaggaactctacatactttcctgtaccgatagcaacacatgtcataggctgctctgcagtcattgtattgatgccggtcttttcctcgataagctcctcaagacctctgagcagcgaaccgcctcctgtaagcacgattcctctgtctgcgacatcggctgcaagctccggtggagtcttttcaagcactgagtgcactgcctcaactatctgaagagttgcctcacgaagtgcttcctctgtctcctctgagctgactgtaatagtccttggaagtcctgttacaaggtttcttcctcttacctcaattgtctccggctgtgggagagggtagcatgtaccaatcttgattttgatatcctcagctgttctctctccgatgagaaggttatgcttctttctcatgtatctgacaattgcctcatcaaaatcatctccggctatcttgatagatgtgctgactaccgaaccaccgagtgagataactgctatatctgatgtaccgcctccgatatctactatcatatttccgcatggctttgaaatatcaatacctgcaccgattgcagctgcgattggctcctcgataatcttaacatctctggctcctgctgcaaatgtagcatcctcaacggccttcttctcaacctctgtaacaccacttggcacacatacgctcacgagcggctttctgaagcttttcttaccaagcgccttctggatgaagtgcttgatcatcttctctgtaactgtataatctgagataacaccctgacgcagcggtctgactgcaacgatattacccggtgtccttccgagcatgaggcgtgcttcctctccgattgccttaatcttgttggtgtccctgtcaaaggctactactgaaggctcctttaacacaacaccctttccttttatataaacaagtatacttgctgttcctaaatcgattccgatatctgatccgaccattttaatagcccctttcctgccatatctttaaatttacacatacactctcttattatatacaataaatcccatttttcaaactttttttttgaaaaaggtcatatttaataaaattttaaagtttatccttgtctttttccagatatggtttcaaaaaccggcctgtatatgactgttttacctcgcatatctcctcaggtgtgccctgcgctatgacggttccgccgccgtctccgccctcaggtcccatatctatgatatagtcagctgtctttatcacgtcgaggttgtgctcgataacaactacagtattgcctccgtccgagagcctgcgcagtatctccacaagcttgtgtacatctgcaaagtgcagccccgtagtaggctcatcaagtatatatatggtctttccggtgctctttctgctaagctctgtggcaagcttgatacgctgtgcctcaccacccgaaagctctgtggacggctgtcccagcttcacgtaggatagtccgacatcatagagcgactggattttgttctggatctttggcacatttttgaaaaactcaagtgcctcctccactgtcatatcaagaacatcgtatatgctcttgcccttgtactttacatcgagtgtctccctgttatatcgtttgcctccacagacctcacacggcacatatacatcaggcaggaaatgcatctctatcttaaggattccatcgccgccgcaggcctcacaccgaccgccctttacattgaaactgaaacggccctttttatagccctttgccttggcatcgggtgttgatgcaaacaggtctcttatcatgtcaaacacacctgtatatgtggcaggattagagcggggtgtacggcctatcggtgactggtcgatgtctatgaccttgtcaagctgttcaagaccatctataccgtcatggtcacctgcgatacacctggctctgtttaaggatttggccagatgcttgtagagtatctcattggtcaatgagctctttcccgagcccgacacgcctgtaacacaggtcatgataccaagaggtatctgcacatcaatatttttcaggttattctccctggctcctcttatcgtgatatatccgcttggcttgcgcctctcctgtggcaccggtatctttattttaccactcaaatatgctcctgtgagtgattttttgcactttataatgtcctttaacgagcctgctgccactatctccccgccgtgcgagcctgctcccggccctacatccacgatataatccgctgcgcgcatggtatcctcatcatgctccaccactatgagcgtatttcccagattcttaagattcataagtgcgccaagcagcttgtcgttatccctctgatgcagtccgatacttggctcatcaagtatatatgccacacctacaagtcctgagcctatctgcgtggcaagcctgattcgctgggcttccccgcctgaaagacttgccgtgccgcgggtaagggtgaggtaatcaaggccgacctgctgcaaaaagccaactctcgcacggatttcctttagtatctggtctcctatatagtgttgctgctctgtaagctctatatcagcaaggaacttcacaagctccttcacagacatggaggtcatctcatatatgttcttgtccgcaaccgtaacggcaagtgacgacggcttaagtctctgccccttacagctcgtacacggagtaatgcgcataaactgctcatactctgcctttgccgtatcagaaaaggtctccttgtatcggcgctcaacattgtccacaaggccgttccatacaaggtcatagacgccttcgcctctctgacccttgtatctgaccttgagcactctgccgtctccaccgtaaaaaagcagttttttcatatctgcagataaatcatcaatcggtgtgtcgagaggaagcccatagccctcatgcagcgcacgaagtgtcgcataggtatagctctttgggtctgtacatgactgccaccccatcacctgtatggcaccctcagatatggaaagcgatgcatccggcaccataagctgcgggtcaaactccatcttgtagccgagtccgtagcaggtcggacatgctccgaacggattgttgaaggagaagcttctcggctcaacctcatctatgcttatgccacagtcagggcacgcaaaattctgggaaaaagtcatctgttcgccatccacaatatcaactattgcattgccctctgtcagttcaaatacattttcaagtgaatcagtaagcctcttctctatgcccggctttacaaccagacggtctacaacaatgtcaatattgtgctttatatttttctccattggaatatcctcggagagctcatacatgctgccatctacaatcacacgcacatatccgctctttttggctctctcgaacagcttctggtgctcacccttgcggcctctgaccaccggtgcaagaagctggatacgtgtgcgctcaggcagcgccataacagtatccaccatctggtctatcgtctgctttgtaatggcacgcccgcacttcggacagtgtggtattccaattctggcataaagcagtctgaagtaatcatatatctctgtgaccgttccgacagttgaacgtgggttcttgttggtggatttctggtcaatggaaatggcaggcggaagtccctctatagactccacattcggcttttccatctgtcctaaaaactgacgcgcatacgatgaaagtgactccatgtacctgcgctgcccctcagcatatatggtatcaaatgccagtgatgacttgccggagcctgaaagccctgtaaaaacaacaaactcatctctcgggatgtctagactgacgcactttagattgtgttcgctggcacctcgtattttgatgtattttctttctttttttgccataatttgtgttcctccaaattgcttcaggatgttataagcttttattttacgtctctcaatgtgtttttaagcataataagcttatccctgtactcagcagccgcctcgaaattgagctctgccgccgcttttttcatctttttctctatatctgcaatatgcttctcaagctcttttttgctcattgactccggatctttgtcaagagcattctcatcggccgctaccttctttgagatagctatgagatcacgcacggatttctgtatagtctgtggcgtgatgccgtgagcctcattgtactcttcctgtacctttctacgacgctttgtctcgtcaattgcgacacgcatggagtctgtaatcttgtcagcgtacatgataacatggccctcactgttacgtgcggcacgtcctatcgtctgtataagtgaagtctctgagcgaaggaagccttccttatccgcatcgagtatggcaacaagtgtaatctccgggatatcaaggccctccctgagcagattgatgccgacgagcacgtcaaatacgtcaagacgcaggtcacgtattatctccgctctctcaagtgtatctatatct

SEQ ID NO: 301 - DNA, 25835 bp, unidentified
  source 1..25835: mol_type = unassigned DNA
  misc_difference 8364: note = a, c, g, or t
  misc_difference 8365: note = a, c, g, or t
  misc_difference 8366: note = a, c, g, or t
  misc_difference 8367: note = a, c, g, or t
  misc_difference 8368: note = a, c, g, or t
  misc_difference 8369: note = a, c, g, or t
  misc_difference 8370: note = a, c, g, or t
  misc_difference 8371: note = a, c, g, or t
  misc_difference 8372: note = a, c, g, or t
  misc_difference 8373: note = a, c, g, or t
ttacagatgacggatctccgtcttttcaaggcaatttttcaaaagctgttccacatcaagcttctgttccgcagcctccaccacgttcaaagtggggcgggtgcgcgggtgcttcggcgtaaacaccgtgcagcagtcctcatacggctcaatggaaatatcatacgtgtcaatgcggtgcgcaagcgtcacgatttccgacttgtcgctgccgataagcggacggaaaaccggcatattcgccgcggcgtccgtgcaggcgatggcctgaatggtctggcttgccacctgcccaaggctctcacccgtgatgagtgcactgcattcgcgctcgcgtgcaatgcactcggcggcacgcatcataaagcggcgcataatcacggtcgcaagctcctccgggcagttgtctcgaatttgctcctgaatttcggtgaacggcacggtaatcatatccattctgcccgcgtattcgccgaccttcttcagcagcgccaccaccttttcatgtgcgcgctcgctcgtgtacggcgggctcgcaaagtgaatggccgtcagctccacgccgcgctttgccatcatccacgccgccaccgggctgtcgaggccgccgctgatgagaatggccgccttgccgcccgtacccaccggaatgccgcccgcgccgggcttcgtctcgccgtggatatacgccgctttctcgcggatttccacgcgcaccgtgatctccgggttatgcacgtctacggaaatttgcgggttcgcgcgcagcagcgccgcgcccacctcgcgggagatttccatggagccgagcgggaacttcttgtccgcacgcttcgattccaccttgaacgtcttaaagcccgcgagtgtgtcattgaggtattccggcgccatttttgtaatggcgtccatgtccttttcacacacgcaagcgcgcgcatagccaatgacgccgaaaatcttcgagatgcgctcctcggcctcgtcaatgtccgcgtcctcgtccttcggttcaatgtaaatggtggactgcatagagtacacctcaaagttgcccgcgcgcgcaatgcggcggcgaatgttctttaacagccggtcttcaaacgtgcggcgattcaatccctttaagacgatctcgccgagcttgaccagaatcacttcctgcatgacaaaattcctttccatctataaactcacgcttacgcgtgcgaaagcgtttggaggccctctttcaaggcgtccgcaaacgcgtccatttcttctgctgtgttttccgccgaaaggcttacgcgcagcgatgtttcaacgcgctccttcggcagctgcatcgcactcagaacgtggctcggttttgccttgccgcacgcagaaccgcttgaaacaaaaatgtttcgctccgccaaaaagtgcagcatcgtctccgcacgcacgcgccccgccgaaagattcacaatatacggcaacgcgttttcgggcgagttcaaaacaacctccggcatcgctttcagccgttcaatcaaatgcgcctgcaccgcttttacgtgtgtgagcgcctctttttccgtcatcatgtgcttcaccgcttcgccgaacgcacaaatttgcggtacgccctcggtgccggggcgcagatttttctcttgcccgccgccgaagctgtgcggcaaaatgcgtatgccgcttttcacgtacagcgcacccacgcccttcggcgcatgcaccttgtggcccgaaacactgatgaggtcaacaccgagctttttcggctggagcggaattttgcagaagccctgcaccgcatccgtatgaaacagcgccggggcctttttcctcttgatcatgcctgcaatgtctttcagtggcagcaaaacacctgtttcgttattcaccgccatcacgctgaccaaaatcgtcttcgcatcaatggccgcatcaaatttctctttcggaatatttccgtccgcctccggctgcacatacacgacctcaaagccctctttttcaagctgtgccatcgtattgagcaccgccggatgctcgatcgccgtcgtcacaatcttgttgcccgcgcgctttttcgcgtgcgccgcacccaaaatcgcaatgttgtcgctctctgtgccgccggacgtgaagtaaatctcccccggctgcgccgaaagtctctcggcgatgatctcccgcgccgcagccatctccttttccgccgcaaagcccttgctgtgcagcgaagaggggttgccgtagcattccgtcatcatgtaaagcgccttttccgccgcctcttttgaaacgcgcgtcgtcgcgctgttgtccaaataaatttcctgtgtcgtatccatcattatcccttacagttttcggtagccggtcgaaaaatcgaccacatttctaagcggctcacccgccagaaaacgctttaaattctccgccataatacgcacaatgcggtcgtgcgtctcctgcaaatggtatccgccggagatatgcggtgtgatgaccgcgttttccgtcttccacagcggatgatctgcgggcagcggctccgggtcggtcacatccacgcccgcgcccgcaagctttccgttttccagcgccgcgcacagcgcatctgtgtcgacgatcatcccgcggccgacgtttaataaaatcgcgccgtccttcatcttcgccatgcgctctgcgtcaaacatacccttcgttgccgtcgtgcccggcagcgtaatggccacgcagtccgcctgtggcaaatattcgtcaagcttatccgtatggatgagttcgtccacaaaatcgggcttatccgtacccgtgcggcgcacgccgatcacccttgcgcccagcgctttcgcacgcttcgcaaattccccaccgatgtcgccgaggccgagcaccagcaccgtcgagttccacgccgagcgcacctgcccgaggtcgcaccacttgcccgtgcgctgcacatcgcggtacaaatgcagtttttttaaaagttcaagccacaccgcgaccatgtattccgaaatcgcaaggccatacgcgcccgttgcatttgtcaaaacggtttccttcggcagacagccgtggatatacccgtccacgcccgcactgttcgtctgcaaccatttaagcttatcgccggtcgagatgagcttcgggctcacgttgccgaggattatatccgcgttctgcacgtcctcgcgctctgccttgccctctttataaataaacgtctcccccggcgcgacttcttcgagccacacgcgctgatagggcttcgcctccatcgcaactaaaatgttcacagtgtttcgatctcctctctccacaccgtattgcacgcatcgctcggcatgcggaaatcgccgcgcggcgaaagcgtcacagagcccaccttcgggccgtccggcaggcaggagcgcttaaactgctgttggaagaagcggcggtagaacgttttcagccactttttaatggtctcggcgtcatactgccccgcaaatgagcgcagcgccatcgcataaattttacgtggcgtaaacccaaagcgcaacatataatacaaatagtaatcatgcagttcatacggccccacaaggtcttccgtcttctgcgagatttcgccgtccttcggcggcaataattccgggctgaccggcgtgtccaaaatatcaagtaaaacgcggcgcagctcgtcgttgccgtgcatcgcctcataacgcacgaggtggcgcaccagtgtcttcgggatagacgcattcaccgcatacatcgacatgtggtcgccgttgtacgtcgcccagccgagcgcaagctcggaaaggtcgcccgtgccgatgacaatgccgccgtgctgattcgcaatgtccatcaaaagctgtgtgcgctcgcgcgcctgcgaattttcatacgtcacgtccagcacctcgggatcgtgctgaatgtccttaaagtgctgctccaccgccttcgcaatcggaatttcatcaaaatgcaccttgagctcttccgcaaggcactgcgcgttgctcttcgtgcgcgccgtcgtgccgaagcatggcatcgataccgtgcggatgcccgtgcgcggcaggccgagcatatcaaacgcgttcgccgtcacaagcaatgccaacgtggaatcgagaccgcccgaaagcccaatgaccgccgttttgcagccgatgtgcttcagtctcgtcgcgagacccgtcgcctgcattttgaggatcgtctcgcagcgtgcggaaaggtcggcgtcgtccttcggcacaaacgggtacgggtacgccgtgcgcgtcgtctcaaactcgggcaggtccatcgaagcgtcgatgatgtcgcacacaggctcgtcctgccacgtattcatgcggcggcgctcctgcacaaggcgctccacgtcgatgtcgccgtaggtgataccgttcgtaaacaaatcgctctcgttcagtaacgagccgttttcgcaaatcaaattgtgtcccgcaaagatcatgtccgtcgtgctttcgccaaagccgctgtccgcgtacacatacgctgcaagcagacgaccggagtgcatgcgcagcatgtcgcggcggtactgcgccttaccgataatttcatcgctgcacgaaagatttaataaaacggtcgcgccgccctttgcaagcgtcacgctcggcgggtctgccacccaaacatcctcgcagatctccacgcccacggtcacgtccggcgcaagctcaaacaccacgtcacggcagccgtaccagtcgcccgcatagcgcagcatgccgctttccggcgcgggggaaaaatggcgcagctcgtaaaattcggagtaattcggaatatgctgctttgccggcaggcccagcaaaacgccgcgactgaacaccgccgcgcagttatacagcgccccgccggacgggatcggcatacccaccgcgcacagaatatcgaggtcttccgtctcttcgatgaggtcaaacaggcacgccttcgcgctttccatcagctttctgtccttaaacaggtcgccgcaggtgtagcccgtcatcgcaagctccgggaacgcgatgaccgaagcgccgtttgcggccgcctcgcggatcattttcgccatctcgtttttgttgtacaggcagtccgccaccttcacgtgcggtgtagccgccgccacgcgcaccattccgtctatttttatgctcacaaataagctcctctcaagtgtcaccggaggtgacacaattatattcacttgcacaaattccccctgccgaaaaaagagcagggggaaactgtttttattctcattcgccggtttcggccgccgtcacaggctccggtgtgggctcctctgtgggggccgccgtcggttctgcgggcggcgcaggggtcggctccggcgtaggcgccgcagtcggcgcaggggtcgcagtgggcgcaggggtcgcggtgggcgctgccgttggggttgccgtaggtgtcgggctcggggaagacgtctccgtgcccgggccgatgcggtaaatggtgccgcttgggccgtagtaggaggaaggcagcgtctcggtgcggatgacctctccgtccttcacaaaatcgcgccaagcgctcgcctcatagccccagttgccgcttgtggaaagcaccttttcgccctttttaaggttctggtccaccacgtatttcacagtgctcagcggcgggatctcgctcgtcgtctgggaatacacattgatcgtatcccactctttcggatgcttgccgtagaactgcacatgcagcgtcacaccgtccatccaactcataatgtacaccggggtgtcaagatcattgcggaactggaagtcgatctcgccgtaactcaccgtcgcgtccagaccaatcggcacgtacgtagacggtgaagaatggcagtcgcgcagcgtgattgtcatacccgcacgcagcgcagcgccgtagatcgttgaagaagcctgacaaatgccgccgccgtacatctgcaccagcgcgccgccggaaaggccgcccgccggcaaaaagcccgtggaagcgtttgtggaatcgcccacaatgttttcataagagaatgtgtcgcccgggttcaaaaccgtgccgttcacgcgggaaagcgccagacccatgttgtggttgccgttttccgtattcgtcgagaccgtctcaaacgaggagatcatgccgaaatcttttctcaggtcgtccacggtcactttcgccgcggtctcctgcaaagcagcttccacttcgccgctcgtcttcttaaggaactgcgccttcacggcggcaagcgttccgtaaacgtccagctttttgccgttcacagcgtcctcaaacgcaaagtcgcccgcgtcaaagtcataagagcccacggtcgcgtccttagcctgcacgacgaaatcgccgagtctttgctttaattcattttcaaaattcttgagcgtcaggcaatacgtcatttcgtagtcgcccgcttttctcgatttcaaaagccgcgtcagcgtaatatccagcgtatccacaacggtcagctcgctgcccttggcggtcatttcggtgtcgccgcttttcaccgtgacgttgatattcgcatacggctttaacgccgctgctctgcacaccttttcggcttccgcgagcttcatgccggaaatgtcgatgccgtccatcgtggtaccttccgcaaacacggtcaggtcttccggctccggggtaggcgtcggcgccgccgtcgccgcagagtcggaagacgtcggcagcttatcgcagcccgcaaagcccagcatcaagacagccgccaaaactgcgccgaccgccgccgcgcgatattttttcgttttatgtctatacatgagatcgcctttctgaaaatcccggcagcttctcacagccgcttttctgtatcgtaccgacttacgttttgcagatattctctccttttcgccggcaaaataccggctgagaatattatacctgccgcatcttttcttgtaaagacatacgtttaaatatgtcttaaaagtttttgaacgcatgtaggttctccgcttactttaagtataccgcaaagccgcaaaaaagtctccagaaaaatgcaaattttccgcaaatttcactcttttttcggatttgatttcttaatttccgcacaatatatggaaattcacaaaaaaatgtgataaactggagcaaaggacagggggatctgaaaataagttttgatttttcagacacacccgatgaaaaggctattgaaaaggagcggtatcatgcgcattttgattctcacctgtgctaccggcggcggccacctgcgcgcggctgcggcacttgaaaaatacatacgcgaaaccaccacccacgaagtcattcaaatggacttcttaaaaagcatcggcaagctgctcgacaaaaccatttgcgacagctacctctttatggcaaagaagaccccgtctctcttcggccgcctctacaaaacgacaaataaagataatccccttgcggatttcgttccccgcacaacggagcttctggcgctccagctctatccgcgtttagcggaggtcgcgccggacgtcatcatcagcgtgcacccgttcgcaacagagatgatctccggtttaaaggagcgccgccgcatcacctgcccgcttatctgcctcatgacagactacggcgtgcacaaggcgtggattgccccgaatgtcgatgcctacgtcgtcgcctgcgacgacatggtgaacgacctgcgccgtctcggcattccgaaagagcatatctacccctacggcatcccggtgcacgacgtcttcttcgacaaggaagaccaggcgaagctcctcaccgaaatggacctcgagccggaagtgcccaccgtgctcttcatggccggcagcatgggcgtctccaacattgtagacctctaccgcggcctgtgctcctccccgctcgatttacagatcatcatcatcacgggcaataacaaaaagctctataagctctttgaaagcgaaattccgaactcgtcgaaaaagacaaagcttgtccagttcacaacggaagtagagcgctttatgcacgcgtccgacctcatcatcacaaagccgggcggcctcaccgtctcggaagcgctcgcatgcaacctgccgctcgccgtgttcgacgccattcccggtcaggaggaagataacgccaacttcctgcaaacgcacgatatgggcgtgcgcgtcacaaaggagaatttctccgctgtcgtgtcctcactcatcgagcataaagagcgtctgcgccgcatgcgcgaaagctgccgcacattcgataaatcccgcgcgaacgagaacatcgtcgcgctcnnnnnnnnnnacgacgctcttccgatctcgctcgccgtaaggcccgcaaaggaatttgcctcgtataacccgaacatctcattctccacggataaaggcgtgttcaacttccgcaccgccgccatcatcgtgcagaacggcaagctgctcgtcacaaaagacgacagcacagagcactactacctccccggcggccgcgtcaccatgcgtgaaaaggccgaggacgccctcacgcgcgagttaaaagaagagctgggtgtcaccgtcgcgccggagcgcgccgtgtggattgcccaaagcttcttcaccccgacaggcaaaaagcagcgttaccacgagctttgcacctacttcaccgtagacgcttccggcaccgatctcatcacccgcggctaccgtttcgacagcccgaatgaaccgagcgtccacttcgcgtggttcccgtttgaagagctgccgtatatcgatttaagaccggcgtttttgaaaaccgaagttcaaaacctgccggagcatacgcagtttattacgattggggattgacgcacgttcaccgcagcccgtcctttcacccaacaaacgcccctcgtttttatcttctttgacgattgattctttgacgattgattttttctccgcacttttcctataatcaagataaaaaacatcgtcctgaacaggaggtctaccatgaaaaaacgctcgctttctccttttgcgtactatgccgcaaaccgcgcattccccgtttttctgttgctcctgcttctgttcggattcaccgcctgctcggcggaaaaaggcgccaaagcgctcgattaccccgccatgttcggcgaaacgaagaacgaagtacttgcggcgctcgatgcggaaaacctcacctacaaggaagacgacctttatgccaacgcctacgttttagaccggaccgaaacgctcgaaaaccgtgatttttcggtctacctgcttttcgatctcaacaccgatacgctttacggctaccgcagggttctggtcgtcgaaaacccgaccgatgcggactgcaagctgcccgaaaagcttctcaacaccctcaccgcgcagtacggcgagccgaccacctaccccggccttgaaaaccgcatctccacgcacctcgaccgcctgagcaccgacgccgtcggttccggcgaggtctacaacgaatactggtcggtgtccgaaaattgcgacgtgtcactcggcgtcagcttcctccccgacggccgcctttttgtggacatcgtctgccaaaccccgcgaacgtaattttagtaaaacttcaaaaggacagcttccccggaagccgtccttttttcattctcattttatctcaaaccttatcccgcatctccgtcatacggttccagtagcgctttggcatgtgggtgcggcggcacaggtcgttccgtctgccctcaatgcccacggtgtcgtagaacgtgcgccacatggcgcggaatttctcctcctccggcgattccggcggcagctcgatgtgctccgcctgcaaaaattccggcgcgccgtctttatataataaagcaagcttatgcgtgcggtcgaagatcatgaaatcttcaccggaaaaacggttgataaaatgcggcgcgataacgggtaaaacgctgtttttcggctcaatctgcgcgataagaacgtcgccgtactccgcaaagcgcagaaaaccaaggtacaagtgcgcttcccgctcaaggaactgcaccgctttcgtgatcttatcgacggcaggctcggtcagtcgcccgcacacgccgcgcccgaccttgtaccctaaccgcatgaattccagcatacgcagttccttttcgggcatacaggtaaaaaacgcgcgctccaaaagatcctgcgcctccatgcccatttttttcggaatcgacacgcgcacacgctcggcacggcgcaggtcggtctcgatatacttcgcgccgaataaacacgtctggtcggcttcatcaacgggcaaaatcgcggcaggcgtttctttttccgcaaagctctcgaacacacaggaaagaaagccgttatatgtgccgtcgtagtaatacattacagttgtccggtcagacattttaccgcgtcctcctttgtggggttgaataataaaagctgctcgggaatttcgggctgtatgccgccttgcggcagcccgcggtcgcgcagaatgcccgccaaaaccgccggttcgtctgtgcgcaaacggcactgcattttgccgttgcaggtgataaaatacgaagcacgctttaagacgacaccgagctttttcagcccctcgtggtcgagcttcgcttgccgtctggcgcggatgatgcgctttgcactcaccacgccgatgcccggcacgcgcaataatttctcatacggcgcgcggttcacctccacggggaattcctccgggtggcgcaccgcccaactgcacttcgggtctaacatagggtcgaggtcgggcgttttttcgctcaataattcgtccgccgtgaagccgtaaaaccgcaaaagccaatcggcctgataaagcctgtgctcgcgcagaagcggcggcgcggtgtcgagcgcgggaagatttctgtcctgcacgaccggtatatacgcagagtaaaacacgcgttttaaagaatacttatggtaaagtccttcgctcagctgcaaaatacgtcggtcgttttccggcgttgcgccgatgatcatttgcgttgactgcccacccggtacgaagcgcggcgcatttttataccgtatgagatcgtgcgcgttttccttgatgccgtcgcgaatgcgcgacataggcagcaggatgttttccttcgatttctgcggcgcaaggcgctttagactgtcgtttgacggcagctcgatattgacgctcatacggtcggcaagcaggccgagctgctgcaaaagtgtctcgtccgcgccgggaatggctttgacgtgaatgtaaccgttgaagtgatactcgttacgcagaatatgcaatgtttcgagcattctttcgcaggtgatgtccggcgagccgaacacggcggagcttaaaaacagcccttcaatataattgcgacggtaaaagctgatggtcagatccgccagctcctgcgggcgaaacgtcgcgcggggcgtgtcgtttgagcggcggttgaggcaatacgtgcagtcataagcacatatgttcgtcattagcacctttaaaagggagatgcaccggccgtcacttgcaaagctgtggcagatgccgcacgcggcggcagagccgagctgcccctttacgcctgcgcggtttacgccgcttgaggtgcacgccgcgtcatattttgcggcatccgttaaaatgcgcagcttttccatggtgtccatttgtgtgttcatgctgttctccctatcttaaagcgcgacgcccttgaacgggttttcgacgtgtgtgcggcggttttccgcagcggactgaaagaggtctttgtgcattaccttgatgccgcgatcaatgatgtcgccaccgtatttgcagcgcagaaaatcgaccgtcgtttcgagcttttgggccttttgtccgcgcgcggcatcttcaaacagcgagcactgcgacataccgagcggcacgagcgacgacacacgcacgccgatgctgcggatggattcgcccgtgtggtgagcgcggaaaagaccgtaagcggcgtcgaaaatgcttttggaatccgccacggcggtgtccagcatcttctggcgctggtaggtctcgaggttatatttgcgcacggaaagctgcacgttgtagccgcaaaggcccttttcgcgcaatctttgtgcgacgctttcggagagcatgtagagctctgcgcgaatttcgccgtcgtcttttaggtcgtgcacggcggtggtgctgttgccgatgcttttgacctcctcgtgctcgttcacacggcgcacgggcgacctgtcttcgccgtttgcgtacatacttaattgctcgcccgccttgccgaatagcctttttaacagctttcggtcggcctttgcagcgtcgccgatggtgtagatgccgtattttctgagcgcttcctgcgtcgatttgccgacgaacaacaggtctgccgccggaagcggccacacgagctctttaaaattctcgcgcgtgaactccgttacggcatccggctttttatagtcgctgccgagctttgcgaaaattttgttgaacgacacgccgattgacaccgtgagcccgagctcatctttgacgcgcgcgcgaatttcctccgcaatctcgcggccgctgccgaacaagcggcggctgccggtcacgtcgagccagcactcgtctaagccgaagctttccaccatgtcggtgtactgcatgtagatctcctttgcaaggcgcgaatactttgcgtagcgctcaaaatgcggcgggacgaacttgatgccggggcatttgcgttccgcttcccacagggcttccgccgttttgacgcctttggccttcgcgagcatatttttcgcgaggacgatgccgtggcgacgctctttatcgccgccgaccgccatgggaatatctttcagcgacgggtcataaagcgtctccacagaggcataaaagttattcatatcgatgtgcagaatgacccgatccacggcttttgcctcctttcgacgcgttgcgaacatgcgttctctatacccttattatagaacatgcgttctgatttgtcaagcggtaaataccggaaaaagcgcgttttgaaaaagatgtccgcttgtgtcctgtgatgttctgcttctgaaaccgcagagatttatgcacaatttgttaccttagtgttaccctaagaacaaagtgtaaacttagtgtgaaagaagtctcggttttcttgaaaaaaagtttttcgcgcattatacttttaactgtgaaattttatttctaaccttatctctataccctcatttctaaggaagtgtttttatttgtttcttgaaaaattgagaagatttatgtacggccggtacggcacggacgaactgaaccttgttttgatgatcctcggtatcatcgtgatgttcctttcgcgcattttctggttctggccgctcgcaatgatttcttacgcgctttacatctatgcgctgttccgtatgttctcgcgcaacatccccgcgcggcaaaaagaatattattctttcttaaaggtatggacaccggcgcaaaaatggtttagaattaagaaaacggcttttcgcgagcgcaagcagtacaaatacttccgctgtccgggctgtcgccagcagctgcgcgcaccgcgcggacgcggtaaaattcttgtcacctgccagcgctgccacaagcagtttaaacaaaagacctgattagggcaaggagtttgaaaaccatgaaagttgcaattttaggcacctggcacgtccacaccaaagagtacaccacgggtgtactgaataacccgaatgcggaagtcgccgtcgtttgggacaacgacgcagagcgcggcaagaagttcgccgatgaaatgaacctgccgttcaacgcagacctcgacgctgtacttggcgacgagagcattgacagcgtggtcatctgcactgcgacctgcgaccacccggagatcatgatgaaggtgacggcggcgaagaagaacatcttcaccgagaaggtgctcaccatcgaccccaaggacgcagagaaggtcgccgaggctgtgaaggcttccggcaaggtatttacgatctcttatccgcaccgcacgttcccgacgctgcgcgcggtaaaagctttgatggacagcggcaagctgggccgtgtgacctacgcacgcgtgcgcaacgtacacaacggcagctccgcaaactggcttcccccgcatttctacgataaagcacagtgcggcggcggcgcaatgatagaccttggctcacacccgatgtacacgctttactggctgctgggagagccgaaatccattacctccacgttcacgcaggtgacgaaccgcggcgttgaggacaatgcggtctccgtcatcgagtttgcagacggcaagatcggcgtttccgagaccggctttgtctccgagtgcaacccgtacacgctggaagtgagcggcacggacggcgctgtgatggtacacggcgacagcgtacagtggggcggcaaggcgaccgaaggcaagtgggtagaccttgagctgccggaaaaggagccgctgccgatcgatcagtggatcgatgctgttgtaaacggcaagccgtctccgttcacgattgacgaggctgtgatgctgacccgtttgatggacggtgcttacaaggcatttgagaccggcgcaaaggcgacgttctgattttaattcttaaataaaaaactctgagcacccgccgcgcgcatttccgtgtgcggcgggtcatttttagggcgaagcctgcggtatcgccttaacgcgtattggaaaccggagggtcattgtggaaaaagaaaaccattctgcagaaaagaaaccgatgcgggaatacaccccgtgggactatgtaaagcccggcattgccattgccgcctttgcggtggggctgattttcgtgctgtttaagttcgatgcggtctcgaaggtgggcagcgtgctctttaacgcggtgagctcgtttattctgggcctttttatcgcgtacattttaaacgtgtttttgaatctgtttgagaacacggtgttcggaagactcacacgcagtgacaacaaggtgtggaaaaagctgaagcgcccggtatgcgtggcgctttcctatgcggtgatcgtgctcatcctcctcgccatcacgctgtatgtcgtgccggagattttcaagtctttagaacttatcggcgagacggcgcgcgtgaatattccggtgtatgtagaccagattgccaaatgggctgacgagctttccaagcagtttgacctcgatttttccacgatggtggattcgttgaataacttcaactggtcttcgattttatcgggcgcaacggagtttacgacgaactttttcagctcgcttgtgaacgtgaccgtgaatgtggcgagcggcattttcacgtttgtgctctccgttatcttctccgcgtacttcctgacgagcaaggagagcctgctgctttccttaaagcgtgtctcctattccctgctgccgaaaaaggtggtggcaactctggcagacattgcggtaacctcgaacaacgtgttttcttcctttgtgcgcggccagctgacggagtgtatcattttaggctgcctgtgcttcatctgcatgtcgcttatcgggtttgactacgcgctgctcatctcgtgcattgtgacgatcactgcgttgataccgattctcggcgcgtacatcggttgcggcatcggcgcgtttttactgctgatcgtaaaccccatggatgctgtatggttcgtcatcttcttcatctgccttcagcagtttgagggcaacctcatttacccgaaggtcgtgggctcgaccattggtctgccgggtgtgtgggtgatgaccgccgtgacgatcttcagcaatttgttcggcattttgggcattattctcggcacaccgatcgcagcggttctatacacggtgatgcgccgcgtgacaacgaaccgccttgcggcgcgcgggctttcaaacgctgatttagaaccgggcaaatacccatatctggaaaactctcactacgcggcggggtattctaagggccgcccgctgtgcgcccccgttttggaacgcgcggcaaagaaaaaggaacagggtaaaaagccgctgttcccgaagtttaaaacgagcaagaaaaagtgatttttcggcgctgtacgggaacccgtacggcgctttttatatgcaaaaaggcatacggcaaagcgtttttcgcttaccgtatgccttttgttttgcggaaattaaagcgctgcgatgacttccacttcgacgaggacgttcttcggcaaggtcttgacggcaacgcaggagcgtgccggcttttcggtgaaatacttgccgtagacagcgttgaacgcggcgaaatcgcccatatcggcgaggaagcaggtagtcttcacggcgttttcaaacgtggtaccggcttcttcgaggacggcggcgaggttcttcatgacctgctctgcctgctcggtgatgtctgcaccgtggatgtcacccgttgcggggtcgatcggaatctgaccggaggtgaagagcatattgccgcaaacgatggcctgcgaatacgggccgatggctgcgggggctttctttgtatcgattttcttcagcatgatataacttcctttcgtcacacggcatcacgccgcgtttatattcatcatagcgatttttggcgttttcgtcaagttttgcttttttactcggcgagggcgtagaatgcttcgctgtatttttcggaatcgtccgccatgatgagcaggacaaggtcgccgacgctttccacgcgcacgtcgttcgggttgacatccacgcagatccacttggcggggttcgcgctgcggcggatctccgctttcagctcgtcgatgtcggtaccgtccttgacacgcatgaggcaaacggaaaacgcgatggcgttgataaacggctcgctcgcgacggcttcttcaaaatcgagattttcgacgccgaagtagtacgcagactggtctttcggaatctcgaccgtgccgacgctgtttttgagaaaatcgcgctgctcgtcatcgacatctacggtgtcatacaggcggtctataatctccggcagcgtgcccgagatggttttgccgctgtctgttgtgctgtttccgctggcgcaggcggcgcaggcgaaaagcagcgtgagcacgagcaggagcgccgtaagctttttgggttttctcatggtaaatttcctttccggttttaaaatcgaaggggaagtttagtattttgtggcgtagtagtcgatggcttcatcgatggtgccgtcaaacacgatctttccgtttttcatcacgacaccgcgggtgcagaacgctttggcaatctccggcgaatgggtgacgaacagaagcgtgatgtcgccctgcatgatctccttcacctttttggtgcacttatcgcggaacgcgcggtcgccgacggacagcgcctcatcgacgatgaggatttccgggttgatgttgacgcagatggaaaaaccgaggcgcgctttcataccgctggagtacgtgcgcacaggctggtcgatgtattcttcgagctccgcaaaatcaatgatggcaggctcgagctttgcgatgtcttcatcgttaaggcccaaaatgcggcccttgagataaatgttttcgcggccggtaaattcctggtcaaagccgcttgtgagctccagaagcgcgctgacgatgccgttgacgtaaatttcgccgcttgtggggaacgtgacgccggtgatcattttaagcatggtggatttgcccgcgccgttgcgtcctaaaatggcgacggcttcgccgcgctcaacggtgaggttcatatcgacgacggcgtgctttgttttgtgcggcacgcttttgaaaaacagccccaaaaggcgacggcggctgcttgtatacagtctgtacgttttgcagacatttttaaaacggacggcaatgttgttttgttcgctcatgcttttgccctccttacagtacgtccgccatttcactgcgggtgcggcggtagctccagatgccgagtgcgtaaatgacaacgagccagacggcgaagtacaaaaggcgtttcggctggtcaaagaaccacgtgtggtaaatgaagcagttgcggtagccgttgcacaggaacgtgacgggattcagcatcaaaagcttatgtgcgaggcccttgtgcatggtatcgacctggaaaagcacgccggaaagccagaacaccgctgtaacgaacgatttgacgaggtttgagaaatcggtgctgatggcggcgatgggcgcggcaaacatagcccagccggtgaagaacaggaaattgcacagcatgtaaaacggaagctgcacaaggtagatggtcaattcgttgccggtgataacgaagatgaagatggtgatcaccatcaagatgaggtgcacagagaatttggagatgctggtaaacgtcggaatggtggagaccgggtatttcatcttggtgacgagatagcggtttcgcaaaatacactcggtgccaagcgtgagcatttcgctcatataaaaccacggcacgatgccgctgatgagccacagcacgaacgggtagccctcgatatcgccgccgcggcgcaggccgatggcaaatgcgaaccagtaaacgaaaatcgtgacaagcggcttgatgatggcccaagaccaaccgagtgcggacgcacggtatgtgcggcgcaggtcggagcccgcaagcttaaagatctgttttcggtaatcaatgtgatcccgaacgatggtgacgatggtttcacccaccgaaggtctggtggatttgatttcaaaagatgaggccatacaggccgcacctcctttcccgcgcagcgcgcgtacctaaaaaggcattccgaaaatatggtgaataggataggcttactgcccggccttcttccagtccgcaggcagtatcgcttttgctattatacacgttttgcaggaaaaatcaaccgttttcgacacgcggcgcggcgatgcacacggcatccttgacacagcggatgacggtatcgatgccgcctgcggcgtattcgccgtctattgaccaatcaaagcccgctgcggcatgcaggcggaacgtgctcgcggaagcgaaatcgatgtgcttgtccgaaaaatcgttgtttttgagcgccagaatgaggcggtgcaggtcagggagcgtttccggcttgcgaatgagaagcatctcgagcttgccgtcgttcatatcgacgctgttttcatcgtatttcagcatgccgccgatggaaagcgagttgctgaacgcgccgaaaatgtacgcgccctcgaaaaatttgccgtctgccgtgacggtgaggggcgtggcgtcgagcgcgtggaggtccttcatgccctctaagacatacgcgaagtggcccaaaaggcgcttcatggtacgcggcgtggcgtaggagcactttgtaaataagccgaacgacgcgacataggaaaaatagccgtcgccgaatttgccggcatcaatgaggcggtcttctgtttccgtaaagctcttatagggatctaaaagatgcttttgaatgccgagcgtctgggcaaaatcgtttgtggtaccggcgggcagatatgtgatgggcgtgcgcagcgcgcggtgcagcatgccgtttaagacggcgtttaatgtgccgtcgccgccgagcacgacgacgcgggcatagtcgttttctgcgagctttgcggtgtagccgcttccgttttccgtttcggtcgtttcaaagcggtcaacggcggcgccgttttccttcagccacgcttcaagcttatcggcggtatgctcgccgccgatgcggcccgaaacgggattgacgatcattaaaatgtgcgcgccgcgtaccggctcgtattccaaatttttatccatttctctcaccctttacgcacaaatttattcataaacattatacgcaaatacgggggaaaaacggtgaacaaaatttgaatttaggacacacaaacatagaaaaaacgccgccatacgggaaaaagtcgtacagcggcgcttatgtgtctattcggtttaaaatcagcccttgagctctacgcggcggattttgccgctgatggtcttcggcagctcgtcgcggaactcaacgatacgcgggtatttgtacggtgcggtgttcgtcttgacgtaggtctgaatctcttttttcagcgcttctgtgccctgcgtgccctttgtgagcacgatggacgccttgacgacctgcccgcgaatgggatccggagcgctggtgacggcacattcgagcacatacggcagctccatgatgacggattcgatctcgaacggcccgatgcggtaaccggacgacttgatgacatcgtctgttctgccgacatagaagaagtagccgtcttcgtcgcgccatgcggtgtcgccggtgtgatacacgccgccgctccacgcttcgcgggtcttctcttcgtcgcggtaatagcccatgaagaggccgcagggcgtgtgcttatcggtacggatgacgatctcgcccgtttcgccgaccggcgcaggcgtgccgtccggcagaatgaggtcgacatcgtaaagcgggctcgggatgcccatggagccgcttttcggcacggagccgaccgggttgtaaatggaaagcgtggtctccgtctggccgaagccctcataaatggaaaggccggtggcgcgcttccattgctcgtagacttcggggttcagggcttcgcctgccgtggtgctgtactcgatggaggaaaggtcatatttggagagatcttccttaatgaagaagcggtacatagtgggcggcgcgcagaacgtggtgatgttgtactgcttgaacataggcaagatgtcgtgtgcatcgaacttatcaaaatcataggtaaaaatgggcgcttcacacatccactggccgtagagcttgccccacagcgccttgccccagccggtatccgaaatggtgaagtgcagcccctccgggttgacgttgtgccagtatttggcagtgatgtagtgtccgagcgcgtatttatagttgtgctccgcgatcttcgggtagcccgtggtgccggaggtgaagaacatgagcatggggtcactgccgcaggcggtgtcctctgtacgctcaaacacatcgctctgcttttcaacctcggcgtcaaaatcgagccagccctcgcgtgcgccgtttgccatcatcaaaaattcgacggtgccgcagtttttggcggcgcgcagggcttcatctgcgacctgaccgtccggcgtgcagacgagcgcgcgcacgcctgcggccttgaagcggtaatcgaggtcgtgctccattaaaaggttcgtcgccgggatgacgacggcgccgagtttatgcagcgccaaaatggcgaaccagaactggtagtggcgctttaagatgagcatgactctatcgccgcgcttaatgccgagggacttgaagtagtttgccgtcttattcgacatgcgcttcatatcattaaacgtgaagcgcttttcctcgtggtgcttggagacccagagcatcgcaagcttatccggctctttttccgccattttatcgacgatgtcgaacgcgaagttaaacttttcctcgttcatgaaatcgatggattttaagatgccgttttcgtcaagctcggtgtgcacgaacgggcttgcgaccgtttcgtggtcggcacggtcctgtttggccttgatgagcgcctcgaacgtgtccttttcgggctttttctccttctgcgggcgcatgacgacggcgtagagggtacattcctcgccgccgacggcgatcataccgtggggcgtgccgctgttgtagtaaatggaatcaccctcgccgagttcttcgatgtgcgagccgatctgcacgcgcattttgcccttgatgacgatgtccatttcctgcccctgatgggtggaaagcttgatcgcaaccttctgctccgcctcgttatacggcatggtgacaaaaaagggctctgccgttttgcccttaaagagcggggcaagatttaaatacttaaagccctgacggcgcgtaatgggcaggccctcgccgcggcgggtgacggtatatgtggaaagtcgcgggcttgtgcccttgatgagatcggtggggtcgataccgaagcgctctgcacatttaaaaataaacgtgaagctgaaatcatgctcgccgctttcaaagccgcggtattcctccagcgtgacgccggtgcgctgcgccatttcttcttcggaaaggccgatgatctcgcgcatggtgcgaatgcgctccgccacctctgcgagctgtgctttcaggtctgttttttccgttacgggggtttgtgcttcatttgccaatttcttcattcctttcgttttggtatggctatatcgatagttttgttgtttttcatgcaaaaaactccgtctcaaatcgctttgagacggagttgatccgcggtaccactcaaattgcctgaaaaggccactcacgggctcccatgaagccctatgcactgacgcagcatggcgcggaaagccctactcgggttcactttggggctttccgctcggaagggattgtgacagggcttttcgtatcggcttacacccgccgccgactctctgaaacgggaaagcccgcactgtcttcgtcatcgcttttatattttctctgtattatatgaggtatatctgaaaagacaaaacttgtttttagatatattcttatcttatctggttttcatttcaatgtcaattgttttttcaaaaatttcaaaaagcttcacacttttgcggtctcacgcacttcgcgcataacttactccttcaaaacgtgaaataaataataaaagccggataaatacaggcattgcagcccgcattttatccggctttctgtttcgtgtgaacgggtcgccctccgataaacatttaaccgtttatctttgaactaccttattttaataaaatgaaaatatcaatgacactttacgcgcgatgtgcggcttctacggcgtcagcggcgttatcgagaaggccgtcacccatgagctcgatggcaccgcgatcgcacagggaggcgatctgcgagtcaagcgggagcttatcgagcaccttgaggtcgtactttgccgcgacctcgtcgatgtggctttcgccgtaaaccttgaacggctcaccgcagcacgggcacttgacatagctgtaattttcgatgaggccgagcacgggcacgttcatcatttttgccatttcgaccgctttggagacgatcatggagacgagctcctgcggggaggtaacgatgatgatgccgtcgagcggaatggactggaacaccgtgagcggtgcgtcgccggttccggggggcaggtcaacaaacatgtaatcgacttcattccagatgacgtcgctccagaactgcttgatgacaccggcgatgaccgggccgcgccagacgaccggggaggtctcatccggcagaagctcgttgatgctcatggtctcgatgccagtctttgtgttgaccgggaacaggccgtcatcgctgcccatggccttttcgtggatgccgaagcacttcgggatagacggaccagtgatgtcggcgtcgagaatggcggttttaaagccgcggcgctgcatggtaacagccaacatagaggtgacaaggcttttacctacgccgcctttgccgctgacaacgccgatgacctttttgacattgctcatcttattcatgggcgcaagaaagctttccggactctggcgggaaggacattcctcgccgcagctggagcagtcgtgcgtacaattttcgctcattgctgatacttcctctcaaaaataatgtcttttttcgtttgtgcggtaagctattccaccgcatcaaacaggatatttcggtctttttattctaccctgttctttcgcttttgtcaagattttgacaagccatggaactgcacagttaagctattcgtgcgtatcgttcgcaacggtgggcgttaaaaacgacagaagaaacgcgagcgccaaaatgccgcaggaaataaacatggtttttgggaatgaaaaattttcccgtacctcggttttcgatttcaagatacgggaaattttaatttcaggcttcgtcaaataatttttcaaagcgaacagcggcggtgtgcgggtctttcatgccctcaaacacgttttccgcgttgaacttttctttgaggtaatgatcggcctccagcgtgaaccagcctttgtaaccgatctctttgagcgcggcggcgatgggcgcgaaatcaatggacatggagaacgggatctggtgggaatcgtgccaacggtcgttatcgtgaatgtgaagcgcctgcaggcggtggcccagcgcacggatcatgttcgccgcgcctgaaccggagccgcgcatttccgcgtggccgatatcgaggcatgcgacgagatacgggtcatttacggcgtcgatatgctcgatgaagctctctgaggtggcgcatgccgcaaagcaggactcgtctttcgcatcatcccagttccacatgttttctgtggcaatcttcacgccgcagtccttcgcaaacggcaacagttcaaggtacatttcggcattttctgcggcggatttgtcgttatccgggtgaatgatacagatcttgccgccggcttctgccgtgcattcaatcgcgcgcttgaaatacgagcgaatctccgggcaggatgtcgggaacggcgcgtgcgactggttgcaggtgatgccgttatcgaggccgatctgcttcagcttgcgcgcaaacgcgagataattttccccggcaagcggatgtgttgtggggcggactgcgccgagtcgccaatcgtaatcgcacatggcaaacatggaaaaatcccaggcgtcaaacccggcttttgcgacatattccacggctttttcttcgccgaccagaacggacgcggtttcgatttgtgtggatgttctcatgaaaactcctcccttttatcgccattatagagccgaaaaaggggcttgtcaagccagtctttcggcgtttggtttgtggaaaaagccgaaagcactgtacaaaacgacacaaaaacgaccgcccgatttagaaccgagcagccgttcatagagtttgcttaataattttccgcgtggacctcaaaatagctctgcggatggttgcagaccggacatacctccggcgctttgacgccgacgcagatatgaccgcagttgcggcactcccacacttttacctcgctcttttcaaaaacatgtgcagtctctaaatttttgagcagcgcacggtagcgctcttcgtggtgcttttcgatctcgccaaccattctgaattttgcggcaagctccgggaaaccttcctcttcggcggtttttgcaaaaccctcatacatatcggtccactcgtagttttcgccgtccgcagcggccccgagatttgctgttgtatcgccgatgcccatgagctccttgaaccacatttttgcgtgttctttttcgttatcggctgtcttcaggaagagtgcagctatctgctcgtagccctcttttttcgcgacagatgcgaaaaaggtgtacttatttctcgcccgcgactcgccggagaatgcctcttgcagatttttctcggttttggtgcctgtatacttgtttgccat

SEQ ID NO: 302 - DNA, 22403 bp, unidentified
  source 1..22403: mol_type = unassigned DNA
gctctgctctgctctgctctgctctgctctgctctgctctgctctgctctgctctcaaaattgtcgctccttttcttattcatttcaactccttattttccaagacgactttttactaaattcacgccagatttcagcatgtccacattcgtcagcattgcataaattgctgtgatgcagagtgcaacaaactggattatcttattcccgcagtagtatgttccaatcagcatgccaccaataagaacactagtgtaacgataccgtctcagtccatgacaaattcaaaatattataaaagttaattaacacgtttggaaacttattcgcaatagaataaataccattagcggcagttcccaagaagtgagcaataatagttctatccgatgcattaaaaacccaccaagccagattattaggaatcagcgggatagaataaacactgactcttttgaatactttgggctgaatacgcttaagaataactctttttttggttctccatcagccaattgtgggcttcccggtaaatgtagccggacctactctgcatatattttgattcttttgctccgtcgcgctgttcctcatccagtatcatctggaactctgcagtatgattctcgtaattataaactgctgccaccacagcattgccatttttcaagaagaaatccgagagtgcagtaaatgcgctaccggaagaactgctcattaaggcagatttgctttttaacctccctgcgtatactattgtatctatcaaacccaccataaactaatcctcccacatattattggcttttaagtacagtttgattttctatactgtttatcatcgctctcatacactattatttgatttatgctgcatatgtatctatcacatctttcttataaagtttctaggcgatctaagtacagcaaaaagaatatctcggttaatatacgcagcatataaaataacaaggaataaacctatacactgtccaataaacaatttaagataatacggagcacatacaattatgagcataatcaatgtagagaaaatcagttttctacttaatgggacattcatatacttctttaaatcattatatctccaaatgcaatttatcgcatatgccactaaacttgatatagaagccgcatatagtcctatataatttattaacagcaagttcactgcaatattgattagagctgaaacaactgttgttttagcaatttcctttgttttctttaatgcaacatagataacactatacaatccttgaattacattgaacaatgccgcaaccatataaatcggtatctgataatatgcatcactataatttgcattaataagaattggaaataccaatggcattaatgcaataatgccaagacatgctgctgaaaacagcctatatacctttgaaatgacactctcaaaaaagatttcatgatcctcatcatgaaaatgaagagcggctgattctgtccacgataaattaaacactgtgtaaaatgttgtatacgctgatgaaaatttatgtgaaaccgacagtaatccatttgcagccgttcccattatatatgatacaatagttcgatccgatgcccccataatccaccaagataagacattcggaacaagcggtaatgaatatttcaaacactcctttacactttgtttggaaaaacatctcaaatcgatataacaatataccttagcttttataaacagaaacatggaacatataagatttcccaatataaaagaataaagcattccctctgcgccgaaattgaacgctaccagaaaaaatatattgaagaatatcgtacatgcagccgaaataaaacttcctaacgcatacaacgaattctgtccaagaccgcgtactacttgaagcattaatccagaatacactgtagcaacacaatacaagcataattctctgagataattaaagctaataaaagttgatatcacaaatagagtaatacataatactactgtctgaaatattgcaaaagcaacaacactcgatataattttcttctgacgatatttgtccttatcgttccgaacatcaatcagaaatctaaataccgcttgttcaatttggaaaaaaacaatataccctaacaattgctgataagttgtaataagatcaactgtaccataatcctttgttgttaaaagtgatgtatataatggcaacagaagaaaactcaaaaattgagtgcatattttcccaattgaaattatcgcagtattttttactagttctttatttttattcatgtttaatcacttttcccatcgttgtgtgtcaaaattatagtgactaattactcttgctgggttgcctgcaacgactgtatagtctggaacatcttttgttactactgcattagcagccacaacagagtgttttccaatagttacacccgatagaatatgacacccaaatgctaaccatgcgccttcctttatatgaacaggacctttagaaaaaactccttgcattgttactggtgtattgatatcttgatattgatgcgaatggtcagttacgtgcacgaatgcagcaaaaagcacattatcatcaatccgtacttcttccatcgaggctattctatcgaatggtccaaaatgcacgccattcccaactataatcctcgaagggtatttttttccatggtgctcttttaaaggtgcaaaaacaacattttgagcaatatcacacccatttccaagagatacgcattctggatgcataatctgaaccttttcacccactcttagcttagaagcgggtttattaagtctgaaagaccatacccctcccctaataaataaggccgtgtcctttccaatcttcgtactccctattccttgaactattattatgcatcctacaacatatgataatgtcttcgtacagaattcattataaaaaaagaaaccatagtttaaacacacaaaaaggcacaatccccaaaaaatagatttaatcacgttcttcttcatgatttttcctcccgatgtactgtttcaaaaaatcaaatgaatcttctttgatttgtaagaacgtctctccacaaattgccttttctaatccattatccaaggtatgtacattcaaatcagaaagcaattcagaaactctattacctaaatcactacgctgcacatgacaaaactctttattgaatatacaacagaaagaaatggcgtgaaaagaattcgtaaaaacagcatttgcattatttattaaccaaacaaattcttctggaccgaccgatttaattcttgttccacatagattttttatttgcattcccatagggtgcacatatatcagtttcaatttattatcgagagcatacttgttcgccttagaaataagcgtctcatcatttcgcaaaagatacgcaaatacatatttttgcggaatcttactcgaaggtcttttacaaaaggttatccattgattcttagtgagcaagaaaacaggatctactacagttctacaagaaaatccaagtgactctaatagtaatttactactgttttctctaagacttatggcactaaaccattttaaatactctttaaatgcttgtctagccgtatccgtaacgtctgcttttccaatactcgcggcgtaggatatttttttcttatctttcaatgcttctgaaaacaagtatggttttaaatccttaacaattttttcgttccagacctgatcgcttccaactataagcaaatcattgttgactaatccctccctataaggaactgttaaaaagtgtttatttctgaacgcatcaaacattaccgcagagtctctacgttctatattcgaaatcgttttttttacaatctctttaataccccttatattatggtaatttttttcataaaatttcttttcactttcagggatatagtccaaaaaaacaatactatttccagcattttcaacaatcttcttcaaagcataagcctgcaataaagctccataattatcggcataaataaaagtcaatactgctacattcatttactcacctccgcagtccttatcatgtaatatacttgatcaacgtagaattcgcctgctgctattgatacaatataaggataaaatacttgttgatcgtaaagaggattaccagtcattccatacaataaaaagaagcattgcatagcgagacttaatccaatataaaactcacctgcataatattcccccgtataatacttccttaaataaatcaaactttttatagcgcggaaaaatgcagcaataaaaaaaacaaaaaatggaaaagctccgattatgccattttctgatagaagctgaatgtatatattatggacatttaataaagttccaaattgtgctttatataaatatttaaacgaatcccatcctgttccaaacaaccaattatgtgaaaagacatttaaagctagcgccgactgttccaatcttcctaatgatacatcgccagcctcacttgtctcaacaaagcgatttataaaattcgaaagagaaggaataaatgtactaccaatagtgaataaaactatcactgctattgccaatacaataattttacccaacctactaagtggcttatcgctattatatagataatacaccataactaatgcagccgcaggaaatataattaatcctctttttcctgtaagtagcagggcaaccgcagtaacaataaatacaatagctccaattcttttatgtacttttgaaaacaataatgatataccagaaataattaatccaactgctagatacattccatttgtactataatgaacagctagacctggcatatatcctaatttaaaaacagatctgaggtgcatttctgcataactaggcatcaatggaaatatctgtgacatatagaatcctggtactgcatactctaacagtgtaacgattgtatgaatggcaacccaaaaccaaattataggcataattaatttatgccatgaatcctgatttctcacaagaaggaaaaacattgcgattgcaataaatgagaaaccatcttcaaattctccatgaataaagttattgtttctgttgcaaagaataactatcatgcaaagtagcatcatgccttcaagtaaggtgcattttctaattgatgaaatcgaacctagcaatatagaaaataaaataataattccaaatgatatatagcatgctatactattcgggtaaatgtaatcatgtattccggcttttgtaaatgaataagtaaatatcaaaaaaagaagtacaaaggcaataatatcaatcttttttactttcaatgatttcatactactcctcctactttttcatactaagcttaagcttatatcctaatttcaagaaagaacccgcaattgaatcttgcacactaacattaaatttcttaatgggtgcagacaaatctctattgctaaggctaataattttttcattttctattagacgatcgcaaacacttttcttgtcaaaaatgtatttgtctctaaattccgcaactgaattaatatctttaaaaaaactaaaaagttcttcctctctcagcaccaatcctgttttcattttacagacttgatcttccatattcccgctactagggtttgtgataatacaacatcccgcgcagtagctttcataatatgtgtacgaatatgtttccggccacacagaccatagaatcacataatcaacgtgctctcttctcaaagcgtcctgcattgcagacaaggactcctgaaaattaacctgaacatgtcgaatatcaacggaagtgtctattaatgagctaaaatacacaaactctagattctgattttcctgatagtcataatacaacttcttaaactgttcccatccttttgctgcaatagggactccaacataaccaacttttattctattattagttctttctggaattttgtactctccctctagtgtttgatgataaacaactataatcttatcttcatattctttatactgttttaaaaaccactttttgcacgcatctgatggtgcaataaatgaaattctgtttttaaattccgcaacaaaactcacaaatctacttctaaaaacaatgctttctgaatagtagcgacaagaatggcatttttcattatcaaggaaatctctttcacataaaaaaccatcgtcacatatgagtttcgtcgacatacatatagtgtaataatcgtgtatgtaaaaaaacatagatgcgcttagacttctaattatcgctgacaattcctcaatattaacgtacaataaatggtgaacatgaatacattcacacattatccctctgtttcctaagtcaaataaaaagtttataacttgttctgttgagcagacttgttctaattcgccgtctactataactccccagtatctgttattttttttatgctttcggttactgatgttaaacggaaaaatacatatgtaagaaacgcctgctttattaaacatttcctgatgagtagcaacaacttttgctactcctccaattgtatttttataatccccaaatgtaacactcagtacatactttgtgctttttagtgttgccatggattctctccattctcatccaatgctttttttattgcttcaagatatgcgtatccacttgtttgatccggctcaagatatccaccttcagcccattcattccaagcatacataaaaatcatatctttatggtaaacattttttgcacgtcttatttgttcagacaaatatttctcaaatttttctggtgttttaccaatataaacacgtccgcgctctccatgtcttggtgtattatcccaatctacaaatgcacctggaacattaaggatgctctccggtgttgtatttaatatagtttcccacgctttgtcataatctactcgatttaaggccgccaccttaccacttccgataaaacggagtgtaagtcctgttttcttttcaacaaaatctgacacgacttttttgattttacgtagaactggaagtgtatttttgttcaatttcgtaaaggcatatgccggctgaaattcaatatcataatcaaatctgctgtcatttcttttatttttcggcaattcatccattcccgcagactgatatgcaaatttcaaacctttaaagcccgcgttcttagctaactcattccagtaatccaacatatcattaaggacatctattatttctggtctatagatgaccaccagcggctttccttcatccaaaatatatctagggtctttgaaaaatggtaagagatagtcaaaatgttctttccactctttcttagaaccatatttctgtggaattaaagtttttgtctctcctacccacgcacgagtccaaggttcatttgcccagcaaatgcaaaatggaatatccacttttttattttctaacatctgctccattggcttttcaagtaaaagcttcccatcaaaccaataatgatagtagcaaaaaccatagactccatacttttttgcaaggtcagcctgccaaattttaacatcatcatccagcaaattatagtaattgtggtttaaaggaactcttggctgattatgaccgtcaaatattggctttgctttttttacattaacccattcagtaaatccatctccccaccattcatcattctcagggatattgtgaaactgcggtaaataaaaagctataattttcatcctattaatcctctttagcataaatgttttcaaggctttttgccatatctgtgatgtcaaatcccttgtttttcaaagtctcatagctattctttctatctgactttccaatgcattttaacgcctgttcagcccaataagctgctgactgatttaaatccacataaaccgtttcatccaatattgaagcctcatcagtaatcgagctagataaaacacaaggaagaccggcagcttgagcttccacagctgttacaggaaaaccttcataaaaagacggcatcaagaataaatccatagcctgagtcagttcattaacatccgaacgaaatcccaaaaacaaaacatcactttctaagccaagccctttaactttttcttttatcgaattcatcaattcaccaattccggctagaattagaatcgaatttggctcaattttttttatttctaaaaatatatcaatcagaaaatcatgattcttttgtcttacaaatcttcctatattgcctatcaccagtttatcacttatgcctaattccttacgcttatcgtctcgaactttctgattatactgatacttttcaatgtcaattccattcttaattacaagaactctgccatcttctaccatttttttcccaaatagccattctcctgctattttagaacatgctagacaatctgttgagtatttaatcaactgcttctttaatacgtctccaatgattatctttagtctattatgcgtctgaaaatctgtattatgactgtgcgcaatcctaattgaaataccatattcctttgcgtattttagtattaaaaagtttttacttgatgagtgcatatgcacaacatcgtaatcatgatgttcattaaaaaatgccgaaactgccttcttatattttatataatcaatcggggtatttatccatatacccttcagtttgtaaatcgaagctcctgtttcaataatatcattctccatagggtaatctgttccatcgtccagcatcaaaacatcaaagctatattttttcttgtcaaacactttcaataagttgacaagtaatatctgaattccacctgttcgcattctatctacaaaaagcaggactttcactttttccattttcttcacctacttgaatttttcaccttgttccacacttttttaagactcttgtatattcctaactttagtgtaaacattctaccatattgcaagattgcaatttttacagtgtatggcatatatcgattaaaaacgtgttctggttcttgctcatgcaaatctctataaaaggattctttaacctgcaaatttttcttttcctcataagctctctcaaatttagcaataccctctggcatactcttccatcggtatgcttcttttatttgctgaaagatttccattcctttatttgtatttatacgcattcgagttgttcctttatcatcatcgaattcaggaacatattcttttattgcgaagcaatcccatatcgtaaaatcactgacatgatcttctctataaggacactgatcacagctttctctagttattaagcccgaaaaaaacattctcagccataaatccgactcaattcctcgatgataatctttaacgcctgatccctctttcatatagactgacattgtagaatacgaatatccccaaattttatctcggaatttaaaatggtctattttatttccgtattttttattgaacacttccacatactttttccaaacaaaaggtgacggaactgctcggcatacaacgtccacagttattagattttcataatctcttcccaaatatttctttaatcctgctatttgacatggtgttccactgtaacatacgagacgattctctttcaagcatttctttgcttgtctatatgtattatttacatcgctttgtacatacttgctgcctcggaattcatgaatatcttccatatcttctgccatcttatggacaacacgatcacagctcgcatcttgaaatgcacagccaaaaacagcaccttctttttttattacaaattcggcaagtgccgtaaacatcccaccagatgtagattgactcctaatgttctcatctttacactgaatgtaataaatatcatcttttctcttttgttgtctgattggatattttattggacaaaccctctcacagacaccacaattaatgcaggtttctttgtcaacagtcggataaagaaatccttcattatcttccttcataataattgcatctttaggacaaattgctgcacaggcagtacatccacaacagtctgattttttctttatctcaatcacaaatctgtactcccttcatcttttaatgcagacaaaagatactcatatgacttctgccggattccttctaactttttatgaacactttcaaaatccgtctctatctttaagcaatcggctatattttcttctccggtcagtaatctgccagtgattcccgccatgtgaaacagtgtatctaaacgactgtttgttgactgttttgtatttctgttataccgacggaatgtaaaaaactgccgcttataaagaatggaaaacacggagcaatggaaagagtctgtacacacatattccgcatttcgaattagattcagaaaatctgccggatcaatatcataaggcgtttcatcagcataaccttcatcgctctttacgaattcatccaaatgtgtcagtgctatgatcttgcagcctgtagcttcctttaagcgttttgcaaattccctatgaggaggattgttgcctaagaaataacagaggatatacttgccttcgactataggttctttcttttggattgtcatccattcatcgcctgtaaacagtaatgtcggatcgcaaactactggaacattgcggtttgcaatttctttcaccagtttttgacccgattcttctcttacaccaatgtgctttattctctttaaaaatacttcggctttttttgcagaatccttcggcaaacttgactggccaaaactcgttgcataggcaatcgaatttactgtccccggcacaaaattgagtgtataataatccgctgcaatatttccaggaagccataactgatcacttcctacaagcacactcgaatagttatctttacatttatttccaagttcggctttcgaattgtatttcggagaaagtctaaactgcttacggctaaacgcatcgagtttttccgcgcgaaccttagacagttgaacgtactgatttttagaaaatttcttaatcaatacattttttgccataccaagtttagatagcaaaatatctgaggttaaacttgccttagcaaaatacagcaatttcacctttttaatttctccgttaaaaccagaaatatctatggtttcattttcatatcccagcttatctaacgccatctgcgtggcatatgcctgaagcatacttccatagttatgttggaaataacatgacacaattgctgtttttttcattcctctactctccaagtctttatctattcattgccatttcatatttttcactatactgttcggtcatcacttttgtgttatacatctgtaggatatcctgatatgcttgttctgtcagttttccatcttcgctacggcattcttcaatagcttttacgaagtcttccactttcgtacacacaaagccattcttcccgttgtgaatgacatctcgattgccaatcacattacttaccacacatattttcttcatatacatagattccagcaaagatatcggtagaccctcccacctgctaggaagaagaaacgcatctgcattgaccgcatatctaatagcagtacttcgatcagcccatcctgtgatttcgatattcttgcttgtaagctcacttcgaagctcaccatcaccaatccagacgaatttcacacctggaagtgattcggctatctcattaaacaatgttggatttttttgataacagattctccccagtgtgtaaactgtaaatgggtgttctactttttctgttttatcaataattttctgaagttccgccatgttgatgccattatttacataagtggcacgcttggtaagcttcaaagattcttgatgctcacccatgctgcagctgatggtcgtgcaatttcgctttgcacacaccgattcaatcagcttaaacattctgagcttcatcggtttataattttccatcaaaaaactataaccatgtggggtataaaacattggtatttttccattgaaagccatccgaccaattacaccagctttactactgtgtagatggattacatcaggcttgatttttgccgctatttttttaacttcaaaaaatgcggcgatatctttcgccggatcaattgcccgtacaaagtttttgacttcaatcaaatgaatccttttatcgaaataatctttatagttttgtggcgtctgtttccgcactgcgtaagcaatgtacatgtcataagaattgacaagctcattggcaatgtcaactatataagtaaaaacgcctccgcccatagcttcgactatgtacagtattttctttttctccgccatgagtagaatcctccgtactaccaacagtccttaaaatttaaaagtatccttcagcccaagccatttctggtccttatcgctcaggttcagtgcagtgccaccttccagcatatagccttctgcacttgcactgcccttgtactcacccttcagctccggccactcaatgccaatctccgggtcgttccaagccataccaccctcatcgttcggatgccagaagtcattcaccttatagcagaactctgcttcatcgctcagaacaaggaaaccgtgtgcaaatccctccggaatgaggaactgcttcttattctcagcagacaaagtcacaccataccacttaccataagtttcggaattgcttctaagatcaacagcgacatcaaacacagttccgcgcacggcgcgcaccagcttgcactgcggatactgcttctggaaatgcagaccccgcagcacaccctttgtggacatagactgattgtcctgcacaaagtggatatcgatgccagtttccttcatatctttttcgttgtaggtttccatgaaatagccacgggcatcgccatgaacagcaggctcaataacacaaaggccctcaataccacctacatttttttcaactttaatctgtcccatttcttctaactcctcgatttctttcagataacggctcagcgcatcctgccaggtcggaagcggagtaaatccagcctccaccagcttgctcttatccagacggctgttgaacggacgagcagccttgctcagaccatattctgctgtagttacaggcaggacttccgtcttatagccagcctgacggtagatttctttcgtgaaatcgtaccagctgatgtagccgccctcgttagtggcgtgataatagccatacttttcggtttcattcatatcgacgagcaatcgggccagatcatatgtataggttggtgtaccaatctggtcattgaccacacgaacagtgtcatgggttttgccgacattcaacatagtcttgatgaaattcttaccgttcagaccgaacacccagacaatgcggacaatgaaatatttctccagtgtctgactgactgccagttccccttccagtttcgtctgaccgtatacattcaaagggttgtaagttttgcagtccggcagccaaggctctgttccctgaccgtcaaacacataatccgtactgatataggtcatcttgcagtccaacttcttgcaaacatctgcaatgttctgggtaccgccagcattgatagcacgaacttttgcaactttatcgtcgtcctctgccatatccacggcagtccatgctgcacagtggattacagcatccggatttacttctgtaattacttttttaacggcgtccttatcggtaatatccagagcgatgtacgatgcttttgttaccgcggagccatctgtcacaccgctataggtttcctgaatatcagaaccaacaccttcatgaccacgcttcagcagctcattcattacatcatgccccagctgaccgccaacacctgttacaaaaaacttcatgttctttcctcctgttagcggttgctgtacattttctcgtagtaattttgatattcaccgctgatgatggtctcccaccactcacggttatcgagataccactggattgttttcttgataccatcctcaaatttggtctccggcagccagcccaactcattgtggatctttgtcgggtcgattgcatagcgcatatcatggcccttacggtcgccaacatgagtgatcaggctttccggcttgcccagttccttgcagataatcttcacaatctcaatattctgcttttcattatgaccaccgacgttgtagacttcaccaacacgacccttgtggatgatcaggtcgatagccttgcagtggtcttcaacatacagccagtcacggacattcaggccttcgccgtaaacaggcagcggcttgtcagccagtgcattagcgatcatcagcggaatcagcttctccgggaaatgatacggaccatagttattagagcaccgtgaaatagtcacaggcagaccgtaagtacggtggtaagccaaaaccaacaggtcagcagaagccttagagctgctgtatggagagctggtgtggatcggagtttcttcggtaaagaacaggtctggacgatccaacggcaagtcaccatagacttcatcggtagaaacctgatgataacgctgaataaataccgtacttgcggcaagcatccatcagcacactagtgccgataatgttagtctggagaaagatacccggattttcaatagatcggtcaacatgagattctgctgcaaaattgaccacgatatctggatgctcttcttcaaacagcttatctacagcttcacggtcgcagatgtcagccttcacgaagcggaaattcgggttatccataacaggtgccagtgttgacaaattgcctgcataggtcagcttgtccagacaaatgatccgataatccggatacttcttcagcatatggaacacaaagttactgccaataaaaccagcgccaccggtaacaataatattcatgatctattctcctctacacttatcctttttaatacagatgttcctgatacttgccgtccatgacatccttcagatactgtccatactggtttttcttcataacctcatagacttccatcagctcatccttactgatccagccattcagatatgcgatttcctcaaggcaggcaatcttacggtgctgatgctgctccacagtctttacgaagttagtggcatccaccagactctcgtgtgtaccagtgtccagccaagtgaagccctgacctaacagttccacgttcaaggagccgtcctccagatagatgcggttcagatcagtaatttcaagctcaccacgtgcagaaggtttcaggttcttggcaaactcgatcacacgattgtcgtagaaatatagaccggttacacagtagttactcttcggatgctctggcttttcctcgatagaaacagccttaccgttcttatcgaactcaacgatgccgaaacgctctggatcgtctacatagtatccaaacacggttgcacccttgccgctctcagcgttttccactgcggcagttaatcttttctttaatccgtggcccgcaaagatattgtcacccagcaccatagccacagaatcattaccaataaagtcggcaccaatgataaaggcctgtgccagtccatccggagaaggctgaacagcataagtcagattcacaccaaactggtgaccatcccccagcagatcctcaaagcggggagtatcctgcggtgtggaaatgatcagaatatcacggatgccagcgttcatcaaaacggacattgggtaataaatcatcggtttgtcaaaaataggtaagagctgtttacttgttaccttcgttaatgggtacaggcgtgtgcctgatccgcctgctaaaataattcccttcatagtatcttctccatccccaattctttccacaaaaacaaatcccgcaacagagtatgcgcctttgcattctatgttgcggtcaagttcagtcttttctctgtaagttttttcgataccgttccccccggtgcatgttcttatcttaattcatcaaactatttttcgatgtcgggcggcttccggtcttatccggaagcgcccgcgccgttgcttgccatgccaagatgtagatataaacaactgtagtcaccaccgacagtcccgcttctgtccggtacaggtaccagatccgtcctgcagcttaaccccgtttatttctccgtcttcaaaatccgtgacagttctgccacgtttttggacgaatccatagctgcataggttacgatcacttcgccatttccggtttctgtcaccttttcaatcagtaaggaggctgtcacatccccgtcatgggaatcgtaagcggttacgccttccagcagctgatcggtatctgtgccgattgtataggtctgcttggtatccggcagtgtgatcaccggcgctgtccggtccatttgtaagtagaagaatgtgcaaagcgcaattaaagctgcatctgcaataaaaaatccgatggtcagaccttttgtactcattttgcatcctccttttctcccgtgttctgttccggtacagcagtttctgtctcagcagctgtcgcgtcggttttggagcccgcatccagcggcagttcaccctgtgcttcgtctgcaccatcctgtccgtggccgtaatagttgccatagtaatggccataatattttccataataaggattcttattggtgttgaccttgttcaggacacatccaagaatccggcagcctaccttgtccagctgttcttttacattctgagcaaatttgtagctgatggctccgctttcgacaacgagtaccgttccatcgcagatcgcacctgcaaccgcgccgtcgatgacgctgccaaggggcggggtatctacgatgacataatcgtattgcatccgcagcacttccagcatatttttgaacgcatcgcctcccagaagctcactggggttgggcggtacaggtcctgcaaaaataatatcgaaattgttgacgttggttctgcagcatacatcgtccagttccatctgtccgctcaggtaatgggacagtccgtatttttcacggtttgctttataacggccccgcagtacggattttcgcagatctgcgtcaaccagaatcgtcttcttgccgctttctgcaagggacaggcataactggaaggaaacacttgtctttccttcgtttggcgtacagctggtcagggaaatcactttgacattttttcccgcaaagctcagattggtacgcaatgttttataggcttcttttgttctgaaatccagacgctcgatggagcgaattattacgttctgcatatttccttgtcacctcactttccgcttgtcgcctgttttttatattttttctttttcttcttgccgtccgcttcattcagcggaatcatcgcaagggtggaaattccaagatatttttccacatcctcttccgtctgaatcgtatcgttcatcaggtgggaaaggatgacgatggctgctacaatcaggataccaagcattccgcccagcgccgtgttctttctggcggaggggctcgccttatgggtcggtacgtttgcagtttctacgatattcactgtttcgatatccataacgttgcggatatgggtcgaggctgtttcacggattgcattagcaattttcatcgccgtaaccggattgctgtccgtcaccgcaatagagatcactcgggtgtccgcaggtgtgctcactgtaaccttatcgcttaactgctcataacttaacggcagattcaactgctcgattaccgcttccagtacgaaacggcttttgatcagttccgaatagtccttaaccagctgcgtgcctgcctgcaggtcgctgtaggttacatttgcgttgctactgtcctgtttgttcaggatatagatttttgttacagactgatacgtgggcgtcatcaggaatttgcttcccccaaaggccaaaagtgctgtaaacagtcccactgcaatcatcagcggaagctttctccagagtaccaaaaaaagttctaccagatcgatttcggtttcctcgttgcttctctggttttgattttccatgtctcgttcccctttttctattcgatgtcttccatatctgtattgtccagaatgtgtgctgcgtttttgtagagcagacgtgccgcatattccgggctgcagtgtctttgcagccatgaggctccttccgccatcgatacagaccgttctccctctactctgtgggcgtccgttccgatcagatctgcaagctcttcttttatcaggctgcgtgctgtgcgctttagctgtccgcccagcagtcccggaagctctcctgcgttgatctggatccggcagcccatgtcctttaattcttcgacccggttgaaatcctttaccacgttccgatagcgctcggtgtgggcgacaatcggacggtagccctcgcagagcaggtcatacaggcagttccggatgtacgcccattcttcgtccggtgaaaattctgtcagaatataatctgatccggcaagggttcccgccttgccctgttttaacagctcgatggtatccatacagcaaaaaatctcaccaccgctgtaaagtctgatgtcgattccgttttctttcgcagcctgctgcagcttctgtgtccgttccagtgcggaagcagcggtaatgctgcgtctgttcggtttctgatgcggagtcaggataactgctgcaacgccctgttttacttcctggcgcagcatcgccaggctctcttccagatttctcgcgccgtcatccacctccggtaaaatatgacagtgaatatctacgtactgatttttcttctccggcatctcaggcctcacctccggagttttttttgctgtccgaactgctttttacggtctccggtactgtctcgcattctgatgcagcctccgcctgtgctgcccgaagtccgtcggcaaacagccacagcatccgcaggcagtaatcctgtagaatctgaggcatcccgttgagtccgcgcatcagctgttcttcctgactggctgcggattttttctctttctcgccataaatcagcgtatccagactcactccatacaagcgggacaggttaatcagtgtttccacactcatgccgcaggttccccgctcgatatccgcataatatttattgacgacaccgagccgttctgccaccagctctctgctccagccgagctcaagcctccgacagcgcagccgctctccggcagcgatccggtcatatgccggcttctcctgctttctcttcatcttgtccccacctgtttctttctgttcatcttaacgtatttctactccgacaattatgttttttgtcgaaattacaaacttcttgccagctattttattataccatctaacgtcttctttgcaagcagacaacgtagccaatatttatgtcattttgattaaatttctatgaaaagtgttaaaaattgatagaaaacctcctcttgtatctcgtatttcggattctttccttttcaattggcatgtttttcctggaatcctgttcgcctgaatatactctgttttccccactattttccggcttttaccccccccccgatcaaaatttaatcatttttacattgttatatcgtatattcttgttctctatttttaatgttcgttaaaatgtgtatttttgtttgttttatagttggttttgctctttctgcagtttttttcattttattgtacagacgctttttcgtattttttagtcctgcatgacttgtttttgtccaatccgactagtacagcgtttcgtaaataactataccaatcgcgtaggatgtggattcgagtgtgcaggtataaaaacgcaggcgtagcgggctacgctgaggcttttatacctgtgcaatcggattcacaggcaagtgagtggtatagttatttcgaaaacgatgtactagtttctattttcacttttttctttccaacatgcacctgtatcgcgccgacctccgccgtggaataccagcggattccccgctcttccaggcgtttcagcgtttccggcgccggatgcccataccggttgtttttgccgcaggaaatcaggaccagctccggctgtgccaaatccagcagtgcttctcccgtcgcgttggatgcgccgtggtgcccggcgtcgaggatggtgcagcggaggggattttgcgcggagggctgggttgacggcgcggacgggagcgtctgctcctgcccagcgggatgggttgacggtacgcgcgggagtgcctgctcctgcccagcagactgggttgacgtcgcacacgggagtgcctgcccctgcgcagcgggctggagctgctccacggcgggtcgcgcctgctccaccagccagtcttcgccgctcttttccagatctccggtcagcagcatctgaaaatcaccctgtgacaggcgcagcaccagcgacgcatcgttgcgatcctccggcacttttttcgcataggggtgcagacaggagatctgcagcgcgccatcggtcatgtgctctcccgcagaaaggtattccacggagacgttcgcctcttcgatctgctgcagcagcgtttccagcacttcatccttcaacgccacatccggcagaaaaatgcgccggattttgacccggctgcttttcgaccactccaacagctcccctaccgcgctgatgtggtcttcgtcccagtgcgtgatgaaaattccttccacgcttcgcgtcccgatatatttcagccatggaataatctgatactgtccggtctttttcttcgacgtacttccggcatccaccaaatatacatgatgctcccgggtttcgattccaacgcactctccctgcccgacgtccagcatcgtgacgttcagttcgcccggcaggcggatcaggaaaatccccatcagacacacagctgctgcaagccggaggtgcggacggagttttttgcctgacacagccaaagcgatcagtccgattgtatacacggccagtgcctgccaggtcggatatccggtgtgcaggatactgcccggaagcgccgttgtaaaccggcacagcagctcatagcaggaaaaaatcgcttcgatagcggtgcaaagaaggtgctggggaagctccaggcagtgggcaagcgcagtcagacgggcgaccagctgcagtccgatcaggcatggcagcaagattcccatcaacggaatgactgccagattcagcagcaccgaccacggactccattcataaaaatgaatcagcagaaacggcagcatcgtcatggtaatgcccagaccggcaaggatatttttgcggaggagacggcaggcccgggcgattgcagtccgggcaatattccatccggcaactccatcggtgactcgcagtgaaggtgctgcgtcctcccagccatcctgcaaaaccggaatcatccatgcaatcccgagcactgccgaaaaagaaagctggaagcctgcatccagaatccgctgtggcttgggcacaagcagaagcaacgccgcaaccgcaagggaggttggcagatcgggcgtgcgctttagcagtcccgccgccaaaaacagcaaaaacatgacaagggcgcgccgggtagaaatgcccattccggtcagctgcgcgtatacaatcagaatccatgtggaaattccggcgctcaaagtaaccggaagccgtacttttttcaaaagtccgaacagtcctgcgccgatcagggacaggtgcagtccggaaattgccagtagatggctgattcctgcgccctggtataacgcttttacttcgctgtccattccttttttctgtccgagcaccatggcagatgcggtcgcaccgttcttttcccccagcagcttccggaacaatgcctccgattcatagcgcagctgtgaaagaaattcttccagccgtccatagttttttgtctgagcggtaatttttgtttttctcagcgcaaacaggcagtcttttctccgataataggctgctgtgtcgaattctccaggattcgttgcctgcaaaaatggcgacacttcaccgaaaacccgaacatagctgcctgcctttggcagcgttgtgtctttctccaaatagcacaacgtactcgcgttttttccgaatatttcctgcatttcattgatttgtgaggttgttttctgagaagaaatgagaactgacatctgatccgcatctgccgaaccggatatctgtgacaggttatcggtcgtttccgccgaatcccctgaaaaaacaaaagatgaggcatctgcctcgatagaaaggtcttt

SEQ ID NO: 303 - DNA, 19023 bp, unidentified
  source 1..19023: mol_type = unassigned DNA
ttaaaagaagcaccttctccaaaagagattgcttccatgcatatgactcatctggcaaatctgctcaaagtgaactcgcacggacactttactaaagagcaggccaaagaattaagagttctcgcacagaagtctgtcggtgccaacgacagcgctatatctattcagataactcaaaccattcaacaaatcgagttactggatagccaattagaaaagattgaagctgagatgacggatatcatgaaattcaacgattctgtcatcatgaccattcctggtatcggttatatcaatggtggaatgattcttggtgaaataggtgatattcaccgtttctccaatccaaacaagctgcttgcttttgcaggtctggatccttctgtttatcagtctggtaactttcaggctaagacaacaaggatgtccaaacgtggctctcgtgttttacgatatgcccttgtaaatgcagcttggaacgttgtcagaaacaacgcaaccttcaaggcttattatgatgccaagagggctgaaggccggtctcactacaatgcacttgggcactgtgccggcaagcttgtcagagtcatctggaagatgctcactgacgaagtagaatttaacctcgaataagaggtctgtataccaatatcgatagattttgaaaaagcaccctaagggagctctattaaagttacccttttttaccaccgatatgaaaaagaatttttttgctaatttatggttgacttttcatagctggtctccgttacttatatcactatattcgcaagctatcacgcaatccaaaacatcatctccttttcaacgctccaaccagcatttgtctgtgtttataaaaccaaattaaaatcagaattatcaacatatatcgtaatataaaattaaataccataaacccatccgtcagaagaaccacaaatcccaaaataagtacaagtgcagtgcgatttaataaaaacttgaaactgtacagctcgcttaccccgtatttgtttgcaataaaccaatggaataggaataacatcccataagaaaggaatgttgtgtatgctgcgacctgatatccaaacaggataattccaaaatagttaagcacagcatttaagccagcagcaagtatcgtgccaagtgaaataaaccctgttttcttatggtaatactctatatttacgggcaagccatacataaaaacgaaaaagttaccaaaggtcaacgggataatcaaacttatgccgccccaataattacttcccgccattatctttgtcacttctggcatcacacaaaagaagccgatcgttaacaatgcaaacaccataacataatcttttccagctcgttcaatacgctttttatctccgctatctaatgtgtaaaatacccatggtgaccatgcgttctccatagaatttcctacgatatatagaattgtacaaattgtgtaaatatagctatatattcccgcttccgagctgcccaccatatcttttatcataattcggtcgacttgcgaaagtaacgactgcgagataacgtgcggaagaagaggaagtcctatcgccagtccatatttccaatatgctttattgtaaagtgttcttccgtttctccatattaagaagcacaatgctactccgatgccaatgagtggaatcgccgagccaagtattcttccaagatatctttcattcgggaaaacgaacaaaataagaattattgataaaactgtgttgccgaggacgttgatgctcgacatgatcaaaaatgatcggtaacgaaattcagcattaagtttaacgccatatagataaagcatatacgcgccaaaactctgaaacagcaagcagtttgtcacaaaccgtgaaaaatcaagttcattacaatatattggatatgcaacattagcagcagcagtaatgaaaatgaaaatcaaaacactcaggaatacaatagaggatagatattttttaaagttctccttaaaatccaattttgcgttttttattgttccgtaaaaccccactcctaagattgcagtaaaaatctgctcgtacgcaatgtaggcattatatacaccaaaatcacttgtagataaaagccgcgtaaaaaccggaagtgtcagaaacgcgcatccctttaaagctatatttcctatcgtgtaccaaagcccagccttaacagcggactttcccatttcctctttcttaatactgtccatctgccagtctccttctattaaaacttttcgtgcttctatacggaagcattatcaagcatttatacactattgtatataacagcactgtcacactgacgttagctatacctccggaaacacaatgtgcaaactgccagacataaaaaacagcaagaaaactctccttatgtctcttgaagtacctattcagataaacgctaaacacacctaaaatgaacaatccaataaatataaatgcctcaccaaaattgatataaaactcaccaataatagttggtgtcaagccacccccggaaaaagtaatccccacctgttctttaagccataaagtaaaatccaaatccggcccaggcaacaacatcagaaagtttataaggtaggtatatccatattgaaaatccacttttccgggaaatgtattatacatataatttatgttaatattccccacatagagcgaagtaaaaaaggatgtcaatgtgctactaacacctccagacatcgttgtgcgaattgccccaagtaccgatacacctataatgcacaacagtccataaaagacgattctacccataggcattttcttttttccagcatacatcacaatcatacaaatgaatagtgtgccaacaggtgcacgaaagccagacacaatcaaagtggcagaagatactacagtcacaaaaatcatagtaaatttgcttattagtggccgtagatcttttcttgtttctatgtatatgtcaaaaagcatacagaccagtaaaattgatacctgagccgtgtatagtaaagcgccgctacccgatatggctgccactcttccattttctacatcgccaagcaaatacgatctgttttttataaaataatatagcgctgcagaccatgaaacagccaaaaggaaataaagtgttttaattctcgaaaacgaaaatcgaattttaggtttatcctccttttcatgaactggtctttttttcgcgattaaacaaatgccatttccaatcgcaaacgccagcaaaccgcccaaaattatttttgtatacccatagctatagaatcttcccatattcatcaacccaattggtcctaaggctatggagtaaagaaaatatgctgtaaaaagcactgctggagaaatcaactcaaaatcattgttcaatagcaaggcaaaagttaaacacgcaagtaacagtgtgtattcaaatatactgtcttgccctgaagctaatgcaaaaacatacacaatggcactcacggaaagaagtaataaccctatcatttttcgtctatttattcgtagcattataagtttactctcctctatctataataagatttcttgattctatagctttcgactccatcttgcttttaatactttacctggtacaatacaaacaaaagtcaacaatttatttttgctgtttctaagaagttccgtaattgtataatcagcgcacaagccatatataatgtattgaagtccgcctttgatcctatatttagggtttatatctttcttcataaattcttccgctctgtgcatacagccaacaggagattttatgttatttgctcttctatttttcgtaagtccgtctgactgataatcgccgacatatatcgcctcgttaatgtgaatcatattgtacttacgtgccattcgaatccaaacaatgtcctcaccaaggaatttttcacctgaatactcaggaaacggaaattcctttaggcaatgggtgtaaaatacctcggctttatcagccatcgtgtcatccgaattaattcttgcttctatgtacgaagcaacccattcattaggttcaaactctttaccgttgatctttccatctggaaatactctgagaaatgagtatccacacaatccgtttctatcccaaaactttccataatatcgcagcacagtttcaatcgcatttggctttaaccagtcgtccgaatcaacaataaaagtcaagtctgactctatattttttatgccttcatttagtgccgtatgcttcccgccgttttccttatagatatagcggattctaaaatcagctgatttttgaactttccttacaacctgtgccgtatcatctaagctgccatcatctacaattagccattcaaaatcttttatggactgattatccagagaggtatataatttttgtatactccctccccgattataagtaggagttagcactgtaattctcatctgatttaccctttcatttgctgagcaatatccgcatccacaatttcctcaccggtcttatgcttcagctgctctttgcttgcttcactcagaccattgttgatcacacagttcatatcgcaggtgctgcacttatccagatcctctttggtgactttcccatcacggtagtcacggcaaatcttcagctcatacatactgtacggatgtttggtgaacagagccttaaatttgtgaaccagaacccaagtcgcaggcttccagatgtacttgtgcatagcaggacttacactgccaatcatccagcagtcacggtcgcagcaacgaacctttgcacgaaccttctctgccttcgggctgttccacagttcatcccaagtctgattgttcaggttgcccataacttccttgtccttggttccattgcaaggcataacatcgccatacggatcgatgaagaaagtgtcaaaactcatatcgcaaggcagcagacgcttctggccgtagatgtagttgatcagaccatgattaaagtatgcacgaaaccacttcttcgggctgttgctgcggagcagttcattgaccagattctcgaagttcttagcaaccatcggacgatcatggatgatgttcttagcctcaacgaagtagaagctgttgtgcaaagaggcagttgcgaactccatgcccatctcatcggagatcttgtagagcggaaccaggtcaggagcgtttttgtcctgaacggtcatgccgaagccaacgtccttcatgcccatttcacgaagaatctttagtgtgccatacccctttgcatatccgtcttgaagaccacgaatctcattattggtctgctccaggccctcgatagaaatacggataccgatctgcgggaactctttacacaggtcaacgatacgatctgtgaagaaaccgttggtggaaataacgatacgatcagacttcttatacagttcacgcacgatatccttcaggtcagtacggataaacggttctccgccggtgatgttcgtgaagtacatcttcggcagttttttgatagtttcaatactaatttcttcttccggtttggaaggtgctttataacggttgcacatggagcaacgagcgttgcaacggtaagtgacgataaccgtaccattcaatttcttttcttcagacatgattaactcctattaacaatcaaagtttcaattttatttaagaaccacttggcacataccgagaacacaaccgcgccgcaaataactgcgaccgctgtgaagatatatgcaagtaagccattaccaaacagatggacaaggtgaaatttttcaagcacacgataaattaccatgtggcacaggtaaatctcgaagcagattccaccgaggaatttggcgactggattgaccagccccccctcccgattacacccgagggtatagaccaaagccgctacacagaagaacaacattgtaagcgtattgccacctactgcaaaataagcaactgtggcaatcagcagaattgctccagcgataactttggattttactgcaaattcagcaagctctttccggtaaaggaagattagacctcctgcaataaaataaattgcatcataaacgatattggttctaccggcattgaagtaacttccacacaggtagttgaacactaatgccgcggctgccactccccatgccctcttcttatttccaatcaggaagcagaaaaacggaaacagcatataaaacacaaaaatgacagccagcgtccagctcacaccgataaccgaaatattggcatttggcaacaatccttggcataaggtcaagtttgcaaaaacttcatacagcgaattcttgctcggcgaaatcacaaaatccagcgcgcagagcaatgcgaagtacgaccaaatcttgatgtatcttttgctgtaaaactcctccacgctgatcttacggtctatgattttctggtagtagccacagcacataccaaaaccgctgaccatcatgaaaagaaaaacgaggtttgtgaaattggggataagtttctcaaatacaaatcctcccaattcatattttccgtttgaaaggacgtgcatcagagcaatgccgataatggcatacgcttttaacccattgattccctcatatctatccgcttttgtactcacacccatcctccaaattactgataaactctcataattttctcgtaatactcatcaatggtatcaaagctgatgcccttgcagttttctttatactcatcgcacagttccttatcatcccagagcttccggatcttgctcttcaactcgttgccatctccgctcttaaatagctcaccagtcttaccgacctgaatcaattccgggatgccaccgatatcagcacccagcaccggtgtgccgtacatctgggattccatcacagagaacgggcagttctcataccactcagacggatagatggagaaccttgcttcccggatcagcttttccagtgcctcacctttctggaagccaacattcttgatgttgcttacacccttgatactctcttccagcggcccagtgccagcgaagataaactgcacatccggcagctccttacagaccttgatgagtgtgtcgatgcccttctcctcagagaagcggccgaagtagaggacgtaatccttcttttctgtctctttccactccaccttatcgatgaaattatgcattgccacggtcttcgtcgcaaacagcggattgctgtccatcttgctcttcatgaactcagagcagcagatcatggtatcaatgtacttgtaagtccctttccacttccagaactcggcctccatcatgccgatggcagacttcgccgtggagccgtggatgcacttgcctttcatgcagttcacgaaatggccgccgaggcacttctcacagttttggtggatgttcggattgttcagcatgtggttaggacaaaccagctggtagtcatgtgcagtgaaaacgatcttacaatcccttacagtctccttacgccacttgacgatttccaaaatgatggaaggtgtcagctggtagttaaagttgttcaggtgacatacatcgggcttgaagtcgtccagaacttttctcagctgtactcttgcttccttgctgtaaatcgtcttgattgggtaggtcagcttcgacagcttgctcccaccgtgaaaatccatatcggacgtataagcattgatccggttgccaacacagcggccttcgtgctccattccgaagtactgaacttcatgtccatgctgctccagcgcctcgcccaatttaaatatataagtttctgaaccaccattaggatatagaaatttatttatcattaaaattctcatttatttctttctcctatataatttcaatgttgcttgcacaatctcatcccaattatatttactacaaataaaatcagccgcctgctttttgtgtgcatccaccttttcagaatggtcacaggcgtcctgcaacttcgattgtagatcctttacatcagcctttttgaaaatcagagctttatcttccacaacctctgcacactccggaatatcagaaaccagacagcagttgccgtagctcattgcttctaacaggcttaacggcattccctctaagtcagatgggagtgcatacacatatgcattgctatacaactcctctaattcttgcccttgaacaaatcctgtaaatataattcgtttatcttctttagcaagttctttcatttcattttcaaattcacttgtatccgaactgccaccggcaataaccaattttttttctgtatcaacctgtttaaatgcttctattaaatatttgattcctttttccggaactaatcgtccaaggaacaaaatatattcatctttatctaatccaaatttatttttaataatctgtggttttctttctatatgattacttacgccatttggaataaacacagtttttctgccatatattttttcaaaataatcctgaacacctttactaagtacaataatttcatcagcatactttacggcattcttttcgcctttatgtatgaattttgagccgaagccagatttccatttttcgcgttgccagtcgatgccgtgaactgtgactatcacacgcttgtgaaagagctttggtaaccaacagaaaaatgcaggtccctcagcatgaatatgtaccacatcatatttgccaaaagcacagcataatgctgcaaaaaatgaagatgaaacagccgcaagacctttcttttctattgttggaactgtcttaagctttattcctttatattctttaagtcgttttgaatcatactccgaaccactcacatgatgaccacctctgttgtagcaggtcacattatgcccttgggcaaccatccttgtgcaaagttcctcaacaactatctcaactccaccttctcttgaaggaatccttttttgtccaaacattgcaatactaagcttttccttacattgctccatcatttcttaatactcccacagcagtctgccaaataattttaatatcccccttaacactccactccccaatatactgagtatccagcttcaccacttcctcaaagtccgtgatattactccttccactcacctgccacagtccggtcagtcccggcctgaatgacattcttgctctgtggtgtggctcatacttctcccactcatcaagtgtcggtggtcttgtccccaccaggctcatgtctccttttagtatattgaaaaattgtgggaattcatccaggcttgttttcctgatgaactgtccaattccggttttcttctttccgtttggcaacaccttattgcctatgattctcgggtcgaagtccatcttaaacatcattccgtcgcccactttattctgtgccgcaagctctttctttcgctcctcggcatccatatacatgctgcggaatttatacatcttgaactttctgccgttcctgccgactctctcctgcgagaagaatatcggtcccggcgatgctatgtatattgccggtcccacaaatatcattatgataagtgtgaacaggcagcccaccaatcctccgactatatccatccccctctttaccaaaagcgcactagtatttgcatagttcacgctggatgtaactactgtgtagtcgcctatcttttctatctgcttgtagccaccctgagctgtaccgttttttgctattcctgtatgcaccgctattcccatctccaggaatatatctgccatcttctcaggatattcatcctcgctgcacggtgggatgagcacctcatccacccactcgtcacacgcatagtccactatgccatcgtgatttgcaactatcggtatgttgcatatagtcttgcccttttggtctgagtccaatgatgctgctactacctttgtatagcctatacagcttttctccaccgtacgcagtgtatcacgaagcatagcatcaggtgctatgacaaacagtgattttcttgatgctccaaagccctttttcttaagaatgctcttgagcgccagtcttgctacatatgttattgtcacatagatcggaaacatgatataaaatgataatcgcgagtatatatcagccatctgcgtggtgaacagaaatagtgctgtcaccagaaaaacaagcattgcatgcttacaggtcgatataaattcatccagatatccgcgttttaggacgttcttgaatgaatctgccattatctccacaaagaaatctatcagaagaaatgctacccccagtatacggtagtccttgtccacatatgggttattaaagccgaagcgtatcacatatgaaataaaaaacgcaataacaatgcatgcgatgtctataagcataaaatctatatgctttgtccatcctctgcctttctttctgtacattctttccaaattctccttgtggtatcttttattttcctttatacctgttctaggggaggtacctttgtacccccccccgaatatttttagcctgttttgttttttgtatgttttattcggttatttgtatctttttctgtatctaatcagggtttttcaataatatattttcacattttttttattctttgtcaatgaatattaggttttctttacaattttcgacacattcgctaatcgctatggtattgtagcgcgcattattatacattattatatgccatactgcttatttttcctcaaacagcctctgcttcctctctatcatctcatcaatccttgcgatatactgccctacatccttgacattctcgcatctgtcaatgcggtgtgtgccatccggatttggtataggccagacgcgcttggtgcttgctccggctccgcacgccacgatggtctgcttttcctccataatcagtatgttgtatacgccggccttgccctttgccgcatagcccacgttttccatgttgcctgccatgcccttctgcctgtagaggtagtatggctcaagccccatctgcttgcagtaggttgcgcagaggtccatatgctcctgagtgttgaccatctgcatatcctgatagcggtccttgaagattgtaagccttgcagcgcgctttactgcgagcgagtggatggtgacattgtcaggcgccagctcctttacgagctccatcgtgtgccttacatcatcaagtgtttcctcgggaagtcccataatgaggtccatatttatgttgtcaaatcccagctcacgcgcaagcttgaagctctgtatcgtatcgtctaccgtatggtgtcttcctattatatcgagtgtctgctgcttcatggtctgtggattgacagatatacggctgatgccgtttttctttagtgccataagcttttctctcgtgatggagtccggtctgcctgcctccacggtaaattccaggcagtcctttaaatcaaagctgcatttaatttttctgataagcctgtcaagctgcgcagggcttagtgtggtcggtgtgccacctcctatgtagatggagtttagcttcttgtgatagaatttctgcgccgtgtagtctatctccttctcgagtgcgtcaaggtaatcgtccacgcgatttttccacacaccaagcgggtatgacgtaaacgagcagtacgcacaggtgctcgggcagaaaggtatgcctatgtacaggctgtagccgttgtcataatccaccctatcgagcagtgccttctcgcgctttgctatgcctattgagaggtcgattttctcatcgcttgcgaggtaggtttccttcagatagtcgtaggtttccttatcgctcatgccgtcctctatgcacttcatggctatcttggtcggtctgatacctgagagtgtgccccacggaaggctctttcctgtgcccttttctatcatggaatacagggcgagcttaaggcggtttttggtttccttgcgtcctgtgccggtcacggatatttttgtgctgatactttcgctaaccttatttgccgtccactccaccacaatctcatcacccacatagtctatcttaaatacctgtgaggcatccgcaaattcttttatgccatcgtctgtcatctcgtggtgtgtgcaggccaggttttttccctccacctcatcaggtgagcagctatagtacatctgcacatcctcctgtgggaagaactccttgagcagtgagtgtacatcatattcaaaatccggtttattaaatactactactatcataagtaagggttatacatcctctcgttttctatggttgttgtgtcgttgtggcccgggtacacctctgtatgctcaggcagtgtcatgattttttccttcactgtgcgcacgaggtctgacatgctgccgcccttgaaatccgtacgtccgattgagccgcaaaacagtgaatcgcctgtaaagatcacgtcctcatacgggaaataatagcagcaaccgcccggtgtatgccccggtgtgtgaagcactactatgtgaaagcccgcaatatcaatttcctgcttatccttcaaaaatacatctgcataaaaggtctttgactggcccatcatgtagctgacattgagctgcgggtcatcgagtgtggctttgtctgcctcatggatatatatcttaatgccgtagcggtctgcgagcggctttgcatcagtggcatggtcaaagtgtccgtgtgtgagtagtattgctactggctttgcgcctgattcgtccacttttttggcgagttgtttagcacacgcgcccgggtctattattatcatttcctttgtctttatattggtgacaaaatagcagttggtctgcaccggtcccactacgaagtggtctatcttcatatttaccatatgagtgtactccttgtctgttatatgttatgcttcacgcaagaaccaccgggatttagccggtggtcctctctacgtctattacactttctatctgtctgagcttctccacgagaacctttatctggtccctgcctctgatattgaaaaatacctcgattgtagcgatgccctgcttactggtcttggactggataccactgatattgatttccttctcggtaaatatctttgtgatatctacgagcagtcccggcctgtcatgacagaatatctttaggtctgcctgatactcggcaccgttgtccatgagggctgtatcctgccactctgcttctatgagcctgtccttttctatctttgacagattgatgatattcacgcagtctgtcctgtggatggagatgcctcggcctcttgtaacaaagcccacgatttcatctcccggaacaggattgcagcacttcgagaagtgcacagccacgtcatagagtccgtgtaccacaatgccgctctttgacttgtgctccggctgtgtgcctgctgccgcctgctgcttttctgcgatgctgccaagcacatctgcatctgtcaccggcaccacatgatccttcttgtactcgtcgtacattctgttgactatctggctctccttgagtccgccgtggccgacagttgcaaggcatgagttccagtcgtggaagccgtatttgcgacgtattttttcctgatactcaggcttgtttatctcagcaaagttgataccctttgccttggcataggctgctatcaaatccttgccgtgctgtatattctcctccttgagctcacttctgaaccactggttgatcttgttcttggcctgtgtgctctttacgaccttgagccagtcacggcttggtcccttggagttctgtgaggtgattatctctatctggtcaccgtttttgatgacatagtctatcggcaccagcttaccatttaccttggcaccgaccatcttgttgccgaccgcagagtgtatgctgtaggcaaagtctataggtgtggagccctttggcaggttctttacatcgccggacggtgtgaatgcaaatacattgtcggagaataaatttaaatcactctttaataaagtcataaactccttattatccgacatatcctgctgccactcgagtatctggcgcagccagctgagcttctcctcctctgtgacagtggtggtagtggcattaccgttgtttgcttccttatacttccagtgcgctgcgataccgtactcagctgtacgatgcatctcataggtacgtatctgtatctcaaacggctgtccgctcggacctatgagtgtcgtgtgaagcgactggtacatgttctgcttcggcatggcgatatagtccttgaaacggcccggtataggcttatacttctcatgtatgataccaagcactgcgtagcagtccggtatagtatccaccagaattctgatggcaaagaggtcatatatctggtctatcgtcttgtcctgattgaccatcttcttatatatactgaagaaatgctttgccctgccgtatatctcagccttgatgccggcatctgtaacatacttcttgacatcgtttaccaggccctggatgtaagtgtcgcgctctgcctttctgagggctaccttctctaccagatcgtagtaggcatccggatagaggtacttcatacaaaggtcctcgagctctatctttatcttgctgataccaagtcgctgcgcgataggacagtagatatcctgtgtctctctggcgatacgctgctgtgcctcctttgactggtacttgagtgtacgcatattgtgcagtctgtctgccagctttatgaggatgaccctgatatcctttgccatggcgagaaacatcttgcgcagattctcagcctgcatctcaagcctgtccgcattcttgtccttcggatccttggtgctgtctgtcaggtgcaggtgctttaacttcgtgacaccatccaccagatgtgcgacatcgtctccaaactctgcacgcatctcatccatggtcatgatggtgtcttccagcacatcatggagcagtcctgctgcaatggtttccttatccagctcgagctcggcgagtattatggcaacacaaagcggatgtatgatataaggctctcctgacttacgcgcctgacccttatgagcatcataagctaccctgtaggctttgtccacaaggctcgtgtcatccgacggatgatactttttgatttcctttttaagctcatcgtaaagctcctctgggctcgtaaaatcctttgttccccttataccgctggtatctgagcgaaatttgtccgctattttttctaattcttctgttgagtaatctgccaatagtctcacctcgattgtagtgtatctttagtagccattatattttatttctttaaaaattgcaatcttatgttgttagccgataaccatctttactccgccatacatgccggctgagttgccgagtgtggcaagctttatctctgtctcacggcttgcatggaaagcatactctttatagtactttgctgctgtatcgatgatgatgctgcctgcctttgaaaggcctccgcctacaacaaatacctcagggtccataacgcatgctactgctgccattgccttgccgagaagcttcatagactgctctactgccgcaatgcccgctgcatctcctgcctttgccgcatcgcatacatccttggctgtgaagcctgcatttaaatcaagctttgttgccacatccctgtgtgctgcaatgtatctctctgccactcttacgagaccgtttgctgatgcatactgctctaagcagcccttcttgccgcagccacagcactctgactcatcatctaccataggcatatgtcctatctctccgcctgctccgtttactccggctacgattctgccctcgcggatgattcctccgcctacgcctgtgccgagtgtgatcatgactacatcctgatgaccctttccgccaccctgccacatctcaccgagtgcagctacgttggcatcgtttccggcctttaccttgatgccgccgcacagcactgagagtgactgtgccacgttgaacacgccccagccgaggttgacacacttcaatactgttccgtcatcctttataggtcccggcactcccatgcctacgccctcgatgtcacccatctcgatgccgtgcttctcgttattttccttgatggatgctgcgatatcaggcaggatgagctcgcctgaattctctgtgcgtgtaggaatctcccatgtatcgacaagctttcctgtggtctcaaaaaagcctatctttacagttgttccacctatatctactccatatgcgtattgtttcattttttcgtcctccaaatcgttaaactatgtttatattttattgcctaattgcatatttttcaatgtttttcattgttttttatgttttttatattttttctatatatagaggcatgtatatcatcatccatatgcccgctatttgtaaatccaagctttttggcaaggcgaaccgatgcttcatttctctcatctatccggcagtaaagctcttcaaagtctgtgttttcgcgcgcgtagtctattatgaagcggcacacctccgtggcatagccttggttctgaaattccggtgctatcatataacccatttcatcgtgctcaagccctgcccgtcctatcagcttacctgtttccctggaaaatacaagccacatgccatactcgtaaaagccatacatgttctctatgtatgctttctggtattcaagctctgtctcgtagtcgtaaagcggttccacaaagtctgtcataccgggcttgtcatagagctcatagagcgcaggaaggtctgacagggacagctcacgtatcagacacctgtctgtctcgccgatgtcccacgggatgtgattataccgcctgcgcactcgctccagatactcaatatcaagctctgcaaggctctcgactgcatagcgcgtgccgcactgcggttctcctactgatgctatgccgagtgagtcagctatttgcttctgcttccggtttgagactatccagatgcagtctgcgggagctttcggtattattagatttcccgtattagctttcgcggtgttatctgcatattcttgtatcgttgtttttgtgaagtcattaattgattcagctgctaagagcgcaacatacagtttttcccgcagctcatcaggtagtttttcttgcagtttttcctgaaattcatcttgcagctcatctagcagtttcttctgcaactcatccagcaactttcccggtagtgcaccatacagtttttcttgcagctcttctgacatagatgccttgcctgccacacttctccactgcagcttgaatatctcgccatgatagtaaaaagaggcaagttttgcgcttgcctcatcgataattattatcattaaactgtctccggctccggatagtccactccgaaggtctcaactgtaactgtcttcatgacctgagcctcaagtggtttgtccatgtagtctgtgcgtacctctgcgatcttgtttaccacatccatgccctcgattaccttgccaaatgccgcatactcgccgtcgagatgtggtgcatcctgatgcatgatgaagaactggctgcctgctgaatcaggtatcatggtacgtgccattgaaagtacaccggctgtgtgctttaaatcatttttgaagccgttgtgtgtgaactcgcccttgatttcatagcccgggccgcctgtaccgtttccgtccggatctccgccctggagcatgaagcccttgattacacggtggaagcatactccgtcatagaagttgtgattgattaagctgataaagttgtttactgtgtttggtgcgatttccggataaagctccgccttgatcacatcgccgttttccattgtgattgttacgattggattctgtgccattatttttctctctttcttttataatattatgaggcttggagaatatccattcctcgcaattattaaatatcaaattaatttctacccgattgatcttacctgattttactcactcagagcctcgactaccttcggaaactccatgaagtgtgatgccttcaccagtatggtgtcgccctccttcacatatgaaagaagctcctgtgtcatagtctccctatcctcgaaatagtggatgtctacatcggatgatttctccgcggctccggctgcatattcctttgcaagctctcctgcggcaaaaagtgtatggatatgattctctccaactgcttcgcctacctcatggtgcagctttttctcatcgcttccaagctcgcccatgtctccaagcactgctattgtcctgccctttgcatgcgaaagcacctcgatagaggatttcatagatacagggtttgcattgtagcagtcatctatcactgtcatgccgtgcgttttgataaaattggtacggcctgcgattgtctctgctttctcgattcctgactttatctcagctattgtgagaccaagctgcaatccgacagctgctgccgccatggcattgtatacattgtgctcacccgggatgtggatgtgtgcatcaaactcaccctccggagtgacaaaatgagccttcatgccgtcaaagcctagattttcaatatttgtggtatatactgatttatgaacgcctgatgctgattccttgccatagtatatggcaggctttccatttaccgtctgcactgtggccagcttgtcgtcatctgcattcagcactgcgaccgcatccggcatcatatgctcaaagcactctgtctttgctttaagcacaccatccctgtcgcccaaaaactccagatggcagtagccgatgttggtgatgaccataacatccgggcaagacatagtagaaagcctgtgcatctcgccaaaatcagatatgcccatctcaagcaccgctacctgatggctttccctgattccgaaaatggtgagtggcaggcctatctcattgttgaaa

SEQ ID NO: 304 - DNA, 19741 bp, unidentified
  source 1..19741: mol_type = unassigned DNA
atgaaagtagtaattctggctggcggccttggcacgcgcatcagcgaagaaagcgtctacaagcccaagccgatgatcgaaatcggcaacatgcccatcctgtggcatatcatgaaggaatattcctactacggctttcacgattttgtcatctgcgcgggctacaagcagcacatgatcaaggagtggttcgcggattacttcctgcataccagcgatattacgtttgattttacccgcggccagaacgagatgatcgtccacaaccaccacaccgagccgtggaaggtcaccgttgtggacaccggcctcaacacgatgaccggtgggcgcatcaaacgcattcgtccctacatcggcaatgagaccttcatgatgacctacggtgacggcgtctgcgatgtggacattgccaagctggtggcattccaccgcgagaacggcaagatcgccacgctgaccgccgttcagcaggagcagcagaagggtgttctggatattgccgaggataattctgtccgttctttccgtgaaaagaaggccagcgacggcgcgcttatcaacgcgggctatatggtgctggagccgcagattttcgactatctggacggcgacgcctgcgtctttgagcagaagccgctgcagaagctggccgaggagggtcagctgatgagctatatccacaagggcttctggcagtgcatggacaccgcccgcgagaagcaggtcctggagaaaatgcttgccaccggcaacgcgccctggaagaagtgggaggattgatgatggtacattacgatcctgaattttaccgcggcaagcgggtgttcgtcaccggtcacaccggcttcaagggcagctggctctgcaagatgctgctgatggccggggccgaggtcacgggctacagcctgcagccgccgacgcagccgaaccttttctccatcgccggcgtcgagggcaagatgcacagcgtcatcggcgacatccgcgactttgacgcgctgaaggccgcttttgacgcggcgcagcccgacattgtgctgcacctggccgcgcagcccatcgtgcgcgacagctacaaggacccgcgctacacctatgagacgaacgttatgggtacggtcaacctgctggaatgtgtgcggctggcccagcagcagggcagagcgccccgctcggtgctgaacgtcaccaccgacaaggtctaccacaacaacgagtgggcctggggctaccgcgagaacgagccgctggacggtttcgacccctactccaacagcaagagctgctcggagttggcgacgcactcctacatcaacagcttttttgccgataagaccgtggccgtctcgacggcccgcgcgggcaatgtcatcggcggcggcgactttgccaatgaccgcatcatccccgactgcgtccgcgccatggccgcgggccgtaagatcggcgtgcgcaacccctactcgacccgcccgtaccagcatgtgctggagccgctggcggcctacctgctaatcgcccagcgccagtacgaggacagccgctttgcgggctactataacgtaggccccgacgactgcgactgcgtcaccaccggcacgctggtggatctgttctgccgggcctggggcggcgacgccgcctgggagaatcaggccgaggccaatgccccgcacgaggccaacttcctgaagctggactgcagcaagctgaaaacgaccttcggctggacgccgcgctggcacatggccgagtgcatggaaaagaccgtcgccttcagcaagatctggcttgccaacggcgatgtcccggcggagatggaaaaggaaattaacagcttcttggaggggcagaaatgacaaaggaacagaggagtataacaagcgcttttgtcatttcggttttggtaggtggagcctatctggtttcctggctggcgcatgtatggggtggtcagccgtggcccatcggcagcaacatggtcaactatgccgtagttctagtactgttcggcgtttcgcttttgctgttcggcaacctttttgcccgcattctgccgcaagaacgtggctttgtgcgggcttgtgacgcgcgtctgcagggtcgcggcgcggcagcggcccttgtggtatctgcgctggtgacagccgcctaccttatttattacgcgaacattggggtgtccaaggaatttgcggggccttcctattcgccgtcctccctgatggcgccgcagatggtgccgctgtattacctgcttacggtgctgttttttgtggcggcaatctatctgctgctgacgggtaaggactgcccgcagtggatggcctggggcggctacggcctttcggcagtgatgtacttcttgggcgtatggatcgtcaatacgtttgagggagacccgtaccacggtgaggcgtatttggaaagcatctacaacgtggctgacagcatcccctatgaggagttgacgacaggcatctacggccactacggactgttctttctgctgccgatgaagatcttcggtgcaaaggctgtcgttattcaattcctgatcgcgctggtcggcgttgtgacggatctggccatgctgtactgcatccatcacctgataaaaaagaactgggtacgcctgttgatggcactggttgtgccggtcattccgtttgcatacagacggacgaattactggcagctgcagcctcaccgtttggtattcccgatgttgctggcggcctatatgctgttctgtttgcgaaaaaagcagtcgaaaaaaacggctcggttctggggcggctggcttctgtgcatgctggcagtgctgtggagcaccgagagtggtctgttctgtatcatcggctggtgcgcgggctgcatcgtccgctggtggcagcaggagccatggtacgcccgcggccagtgggaacgctatggtgcgctgctgctgggcgctgtgttggcggtgctgggggccattggcctgacaaatttgtataacctggcctgcggcggagcaccgatcttcaaggtgtttttttacccgctgtacagcagcaattatatggatggttccatcggctacccgcttgagctaggcgtgcgcccatgggtgtttgtgctgctgcttatgctggccgtgctggcatggtcgctgttccagacaaccgctatcggaagaatagccaaaacggagaacattgccccatttgcggcctgcctgtcggtgctggggctggtatcgttcagctactatgcaaaccgttctgcctggatgaatctggagatctgcctgccggaggcactgctctgcctgtgcttcccgctgcaggcgctgacggacggggaggggctacgcaagaagctgggcggcctgtactgcacggcggcacagtctgtgggactggccgtgctgctggtgctctgcgtgcttacggcacagctgcccggcggcgtgatgaatacagtgatcctgcaggagcgcggtgcgttcagcacacgcggcatctatgcggaggtggagaatttctctgccaatataccggacaacacctttgcggttggccgcgatgtggggatcatctaccatgcagcaggctgggacaactacggacattatgtggatgctgcggattacggcgtggcagataccgaaaaattactccctcatattctggcagagttgaaggcccagccgagctttgtcgtggatgacatactgggggtctatctggggcagaatggctacacgcccgacatgctcggataccagctgcagacgaccttcacatcggctggcggcacgaacccaattacctattactactacgaaaagcaataaaaaaggagagcaaaacctatggcatggaagaacgaggcagaagcccgcgagcagatcaaggcgatggtcgccgagtattatcacgacttcaaggagaaaaagaccccctatcaggagggtgatcgcatcacctacgcagcccgcgtctttgacgagaaggagatgtgcgctctgaccgatgccacgctggacttctggctgacgacgggccgctttgccgaccagttcgaaaaggaatttgccaagtggatcggcgttaagttcgcccatctggtcaacagcggttcctccgccaacctgatcgccttcatggcgctgaccgcccccgagctaggtgaccgccagatcaggaagggcgacgagatcatcaccgtggcctgcggcttccccaccaccgtgaccccggccatccagtacggcgcggtgcccgtgtttgtggatgtgaccgtgccccagtacaacatcgacgtcaccaagctcgaggccgccctctcccccaagacgaaggctgtcatgatcgcccacacactgggcaatccgtttgacctgtccgccgtcaaggcgttctgtgacgcccacaacctgtggctggtcgaggacaactgcgacgcgctgggcacccagtacaccatcaacggcgagacccgctttaccggtacctggggcgacatcggcacgtccagcttctacccgccgcaccacatgacaatgggcgagggcggctgcgtttacaccaacaacccgctgctgaaccgcctgatcctctccttccgcgactggggccgcgactgcatctgcccctccggccaggataacttctgcggccaccgctttgacggtcagttcggcgagctgcccaagggctacgaccacaagtacgtctacagccactttggctataacctcaaggtcaccgatatgcaggccgccatcggctgcgagcagctgaagaagttccccaccttcatcgagcgccgccgccacaactgggaccgtctgcgcgccgcgctggaacccgccgccgacaagctgatcctgccggagccggctgccaacagccgcccgtcctggttcggcttcctgatctctgtcaagccggagagtggtctgaaccgcaacgccgtgacccgctatgtggagagccacaacgtgcagacccgtctgctgttcagcggcaacctcatcaagcacccctgctttgaccagatccgcggcaccgacgcctaccgcgtggcgggcgagctgaccaacaccgactttatcatgaacaacaccttctgggtcggcgtttaccccggcatgaccgacgagatgatcgactacatggccaagacaattatcgaggctgtgaatcagtaaaattttgacaacgaggtacagacccctatgatgcagcaaaaggtgaaaacgacccgcgcacccagactgcggttggacaaaaacaggcggctgacgcctatgcagatctactgctgggcaacggtggcctgtctggcggtgctgctgcttgccctgctggccagccgcggtacgctgctgcatcgattcttcttttatgatgtcaccgataccggtatggactttttccatagtattgagtatatgcgtggacgtatgccctacggacagttcgatacgctgtacccgccgcttgcaaatctgtttttctatgtgttgtatttgcttgtgccaaagacacaatcagctacgtggacggaatcgtatatctcgtctctcaacatgaggggaacagaacgggatttgcgtttacagcaagcgacgatgatgctgtttgtcgtctttgttatcgtggtggtcttaggaattgtatcgatgacagaacgcctgacgcgcagctgcggggggcggaaaaagctgctggcattctgtgcagtgttcagctatggggtactgtacggcttggaacgcggcaatattctgctgctgtgctggccgttaatggcattttttatcctgtaccgcaattcagaaaaaccacttttgcgggagctggcctgtctggcactggcgattgccgccggtttcaagctgtacccggcgtttctgggcgtgctgctgctgcgcgataaaaactatctggccgcggtgcgcacggtgctgtacggtgttgtctgcctgtgcttcccgctgttcttcttcaatgaaggattgtttggcctcacactgtggttccgtgtactgtttgattttagcggcagcagaggtgaaccgtggatcggcaatggtttctccaacattttggcagaggccggacatgcggtggacaagctgctgggcacgcagctgggctatggcagctacgcactgctgggcattgtgctggcagcggtgctgctggtgtgcagcttttttatggataaggagtggaaacgcattacagcaatcattctggcgatgctgatgttccagccccagtatgattatgtatggtgcctgtttttgattccgctgttcctgtttatggagcaggagcgtgagctgcgcagggacaacgtgctgccctatctggccttgatggtgccggtgctgccgctgccgctgtttcggcgggaccagatggagccgtcctttgtaccgcgcaacacgatttgtcatgtcatgctgctgctgctcattgtctggtgctttgtccaggcagtgcagggggtgcgtgtacgctgtgcggaaaaaccggtcaagccggcacacggacacccggcagccacggtgctgctggccgtttgtgtggcggtggccggtgtgggcggccagcagctgtggcagcgcacccacaactggggctttgactatggctacaacggccgactggatgccgaggacatccagcagaaggacgtgcaggacagcgacggcaacccgatagaggtaacatggagcggccgcggtgcgtatattatgatttacaaccacgcgccatttacgcaaaggatggtggtcacgttccagacaggctacggcatggatttgaagcgcgcctatacgatgacgtttgaagcaccgaatctggaagatgctgatggtacaaccggaaagcagaagcagacgaatattaagattgaccatgaggggcagaccgtgtgctacacggtagatgtggcccccggccagacccaaattgatgtgagctatgacggcccgatggcggtctatgatgcttcttcgcgcaaaaacggtaccttcacggtgacaaacctagtggtggccagtgagggcgctgtggaggaaaccgaataacggaaggaaacatatactatgcagaaattgctggccctgctgggcgcaaaaaataaagaggaatttgtggagctgttcaagcagttcgtcaagttcggcctggtgggcgtaagcaatacggctgtgtccatggcggtctactatatcttcctgtggatcagcccggacctgtatatggtcggcagcattctgggcacgattctgagcattgccaacgcctttttctggaatgataaatttgtctttaccggcaacgccaatgactggcgcagcaagctcaagcggctgggtaagacctatgtcagttacggcggcacatcgattttgtccaacgtgctgctctggatcgaagttgcattcttcagtgtcagcaagtccattgcgcccatcgttaatctgttagtgacgatcccgctgaactttgttatcaacaagctgtggacatttaaggaaaagtgagaacaagcacgatgcaattagtaatggaaaaaccacatacgaataagcgccagaacgcgcgaggctgggtattggctgcactgctttgtgtggtgattctggcctattcctcaatttatttcgccaacacgatgcccattacggaaggctggaatgtaaactatgcagagctggtattgcacgggaaatttccataccgcgatttttactattacctgccgccactgaacatcctgattgatgtgatgctctggaagctgtcgtttggcagcctgttcatttaccgtgcgtggtggctggtacagcggattgctatttatgagttgatgtttcggctgctctgccggtatttcaatagatatgccgcctttgcagcgtgtgccttctctgcgattctgtgcacggcctctgtctacgatttattcggtgattataaccagacgattccgtttttgtctgtgttgctgctctattgtgttctgggatttgcagaggcggcagataagaaagccgccgggaaatacctgtttgctgccggcgctatgctggggctgctctttctgaacaagcagacgatttttgcagctgcgggggttatttatctgctggctttgagtgtctactgctggaagaaaaaagacaaaggctttctgcaatattgtgcggcagtcatacttggctttttgctggtgttcgtcgtggccatgggaatccttgccgtcaatggcgcgttgcttccgttctttcagcaggtctttatgcacacgggaggcaaaggcagtccgcttgccattttgctgaaaatctttacgggctggacaatcaatgcgccggtatttttactgatggtggggtgtgtagctgccataacactggcgcagaaaaacgagagtcagacagcaggacggatgctcttgctgctggtcataggcggcggctatgttttggaaaggcaggctgcgaacgactttatcgaagtgctcgttggtacgaaaagcgtccaagccgttgtcatcggtggagggttgctactgttgctggcgtacagccaaaagcgcagaagcggcagcaagataatgcacgatgtattttacggtctgtgtgccgcctatgtggtgactattctggttacggcccgttatgcgtcattaggcgaagataacgggagcttattggaagcaatctatgaatcaggcacgctgtttaagagtgtgactggtacgctgtatacgatcatcagctttttggatctatatctgattgcccgctcccttatgaaaataaaagcggatggcaatgacggctatgcacgtgagcacttttggatggcctgtgcggcattttctacgatatatgcagccagtatggcatcggcatcagaaatttcctaccatgggattatgttggctatgccgtttgttctgtgtgttgggctgaacagcgtatttacagataaagttacggaaaaatcggtcaaaatcggtacgattgcgctgtgcacagtactttcgatggcttgtattgcacagaaggtcgtatgttcctattcttggtggggctgtgaacaggcagagtatgacaaaaaaatctacgccaccggcatccccgcgctgcgaggcttccgtttttctgcggaggacgacaagatgttgaaagacatcacacagctgattcttgaaaacacaacagaagatacaacgatttttggctatccctatgtaaagctctttaatattctgacaaaccgctatacaatggatacgtttgttccggttctgttctatgacgtggtagacgaccagtacgttttgcaggaggacgagctgctacaggaaaatctgcctgacattgtaatctggaaggatgatgttccaaactgcaagaaggttcacgaagaaagttaccgcaatggtgagaaattgaagcagcgcgagctggaaaagaattttggacgactgctgggcacacgctacaccctgttgggcgtgtatggtgaggaaagaaccggtaagatcaaggtgtacaagctggcagacgagacagactggggtagcttcaccttggaaggaaagggaaccgaggaagagccgtatctgattcagtcggcggaggatttgcaggcgttcagcaattatgtcaaccgcggcatgagctttgcagatcagtatgttgaacagaccgctgacattgatatggacggtaaaaaatttacgcccattggtgcattcagcggggaaagctatttttacggcacctacaatggcaagggacatattatccgcaatctgagcattcagggcaaggctacagaggatgtcggtctgtttggacgtctcgaaggggctgtttacaatctggggcttgaagcgggcagcctgactggcgactgtgttggagcaattgccagctatgcagtcaacccggaggcagagattatgaactgctttacggatgtgaatgtcacgagctcgcgcgctggtggcattaccgataacttcgctggtagtgttgtaaactgtgttagtgccggtgcgctgactggtggcgaaaacgcggatgcaatcgcctataatagctcaattatggtagagaatgtttatcagctgacgggtcaaaagacaagcctgcttgatagacccgctattcaagaaaagcgtgtcagctatgccgacgaagatgttttcaacagtgatttcctggtgaagcgtctgaatgccgcagtaagagaaaagaataaagcaaacagcgagagcggcgcagaagaagcgattacgcttgtcgaatggacaaagggaacggacggccacccggtattggttcctgaaaattgactgaatggaaaaggagcaacccaatgaaacagcgtttagcggattatgtggcggactttctggcggcgcgcggcgtgacggatgttttctccgtcgtgggcggcggcgctatgcacctgaatgatgcgctgggccataacccccggctgcatgtgacctacaaccaccatgagcaggcctgcgccattgcggcggaagcctacgcccggctggaaaataagatcgcggcggtctgcgtgaccaccggccccggcggcaccaacgcgctgaccggcgtcgtgggcggctggctggactccatccccatgttcatcgtctccggccaggtgcgctatgacaccacggcccggtacgccttgcagtacaccggcacgccgctgcgcgccatgggcgaccaggagtacgacatcaccaagtccgtccagtacatgacgaagttcgccgccatgctggaggaccccaaggacattcgctacctgctggaaaaggcgtggcatctggctacaacgggccgccccggcccggtctggctggacatcccggtcaacttccagggcggctacatcgagactgacgagctgcgcggctacgaccccgccgaggatgacgcccagctgcccccgccggtggacgacaccacgatccggacgattctggaaaaaatcaagaacgccaaacggccagtgttccacgcgggctatggcatccgcctgtccggcgggtatgcggcgttccgctccgtggcggaaaagctcaacatccccatcgtcacctactggaacgccgtggacctcatcgaggatgacaatccgctgtactgcggacgcgccggcaacatgggtgaccgcccgggcaactgggctattcaaaacgcagacttgattctggccgtaggtacgcgcatttctatccgccaggtcggctacaactggaagacctgggcccgcgcggcagaggtcatcatggtggacattgaccaggccgagctgaaaaagccgaccctgcacgtcgaaatgccagtctgggccgacgcgaaggactttttgaccaagctggataaggtcgccgaggcccccgtgaacgcgggcggcgagtggctggccacctgccagcgctggaaacgtgactaccccgccgtgttgccccgccagtgggaggaaaacggcgagaccgccaacgtctacgcctttgtgcgctatttaagcagtcgcctgccggagaacagcctgaccgcggtctccaacggtgcgtgctgtgtcgtcggtaaccaggcgtatgtcatccagaagggcagccggatggcaaacaacagtgccattgccagcatgggctacggtctgcccgcagccattggcacctgcatcggcggcggacgccgccagacgatctgcctcgagggcgacggctccatcatgatgaacctgcaggaactgcagaccattctgacgaacaagctgcctatcaaaatcttcctcatcaacaacaacggttaccactctatccgcctgacgcagaacaaccttttcaaggagcactgcaaggtcggcatcggccccgagagcggcgacctgtccttcccggagtttgaaaagctcgcaaaggcgtttggctacccctactacagcgcccacagcaacgccgagatgaagcaggccgtggacacggtgctggcactggacggcccggctttctgcgagattttcaccgacacgaaacaggtctgggagcccaagagcagcaccaagcgcctgcccgacggcacgctggtcagccccccgttggaggacttggcccccttcctgccgcgtgaggagctggaaaagcagatgttcatcccgctgatgccggaagtgtaaggaagtgcgtgattcaaaaatggcaagcattcaaagacaaatccacaccgccatcatcaccggtcctacgggggcaatcgggatggcgctgtgtgcaaagctgctggcggagggtgtgacggtctacgcggtcacccacccgggcagtgcgcgggcggcgctgctgccgcaggacgcgcggctgcatgtggtgccctgtgatgcggcggagctggccgcgctgccggagctgatcccggaaaaggccgatgcgttcttccactttgcgtgggcgcacacgatcggcccgggccgcaacgacatgccggcgcagatcgagaacatccgctacaccattgcggcctgccgcgccgcggcgcagctgggctgccaggtctttatcggggctggcagccaggccgagtatggccgcgtggagggtgtgctgaccgcgcagaccccctgcttcccggagaacggctacggcatggccaagctgtgcgccggccagatgagccgcgtcgagtgccagaggctgggcgtggcccacatctggacgcgcattttgagcgtctacggcccgcacgacggtccggccacgatgatcagcggaaccatccgtaagctgctgcacggcgagaaacccgctctgaccgcgggcatccagcagtgggactacctgtacgccgccgacgcggcagctgcgttctacgcgctggccgtcagcggacaggacggcagggtctacccgctgggcagcggcacggcccgcccgctgaaggactacatcgaggcgctgcgcgacgccatcgacccggtgctgccgctgggcttgggggaggtcccctacggcccgctgcaggtcatgcacctgcaggcggacacgtcggccttacaggaggacaccggctggcggcccgcgaccccgtttgaagaaggaatccgcgaaaccattgagtgggtaaggaaagagacaaaatgagtgagaaaaagacgatttcggtaatgatcccctgctacaacgaggagcagaatgcccgccccatctatgaggctgtgcgcgatgagctggtcaagagctgcccgaactacgactatgagattttgttcatcgacaataagagcgaggacggcacccgtgccatcatccggcagatctgcgccgaggacaagcacgtcaaggccatcttcaacgtcaagaacttcggccagttcaacagcccgtactacggcatgatccacacctccggcgattgcacgatcacgatgtgcgccgacttccaggaccctgtggagatgatccccaggtttgtggccgagtgggaaaagggctacaaaatcgtcattggccgcaagacccagagcaaggaaaacccggtcatgtactggctgcgcggctgctactacaagctcatcaagaagatgagcagctgcgagcagatcgagcagttcaccggctttggcctgtacgacaagagctttatccagacgctgcgcaacctgaaggacccgacgcccttcatccgcggcattgtggccgagctgggccccgagcgcaaggaaatcgagtacacccagccccagcgccgcgcgggcaagacccacaacaactggtacagcctgtacgacgccgctatgctgagctttaccagctacaccaaggccggtatgcgcattgcaacgttcgcgggcttcctggtggcggggctgagctttctggtcggcctgttctatctgattgctaagctgctgttctggcagagcttccgcgccgggtacgcgccgacgatgatcgccatcttctttatgggcggtattcagctggcgttcctgggctttttgggtgagtacgtcatggctatgaacactcgcatcatgaaccgcccgctcgttgtggaggaagaacgcctcaactttgggccggacgaccagtgaccggcatgaagcaggagtttggttatttcctgaaaaacgcgaaattccgcgcggcgctggggctgaccctgctgctcagctacggctatgccatcgccacgacacgggtcagcattgactcgctggaaggggaccgctacatcggcacgggcggcgttatgctgtccaccggacggttcggcatgaacctctgggccgcggtgctgggctacggcagggccgagccgagttatgcctttggcattgacctgctggcggcgctgctgctggcgctggcggcggtgagcttctgtgcgctgctgcgcaaggccgcacaggatcgcatcagcatgttcggctatggactgtttgcctgcctgtttgtctcctacccgctgatgaatgaaatttgggagtacagcggcgcgaatgtctgcgtctgcggcggctatttgctggatgccgctgcgctgaatctgctgtgggacgcgcgccagcccggcgtgccgtggcgcggcagggctctgcgcatgggcgcggcggcgctctgcctgatggtggtctgctcgtcctatgagtcactggcggcggtgtttgtgctggctgtctttgcgcttttaacgctggagcagctgttggccgccgagcgcccgcggcttgcggcggtcctgaccgagggactgtggtacgcggcggcgctggtcggcgggctctgcctgcgcgtgctggtgacgtcgggcatccatcttgtgctgccgcaggctgcggccaacggcgccaccgaaattttgtgggcgttctacccatttgtctatcttgcaaagctgcttgtcaagagcattctgattaactacgcactgcgcggctgcttctacctgcccattgctgaattggcggtggcggcgcttgtatttatcgtactggttatcgcgcttgctgtgcgcaaaaagcggcctttgctgctgctcaccggtgcgggaatcctgctctcactggtgctgctgtcgtttgtgcaggggaagtgctcgccctaccgcacctgtcaggtgtttgcgctgtttgtggcgctggcggggctggccgtgtatgagctgctgcgccgcgctgcggcccggcgggctgtgctgctgggcagcgtgcagctgctggcggtgctgctctgtctgcaccaggccatgtacctgaaccatctgctggccgtcgattaccagcgttccgagcaggaggccgctgtggtgcgcactctgggcaccgagcttgtgcgcgactacggcaccgacaagcccgtggtgctggtgggccgttacacgctgggggagaatatcacccggtacacgacggctgacccgatgcagcacccgctgtaccgctttttccgtgagcacacgagctgggagagcggcgacaccgtcaagtacgtcgagaccaactgcaactcggtgctggactggtcggtcacggccttctccgaggtggacgacgtctacggccaggcagcggagcacctgttccgctactatggctttgctttggacatgacccacagcgctgccctgcatgagcaggcgcagacctacgccgacgcccacgacctgccgggatacccccgggcgggggcgattgtcgattgcggggactatgtgctggtaaatctgcaataagaataccgcggaaaagtttgcgcttctccgcggtttttgctttctttctgtattttgccgatgttttcagccggtcacagtctcaaagggcttcgtcaggtgcccgttcctgtcggcctcgcaggcgcggcgggcctacttcaaaaactccaccaaaaacgccactgtcgtctcccgcagcgctttgtccagcgcggcggcggtggcggcgtcctcggatagatagttgtggttcccttcggcaaacggctccagcacgaccctgccgtcgggcaggctctcgacggcggcgatcgtctcggcctgggtcgtgtcgctcaaaatgccctcatggccggtgtaggtcaaaagcgtcggcagggcgctctcccgcagggcggcgttcgggtcggaatcgcgcatctcggtgaacagcgttccgctgacatcgacgccccaggtgctgatgctgccgctcgcctcggcctcagcggccagcgcttccacggcggaaaagtcgtcgatgttcaaaaactccatgccgcgcaggcccgcgccgttggcggggctccacagcgccagcgccgtgatgccgcccctgcgctgcgggtagaggctggccagccgtccgcccatgctatggcccaccagcgcggtgcggcctgtgccgtaggtctgctgcatgtaggtgatggcgctctcgacgtcgtcggtcatgttggacagcgtgtaggccgtgaacggctcggtgctgttgccgcagccgggaaaatccagccgcaccgtcgcaatgccctgggcggccagatcggccggtaaagccgtggcagagcacgacgagcggcagctccgccccgcgggccagcttgccgggcagctgtaccgtggcgtaaatgtccccgcgcgtgccgggtatggtgacgtcctgcgctttcggtgcgggcgtcagcagaaaaagcgatgccgccacgcagagcgccagcgcggcaatgcagcctgcaagggtataaaaagcgcgtttatgcgtttgtttgtgcatagaattacctccgtaatgcctctattaaagcctatgcggggcaaaaagtcaagacgcacagaatacacacaaaaaaacaggtgacaaacccggggcggatgtggtatactaaagattacaaattggttaaaaagtcagacccggggcgcaggcgcagccttgccccggcttttgtcctgttttaccggaggtgcttgactacgaattctatagcgaaccgtatgccccgcctgctggcgatgctgtttgtgctgctggggctgttctgcgcggcggcactgcccgcccatgcggaggactacgacacggtgctgaaccgcctgtcccgcctgcaggcgctggcgcgggagtactcggccggtcaggccgacacgcccgacccgatcgagctgacgctggcctacacccgcacgggggagtacaactccacgatctggcagctgaccgccggtgtgcgcgacgccgggtttgagagctgcgtcaacagcagcgaccccgagctggcgtcgctgcagaatatgaacaccgtcgtcctgcccaacggagagagcatcgactttgggcacctgctggcgtcgatgaaccttgtctacaacggcatacccatcacgggcagctggggcggcgactgtgaggagctggccaggcagtattacggccaggccggcgatgccgcgggctacgcagaggcgatgcgcgcttcctttaatatagacgatgacggcacgctgagccgcttcagcaacggggacctgcgggcggacctcgactctgtcgtcgtcggctccaaggtaacaaaggacaccgacctggccgaggcgctgcgcagctactacgcaaatctgaccgagtatgaccgcgtcaaggagttcatctcgctgagcttcggcacggtggatacctcgagcaaggcctttgcggacgccgtgtacagcgctctgctggaggattccggtatgcagctgctgttctacatgaacggtatgtggaccgtcaagggctggcagatcaaggacgactacgcccccgccgtgcgcggcgcaacggacctgtttgccgagtacctggccaacgcggtcaaccacgagaagatcaagagcgagacgaatgaccgtctggttgccatgggcgggcaggcactggccgacgcgctggaggcgttgggcgacaccgacgccgcccaggccgcactgaccgccgccgaggagatggccaataacgcccaatcgacggtttcctccggttcggatgtggtctccgccgcgcgggagaatttgcagacaaactttaacgtgaaggtcttccagctgattttgctgattgcggcagggctggcagcgttcatgctggtgttcagcatggtgatgtttgtggtgcaccgaaaagaaaattgagtgtggactgcgtgccgctctcttgtgggaaagagagcggcacgctttttttggttgggcgcggggcaggcggggagaccgctttttctgttcacaccccgttcacattccgtatattcaccccgagttatccacggcgtataacggttatccaccgtggaaatgttgaaaactccgtggaaagcgtggaaaactctgccgcccggacccgttcaaaagcggaaaaccgggaaaatctacgtagaaaaaacgtttattttccacattttccacagcggcgctgttgaaaaccgtggaaagccggggaaaacgcgaattgcgctttttgcaacacaaaatacacattttgtaaataagggcttgcactcgccgcgcgacagcgctataataaacctaatcatcacccgcactgctgtgcggcggtgcgcttgaatataaaagggagagtgcgaaattatgttggacattaaaatcaccaaaacgacccatccgaaggaaaagccgcaggacgagtcgaagctcggcttcggcaagaagttcagcgaccacatgttcctgatggactataccgcgggcgagggctggcatgacgcccgcatcgtcccctatggcccgtgggagatggacccggctaccaccgtgttccactacgcacaggaaatttttgagggcatgaaggcctaccgcaccgcagacggcaagatccagctgttccgccccgactgcaacgcgaaccgttttaacgattccgcggaccgtctcggcatgccccccatcccgccggaggacttcgtgcaggctgtcaaggcgctggtcgatgtggaccgcgactgggtgccccactccgacggtgcgtccctgtacatccgcccgttctgcatcgctaccgatgtgggcctgggcgttcatgccgccaagcattaccgctttgccatcatctgcgcgccctccggtgcctactacgctgagggtctcgaccccgtccgcatctatgttgaggatgagtacatccgcgccgccccgggcctgaccggctttacgaagtgcggcggcaactacgccgcgtccatcaaggccggcgagctggccgaggagcgcggcttctcccaggtgctgtggctggacggcgttgagaagaagtacgtcgaggaagtcggctccatgaacatcatgttcaagatcgacggcgagatctacactgccccctgcgtgggcaccgttctgcccggcgttacccgccgctccatcatcgagctgctgaagggctggggctacaaggtgcatgaggagcgtgtcgccattgccgacatcatgaaggctgccgacgagggcaagctggaggaagtctttggcaccggcacggctgccgttgtctcccccgtcaaggagctggattgggagggcaaggttgcccacatcagcggcggccacatcggcgagctgacccagaagctgtatgacacgctgaccggcatccagtggggcaagctgcccgacaccaagggctggatcgttcctgtggaataa

SEQ ID NO: 305 - DNA, 7198 bp, unidentified
  source 1..7198: mol_type = unassigned DNA
tcaccgcttttgcgccgtaacgcaaagccagccctttttatttttgtggctttggatctgacaaaatcctgctttttccagatactttttcagtgcagtatccgtatagatggtcatgccatcgatgatctgcgtccatttgtcgtcttttgtcgtttcgccgtttgcttcgttacagatgaaaaagattccgccgggcttcagcacccgataaatctctctgaaattctgcgcaagttccggccagaagtagaccgtttcaaaggcggtcaccacatcaaactgctccgcttcaaacggcagttctgccacacttgccttttgcacggtacaccgtcctgccgcaatggcaccagcattgacctttcgcgctttttccacgctgacggctgagtagtcgatgccctgcaccttgccgttggggcacagtttcaacagcgttttaatgttcgctccaccgccgcagccgcagtccagcaccatggcatccggggcaggctgtaaaaagcgcagcccccattctgccattgcgctgtgtccaaagttcatcatagcaaccatgatcttcccgccaaagcctacgggctttcgggtgttttcaaaaaaggacataacgccaccctctttctatttaccgttcacaatgcaatgctttttaccagatgcgcccactgcaccggatgacaggccagcaattcctcgtgctgcaagttaggtaaagctaacttgcagtcttataaaaagccgcttctcagcggtccttctgccaaaataatacgccctgctgttgcctctgtcaagaagtttaggcattttcggagattccgaaaaagatttcgccttcgagggctccatccgtcaccccagtgccacatccagcaccatcatcacgctgaagcccaccgcaaaaaataccgtgccaacgttggagtgctgcccctgcgacatttccgggatcagttcctccaccaccacatacagcatggctccggcggcaaagctgagcagatagggcaacgcgggcaccacgatgcctgccgccagaatcgtcagcactgccccgatgggttctacgatgccggacagcacgccaccccagaatgcccggccttttttcattccttccgcccgcagtggcatggagatgatggcaccctccgggaagttctggatagcaatgccaagggaaagtgccagcgccccggcggcggtgatctgagccgttccggcaaggtaaccggcatagaccacgcccaccgccatgccctccgggatgttgtgcagcgtcaccgccagaaccatcatggtggtgcgctggagctggctttttggcccttcggcctgcaaactgttctggtgcagatgcgggatgagatggtccagcagcagcaaaaacaggatacccagccagaaacccaccgccgccgggaaaaacgccagcctgcccagatctgcggcctgctccatagccgggatcagcaagctccataccgatgccgccaccatcactccggcggcaaagccggtgagggcgcgctggatgccgtcacacagagagtttttcaaaaagaacacacagcccgccccaagacttgtgcccagaaaggggatcaaaatcccccagaatgcgtcttgtatcatgtagtacctccttgtggttaaatgaaactaaccgtgcaaacagtatactgcgctccggcaaaaaggtcaagggctttgcggtatagaggatgcagatcgtttcctgcaccaaaaaatttacctctgcaaacttgccggtttctacttgacaacgcccggtgggagtgctatttttactttgtaaatttgttttgcctaaccatctgaggggctttacccctgcatttttttgcatcgattgttaggctaagctaactgttttttcaaaactgagatagaggtgtgttaccatgagattgaaaaaagtatttgcaggtgcacttgcggccgctatgctggtatgcgctgtggcagtcccggccttcgctgcggaagaggtggaacaggaaaactgcctgacctccagctatgtccagatgaacatcccctacgccgacttctacaaggctgccggtgtggacaacgcatctgagatcgacgctgtgaccagcgccaccaagaacaagacccgtgcaggcaaccttgccggcggttcctaccacgtcaacgcagatggcaccgacatcaccggcgtttccttcccggtcaaggtgctgaccccgtgggcgctgaagaacgcaaagcaggtcaccgatgccgacagctacgacattaccgttaccctgaagggcaaggaatccaccaccacctacaccggcgcagatgccttgtttgagaacgagagctacgcttactacaagctcagtgagacacctgcctactacattaccgcatggtataacctgctgagcggcaagtgggagtttggcaaggtccacgccaccgagaccaccgtagagggcaccactgtgaagctgaataccaacggtcaccacaccacctacgagatgaagctctccggttttgatctggactacaaggccaacaaggtctacggcgtagttctgaccaccgccgatggcagtgagtacggcctgcatcatgtgaccaacatctggcatggtaccaagctgggcttcaatgccgatgatccttactttgcatccatcatcggcaagacgattactcagatcaccttctacgccgccgacggcgtgtatgtcctgccggtcaatgtggcgctgtgaatacacgggaaactgcctaatttattgtaaaatataacacaaaagggcaaggtctcctgcatgcaggcggctttgcccttttttattgcagatggagcccaatcgcatggtcaacagtttttacgtctgcaatacggaatcaatattgccggcattactctgcaaatcacaaaaggatccatccaacagcgttttggcgatgctggcaggctccacgcccaatgcatggctgcctctgccacggtggccgaggactcgttcagcacaatgacatggtctcccagacctttttcttccagatctgcttttgctttttcaaaggacattttcccacttctccgctcttattcggtaatggcccagacccgtgcaggcaggccggttgcaccttcaatgcggggataagaaacaatgaccaccgcgccggcaggctgtactttatccagatttgcaagcacttccacctgcagcttgtcgttgtccagaacatagcgctcgcaggcaagatcacccttttcctccgccaccgcagaggaatcggtatccagcgtttcgtggccgttggcggcggcgttgcgcaccttgtagatatactccaatgcttccagcgaccagccgggggcattttctttgccctctgcatcgatgccggacagcgcatccatatccggccacttcttgtaccagtcgctgcgcagagccaccagcgcaccatccgggatggggccgtactttgcttcataggccttgatgtcctccaccgtcacagcgtagcgggggtctttcttggcctgctcagagatatcaatgaccaccagcgggaaaatcaggtcattcacatcgtacttttcggacagtgctttgcccttgatgaagtgacccgggaagtcgatatgggtaccaaactgtccggggaatttgaaggtctggatcaggcattccagttccggcttgccccagtcccacacggtctttgccagctccacagagccttccgggataccggaccagtaggggctttcgttgttcagcgagtgagaaagttccacccagcgatattttttagcgtctttcagtgcgttccacagtttataatcagccattgtcggttctccttttattgtgacgatgtatattcgggtgcttctcccagacaacggcatcttcctgttttttctcagtctgtctgccgggaatttgtctgggagcagcgcattcgcccgggcagcctgtgccgggcatctgctgtatgtttcatctgcctgtgctcccttccttgtgttggggatagtataaacccattttcgcaccatgtcaataggtttattctttcaaagacaaatctgccttctcgtcagccggatgcccactgccggagcccccttaattcatacgtcctgcttcttttccagtgcttcaaagtgataccggggcttccctttgctctttttgccgtactcgatggcttctttcgggcaatagcagatgcacgccatgcagtgggtgcagtttttgccccagaccggtttgccgttttccagacggatgttgttcagcgggcacagctccacgcacttaccgcagccaatgcaggcatccgttgcccggaaggcgtccgcttttacaaaaaagcgatagaacaccggatttaccggaccgctcataaagcggtcgtagaggttctctctcggtggaggaaattcctgtccggctttgagccgggtcagcaccttctgaagtgcaggctctgcctgttccacgatgctccgtgcctgctccttctggggtgcattaaacatggcaatgtagttttccggcatgatgatctgggctgtgcccatgtactgcagccgcttttgcgccgcaagctgccggttatagcctgccgcattgccaatttcgctgccgcaatccatcacaaaccagatgcgctgtgccccggtcagtgcggtcttgcccagccactccgacaccacccgggggatgcgccatgcgtaggtaggcgtcaccagcaccacatcccgtccggtctgcaccgtggcggtattccctgccttgatgcaggcgttcaggtcgtaaagcggcatctccaacccttcggcaatgcgccgcgccagataccggctgttgccggttcccgtaaaataaagtaccatggctgctccttcgttttttgtgtggttttcagttgcctgtctgcccggcaaactggaatttgacactttgtatttattgagaatactcttgataccattttgcaaagcgtgatttattgaaaataatgaatttatatagttctccatttttcatattaactgttgcaattggaaagactatccacttccaagagatttcttttatttcctgcatcggcaaaactaaatttctgtattttttgccaactgtaagcttgtttgtcttgtaagtaagcgactgactgtcgaggtacagacctcctccaactatgccattgtgacacaaactgcaaacaaaagatttcatagaaacatccctccattaaattccaagttgtcgttcttagtgtcccatggtttccgcacacaaaaagccccctgcgcaaggtgcgtgcttacacctcgcccgcaaacttcatgccccagctcatgcgggtgtcgtacatcaggcgggtcagggcaaggctgtcctgcggggtgtagcggtcgctgccggtacgcccctgcttcacgcagcggcttgcttcccggatctcatactcaaagccgttgatatccaccgggcagcggatgacctccggctctttgccctccacttccagcgtcatggtctcagcgtgctggaaatccggcagaaagatgctgcccttggtgccaaggatgcgggcattgcgctccagctcctgcccgatggtctggaccgactccgccttgcagccgccggggtaggtcagcgcaaggcggctgtaatcgtcggtgccgtactcgttgatgtgcacctctttggtttccaccttctccgggtcctgcccggtgagaatgcgcagaaagcccagattgtagataccgatatccagcagcgcaccgccgcccagaccggaatcaaacttgcggtccttccgggcaccggaggcaacaaagccgtactgacaggtgatctgcttcagttccccgatggtgccagccgcaaggatctcgcgcaggcggtcgtacagcggcagcagccaaatccagaacgcctccatgagaaagaggtgcttttcctctgccagacggtacagctgctgcgcctgctccgggctgatggtaaagggcttttcgcacaaaacgtgcttgccctgctccagacagagcttgcagttttcgtaatgcagggtgttgggggtggcaacgtagatagcctccacctccgggtcggcggcaagggcttcgtaggagtcatagcagcggggaatgccgtactgctgcgcaaacgcctgtgcgctttccatgtgccgtgaccccacggcaacaagctgctctccttctgcgcccatctgttccaccgtagacgcaaactttttggcaatggtgccggtcgctaaaattccccacttcataacggtacctcccggtttattactttggattcgttgcgttcagtataccatggttttcccttgcggaaaagatagtgaaaagcaaaaatgcccccggagggcttattccaactctccggggacagattctatgcaccggtatctttcatcttgttccaaacattctcatccattataatagagatagaaagaaggtgccaacatgaaacatcgcattgtgacggctgcgcagatgaaggaaattgaacaagccggggatgcccacggtctgccctacccgcaaatgatggaaaacgccgggctggcggcttacgctgaactgcaaaagcagttcccgcatcccggcaggctgctggtggtctgcggaaagggcaacaacggcggcgatgggttcgtgatcgcccgtgccgctgcaaaagacggctggaatgtgaccgttcttctggccgagggcgagccgaaaacttctgacgctatccgcaattttgagcgtctgcactccctgccggtgcacatctgcactgacggttctgtactggaaacccagagctttgctgccgttgtggatgccctctacggcaccggattccatggtgaactgcggccttccggccttgctacctgcggactgatacgccatctgcacaagggcggtgcctttgtgctggccgtggacctgcccagcggcatcaatacggacaccggcgaggttgccgacggtgctgcccatgcagatttgaccgtaaccttcgacagctataaaccgctgcatatcgcaaaaatctctgcgccgctgtgcggaaagatcgtctgtgccgacattggcattcgggacgaatggcacccggagttttga

SEQ ID NO: 306 - DNA, 5387 bp, unidentified
  source 1..5387: mol_type = unassigned DNA
ttagttcacaccaagatacttggcaacgaccatacgctggacttcggaagtgccctcgtagatctcggtgatcttggcatcgcgcatcatgcgctcaacgggatactcacgggtgtagccatagccgccgaagagctgaacagcgcggcgggtgacgtcggaagcggtctcggccgcgaagagcttggccatggcagcgtccatggagtaatcctcgtgattctgcttcttcatagcggcagcgtaaacgaggtactgggcagcctgagtgcgggtgtgcatgtcggccagctggaactgggtgttctggaactggctcaggcggcgaccaaactggatacgctccttggtgtacttgacagcctcgttgatggcgccttcggcaagaccgagagcctgggaggcgataccgatacggccgccgtcgagggtcttcatggcgatcttgaagccttcgccttccttaccgagcaggttctccttggggacgacgcagtcttcgaagacgaggtcgcaggtagagctgccgcggatacccatcttcttctcgtgcttaccggtggagaagccggggaagtccttctcaacgatgaaggcggtgataccgtggttgcccttgctcttgtcggtcatggcgaacacgacgaaagtggaggcaacgttaccgttggtgatgaagcacttgctgccgttgaggacgtagtcgccgttctcgttcttgacagcggtggtctgctggccggaggcgtcggtaccggcgccgggctcggtcagaccgaacgcgccgatcttgcggccggacagaaggtcaggcagatacttcatcttctgctcctcggtgccgttctcgaaaatgggagcgcagcagagggaggtgtgggcggaaacgataacagcggtggtgccgcaaaccttagcgagctcctccacgcacatggcataactgagaacatcgccgccggcgccgccgtactgcttcgggaagtaaatacccatcatgccgagcttggccatcttttcgacggtctccatggggaagcgctcttcctcatcgagttcctcagctaaaggcttgacttcattttctgcaaattcgcgatacattttgcggaccagcagatgttctttggacagatggaaatccatagtcttttgctccttcactataaaaataattggattgtctaatttttcacaaatcagttccgtgactctcattatatcctgtgcgtttcattttcgcaaggggaactatcattcctttttggaattcgtgcttttcgccgaattcattaaagtctttttgacatttccgttccttttatgacagttttctgtcattttcaggaatcctttccattccaaaagagaaaaagggaggcagtttttgtaaactgcctctcctttttatccttttagggacggattacttcttgctgtaatcgtagaagcccttgccggacttcttgccgagctggccgccgcggaccatcttcttgagcagcagagcgggacgatacttcggatcgccggtctcgctgtagaggacgttcataatggcgaggcacacgtcaaggccgatgaagtcgcccagggcgagggggcccatggggtggttcgcaccgagcatcatggccttgtcgatatcctcgacagaggcaacgccggtctcgaccaggccgatggcctcgttgatcatcgggatcaggatcttgttgacgacgaagcccggagcctcagcgacctcgacaggctccttgccgatctccttggagaggttgtagatgaagtcgaaggtctcctgcgtggtgttggcgccgcggatgacctcaacgagcttcatgctgggcacggggttgaagaagtgcatgccgatgacggcgtgcttgaggccgagacccatctcggtgacagacagagaagaggtgttggtcgcgaagacggcgctctccttgcacatctcgtcgagctcgccgaggagctgacgcttggtgtccatgttctccgccacgcactcgatgacgaggtcggcgtccgccgcggcagacttctcctcgacgaggatgttgttcaggatggcgtccttggcctcttcggtcatcttgcccttctcgacgcgcttctgcagggaagcggcgagcttatccttgtggcgctgagcggaagcgacgctggaagcgtacatcagagcggtgtggcccttggccgcgaagacctgagcgatgccgctgcccatggtgccggcgccgaaaactgcaactttcattgtgtgtatcctcctacaatataaatagataattctatggaatcacttgttgataaagggctcgtgcttgcgcttttcgaggaaggcgcccatgccctcctgctggtcggcgctctggaagcaggagccgaaggccttctcctcgatcacgacggcgcggtcaatatcgacctgaagaccgtcgttgatggcctgcttggacgcgcgcaccgcgatgggcgcgttgccagcgatctggccggcgagcttttccgccgcggcgtagaggtcagaaagcggatagaccgcgttgacaaggccgatgcggtaggcctcgtccgccttgatgttgcgggcggtgtagatcatctgcttggccatgccggggccgacgaggcgggcaaggcgctgtgtgccgccaaagcccggcgtgatgccaaggcctgtctcgggctggccgaagacggcggtatcggagcagatgcggaaatcgcagctcatcgcgagctcgcagccgccgccgagggcatagccgcccaccgccgcgatcgtcgggatggggaacgcttcgagcttgcgcatgacgtcgttgccctgcttgccgaaggcctcggcctcctccttgctgagctccttcatctgcgcgatgtccgcgccggcgacaaaggacttctcgcccgcgccgcggacgatcaggcagcggatctcgcttaagtccaccgcgtcgagcgcggcatcgagatcggcgagcacctgagaattgagcgcgttgagcgccttttcgcggtcaatgatgagataggcaatgttgcccttgggttcatatttgacaaaagacatcgtgtgtctcctcctgtcttcttcaactgccccctattatatgggcggcaaggcatatttgcaagagaaaaatcacttttttcaaaaaagtttcacacttttccggtctcactgcaagaaacgctgcatttttaatgatcttttctcccaatgcagcaactcttgtataaaatttttaaaatgacttgtctcttgcaccaattttcgatatgataggctttaattataggaaaacgaggttcattctatgcgaatgcgcaaaaagaaaaacctgcttccccgcatggagcggtgcggggcgtatcagatcaaggacccctacgagcgcaagggccgctggcacgacttgatgcccgaggcgaaggagatccgcgtggaactcggctgcggcaagggccgcttcaccgtcgagacggccgcggcggagcccgacgtgctgctcatcgcggtcgaaaaggtgccagacgcgatggtcgtcgcgatggagcgcgcggcgaaggcagagctgcacaacgtcttcttcatcgacatcgacgccaaccagctgcctgagatttttaatcagggtgaggtcgaccgcatctatgtcaacttctgcgacccgtggcctcccaagcggcaggccaagcgccggctgacgcacggcaatttcttgaagctctaccgcaaggtgctcaaggacaacggccaaattcatttcaagaccgacaacgacccgctgtttgagtggtcaatcgaggagatcccgcagtttggcttcgaactctctgaggtcacacgcgatctgcatgcgaacggacagtgcggcgtgatgaccgactacgaggccaaattctatgccgagggcaagaacatcaaccgctgcgtcgccacgatgcagccgtgggaagagcccgaggaagaggatacgcccgaagaggcggacgaaacggctgaataaaaggaaggctttcagccttcctttttgctttcttccagatacggcgaatacatcatcaccgcgtcgttcacggcgacaggcgtctccgcgagcagcttgccctgcaaatcaaacgtctgccggtagagctcgttgtggcggatgtagccgccccagtactgcgcgcgcatctcgtggttgcgctcgacgacctcatagcgctcggtcggctcggcgctcacgcgccactcgccctcaaggtctgttttgccgacgcggacacgcatctgataggtgtcctgtgtgtcgttgcggatcatcaggtcaagataggggtaaaagcaggtcgcaccgctgccgaagggctgcgtgcggttcgcgtcgggaaagacgtcgtagccgtggcggtggcgctcgacgaccgtgagcggcgtgtgcagcgtcatccagtagatgaggtttgagagctggcagagcccgccgcccgtcgcggccagatacccgccgttgcgcaggatcatgccgggcagataccccttccccgccgtcggctttccgatgagataccagtagctcatcgtttcaccggggcgcagcaaaagcccgtcgagccgcgcacaggcgaggcggagattcgtcaccttgttgcgctggagctgcatgtcgacgtccttgagctttcgcatgagcggcgtatggtgggaaaccgcctgatatgctaagtcttccctgctgcgctcgcgcgcaaaatgcttccgcatcgaaagccatctgagttttcgctgcgcgctaaaatacgcgccgccgagcttcagccgcaaattagagcgttttttcggttcgcggacggtcatatgcttccctcccctgtttttctgcttttatagacgcaaaacggcgggaaaaagttccaacattttctcatttcaggctcatcacgtagatttgacacgggttccactcgtcccagagcgtcgggaatacctcaaactcgccaaaaccgagggcgagatagaagcggttcgtcgcgtcgtactcagggtacttccccaactgcacggtcttgacctgcaaaaacgagtagccaagctccttcgcccgctgcttcgctgcggcaaagagcatcttgccgacgccgcggcggtggtattctttcagcacgcccatgacatagagttccgccgtatccctccccgtttcggcaaggtaaaggaagccgacggcgttctcgccgtcaaacgcggcaaaaaacggctgctttgcgcttttctcgatgtattcctcgcgcgcctctggaatgccaaaccagtcgggcagcgattctaaaatcaagcgcgcgatgcgctgcttctcctctgccgctgtgatctctctaacttccat

SEQ ID NO: 307 - DNA, 12461 bp, unidentified
  source 1..12461: mol_type = unassigned DNA
gctgtcggagaagtccatcacagccttgcgctcgtcggtcacggtaacgccagccatgacgatatcggccttgccctgctgcacgctcagcagtgctgcgtcgaagtccatatcatcgatctgcagctccaggcccagcttctcagcaatggccttggcggtgtcgatgtcgatgccctcaaactcaccggcatcggtggtcatctcgtacggagggaaggcagcgttggtggccatggtcagcttgccagcctcaacggtggtcagctcagcggcagcgctggtggaagcagcctcggaagaagctgcactgcttgcagtggaagaagcggtgctggaggcggaaccgccgcaggcagtcagagccagagcggcagcggtcagaccagcggcagccagaaagctgcggcgattgatctttttcatattcaaacactcctctgttgattgtataatttttcactttcccggcacgatgcgcttcatcgtgtcatcaaggaacaggattagtatatgttgtacaaataaaaaagtcaagtgttgtgcaaaaaatcggaacaaatgaaacccttttgaaaacatttatacatacagcgccccattcttaatgtatatatacattttgtttctgtcattccgttgtattctgctaatgaatcttcccacaggacttaatcccggacattgacactttttccttctaattggtataatcaggctggaagcatggtaaaagcagccaagctcaaaccgcgctgccccgccgggatgcggggagaaaggatcctgctatgaaaaatcgtatactgaaagccctggcctcctttggtctgtccgtctgtgtgctggcaggcagttctgtggtcagcatggccgaagagaccccgggcaaaaccgagtgcaaggaacacacctggaagaccacgacagagtataagactgagtgtgtggagaccaccttccagcataagctccccgatggcaccaccgagacccttacactttgccccgaatgcggcaaagtaaagaacaacacccagctgaccaaggtaaacggtgtcttctccaacttttccaacctgactgttcacaccgggactctgaaaaacggtgagcaggtaatgacagcagcattctactatcccactgttattgaacgggtcatctgcgaaaagtgcggcaccgtaaagagcgaggaggttatccccgcccgtgtgatggcccagccagtcattgccagcatcgaggtacccgccaataccgtttccggctacagcctgatgcagatcaatgccgacggtaccgaaacaccggtcagtgtttcctacaacaccgagctgaacaaggcatatttccgtctggatgtcaccaccggggcccagctgctgcggatggttcccaccacctgattttcccgcataaccaacgagaccgcccaccgggcggtctcgtttttgttttatcggcgtttctgtggcagggggatgcccagcaccagggcaatgcccacggccagcgccacggcgatcttgaaggtggagatgccgtttgccagcgccagcgcgttgtcgccctgaatgaagtagtaggcgctgtaatagatgcccgcaccgggcaccagcggaaagatgccggtgagcaggaacaccgtcaccggtgctctgagggtcatcgcaaggatgcgggccagcagcgtcagcggaatgaccgccagcagcgaggctgcaaaggcttccatcccgaacagctccgcgatctcgtataccagccaccccactgcgcccaccagtccgcagtagggcagggtgcgcctggggcaggcaaagaggatggcaaagctcagggtgcccgccccggccagcaggaactgcaaggccagacggcccagctgctccccggtgaaaagaagctctgtcataccacggccacccccttcaaaaaggcatagagactcagcacaaggccggtgccgatggcgatgctggccgcaatgagcagcgcgtcgatcatccggatggtgccggacaggtaatcgccctgcacaaagtcccggatgcccatggtaaaggcgatgccaggggtcaggatcatcagggtgccgatgatggcgtgactggcttcagtgcccagcaggctgcagcccagaatacagcacagggtgatgagggcggcggtagagatggttcggaacccgccccccacgccgtgccgcccgcagaacagcaggtaggcgttggccgcaacaccggccgcagcggcggcaagccctgctttcaggtcgcctccaaagatcagcgcaaagcagaacgcgccgcccatgcccgccgcaagctgcacccagtccttcggaaaagggatgcacctggcctgagccagccgggtctcagcctcatcgatggtgtccacttccccggacgcgatctggcgggaaagctgattcaccgccgccacccgccccaggtgggtggtacgggtgggcacgttgcgcacctcgctcatctccgccgtgcctgcgctggcaaaaatgccgttggtcagcacatagacatggaactcccgcaggtggaagctggccgccatgatctccatggtctgctccacccggaacacctctgccccgttctccaaaagggtctgaccggccgccataataaaatccatgatgcggcggcgctgttccccgtccggatacaattccctctctgccatgctgtggtctccttaaaattggcataaaaaatgaccgcctcaacgtttcagtgcctgagcggtcatttttcttgacgaatctatttgtagtatagtcaatctccggcggcttgtcaagcaggcacgccgttttttcagaacttgaacaggttcacgatccgctgccacaggcgggtgaagaagttgccttcctgcacatcagcggtggtctcggcggtaacatccgcagcggcgaccgtctcaccggtcttatagacgaacttcacgctgccggaagcatcctcggacttaccggcaaagctggtgtagtcctccagacggctggtcatctcgtccagcacggtcttcaggccatggatctgctcctcgtccagagcgccggtcagcttggagatgccctcctcattgaactggttcaggccatcgttcagccggaccgtgccatcgctgagctggtctgcgccatcattcagggtggtcacgccgtcgtacagggtcttggtgccatcggccagctgggcggcaccgtcctttgcggagtgggcaccgtcagcagcggtggcaacaccgttggtgtactggttgacactggatacgaaatactggatctgcgccagactgttcttcagggcacggacatctgcgatatcctggctgttctcagcctgatacttcagctcgtcatgcacggtctgcttggcgctggcagtgctcagatcaagcatggcactgaacatggaggggtcgtagctctgcatcagccgcagagcagcttccaggtcgtggttggtcttggttgcggagagatacagggcaatgtccagctggctgtccttgaagctgggctcctgctcccagacggtgcgcaccatcttcttgcgggcagcggccagtgtcttttcgttcatggtcagcacttcgtcaatgacggaagcgtagttgtcccaggtcatgggggtgtcgatcaggccgccctccatcagggtgctgttggcggaggccagaacaccatcggccacctgctgggcaccggcctgcagggcagcgttattagagctcagggtatccaggccgttggtcagctggcccagaccatcgtccagggcagaagcgccgctgttcagctgagaagcgccgtccagcagggccagggtaccgttggccagctgggaagcaccgtccaccagttgggcggcaccatccatcagctggttcatggcatcgttcagctggctgatgccatcggtcagctcgttgaggctgctcaggtcaaaggcattggtgcccagcgcatcggcgttggtggcacaggccagcatgacctgcggtgcggtcaggttctcgacatcggcttccacggtgacgctatcctgcagataatcctccacagtagacaggtcatcgggcagcaggccgtccagagaatcctttacgccgggcaggcagacaaaagcggccacgctgctcttggcggcagattccagcattccgtgctcggcgctcaggttggtggcatcctgaccaaagatcacgcccacagcagtgatgagcggggtgacaacggtgcgctccttgccgttgacggtcgcggtgccggtctcgttgttggtcaggtcgacggtcacggtcaggtggccgctcttgccgatcaggttctcaaggctgtcggtcacgccgtccagcgtataggtgacatttgcggtgatgggcagggccttgtcggtattgcccttatagtacacgtcggtgtcgtcggtgttccagaccagcttttcgccgtcctgggtgaacgcggcatcgctctcggtgttctggatgtcggtcagggtgctctcatcggtaacattggacaggccggaagcgctgtacaggtgctcgctgacggtggtggacttgatggagccgtcggcgttcatcacggcgtagaccgtctcatccttggaataatcggccttggcggctgcaaaggcgggcagggtcatgcctgcggcgagagtcagcgccagcgccgcactggcgaaacgaagcgattttttcatggtaattactccttatcagacttcttggcgttggaagattcagggaccagccagtgcatggtggtgtggcggatgacccagtccagcagcatcagggcagcgggcagaacgaccaggatgacagccatactgatcagtgcgccgcgggagatgagccggcagatgctctgcagcagttccatcttactgatggcggccacgccgacggtagcggcaaagaaggtcaggccgctggtcaggatggactggctgcagtgctccagcgactgctgggcagcttcccgcggggtgcggccatagctgcgctcctcgtgataacgggtggtcatcaggatggagtagtccacagtcgcgcccagctggatggtgccgatgacgatgctggcgatgaagggcagctgggtaccggtgaagtacgggatgcccatattgatggagatggcggcctcgatgctggcaaccagcaacacagggatggacaggctccggaaggagatcaggataatggcagcgactgccatgatcgaccagacgttgacgttcttgaaatccacgtccgcaacctcgatcaggtccttggtcatggcaccctcgccggtgatgacaccgttggggtcaaccgccttgatgaggtcgttcatctcggtcagctggttgttgatggcatcggtaccggtcttataggagctgttggccagaatgagcttgtagccgccggactgcaggatctcggtcacgctgtcgggcagcagctcggtctggaagcccgggccggtgatggaatccaggctcaccacctgggtgatgccgtccacatccttgagctcatcgcagaggtcagacacctgcgttgcggtcaggtcctcatccaccagaataaagtgggaggtggtcatgccaaagtcctcgcccagcttgttggtgccaacgataccggtcagatcctggggcagcgagtcgaacagggtgtagtagacctcggtcttttgctgggccaccacaaagggcaccagcagcacaagaaagacgaccacgatgggcattgcgtgcttggaaacgaagtagctgagcttggtcagcttgggcacgatggtgcggtgcttgtacttttcgacctgcttatcaaaggtcaggatcaaagcaggcagaataacgatggtgcagatgacacccagcgccacaccctttgccataacaacaccgatatcgcggcccagcgtcaggcgcatggcgcacagtgccaggaagcccgcaatggtggtcagggaggaagcggtgatggaggtcatggtcttgcagatggcggtcaccatggcttcctcgttggaggagcggagttccttttcctcctgataacggtggagcaggaagatggagaagtccatcgtcacgcccaactgcagcaccgtggaaagcgcctgggtgatgtagctgatctgacccaggaagatgttggtgccaaagttgtacgcaatggggaacagcaggcccagcatgaacagcacgggcgtgatggtgctctccagcgagaggaacagcaccagcatactggcacccacagcgcacaggatgtacagcggcatctctttattgatcagtgccttggtatcctgcaagatgacgctcatgccgccaaagtagcagtcgtgccgcagcacctgtttgatctgctggacggcgttcatcgtctcgtcgctggcgctgggcgcatcaaaccggacgatgagcatggtggaatcgtttttgccgaacatgaactgctggacatccgcgggcagcatctcggtggggatgctggggtcgatgacatcgctgagccagaaggtttgtgtgacaccgggcaccgcatcaatgtccttcttcatggcgatcagttcattggtaggcaggccttccaccgtgatcatgccggtggaggccagatggaagtcgtcctcaagcgctacctcgccgatcatggagtcgagctcctgcggcagataggtcaggacatcatagttgatgcgggtagcaaccgcgccgattgcggaagggatcaacagcaggaccgctactgttaagatcagcttgcgcagacgcacgatgctctgtgcgatctttttcatgggaaccctccatacgaaagttgattggatctgccccaaaaatgacccgtggtcatttctgagcaagcactattataaccaatcgacgcaaggtgtcaagataaaaaatgaccaaaagtcagttttcttatcacaaagcaaaaattgtatagcttgtccgggggcttttgctcttgcgctcttcccttctccctgctaaaatattgtttacacgacaaaacaacgtcagaaaagaggatgcagcaagctatgagcaccgtggaaggtaagaaacaggaaaagcgccgcgcgcttctggatgcagcttacgagctgtttctggagcggggcacctccaagaccagcgtggaggatatcacctcccgcgccaaggtgggcaagggcacattctacctctattttgccgataagggttcagtcacgcaggccctgctggcccgggtgagctaccagctgctggacaacgcctgtgccgctgccgagcagcacgccgccgagcttaccagcttccccgaccagatgatctttgtcattgaccatatcatcgaagccctgcgcgcggacaccctgatgctccgcttcctggagcgcagctttgtctggcccgggctggatcagatcgaagccagcggcgaggccgagccgctgatgcgcaaggtcctccagaccgtgatgtgcagccccgagatggcaggccgcaccgagcgggagatctaccagcgcatcaccgccctgggcagcatgtgcatgtcggtgtgctatacctccgtgttggagggcaagcccgacaacatcgacaacatgaagcccatcctctacgacatcatccgccgggcgctctgagcgcacctctcccctgccagctcccgcaaaggggcctttgcgccaatcctccggggcaaaaaacggaaaaggcagacttttttcaaaaaagcccttgcaattgcgcgaaaaatgtggtatcatactcaagtcgatacgacatctggacggttagctcagctggtagagcatctgcttgacgtgcaggaggtcacaggttcgagtcctgtaccgtccaccatacagttcgtacccgaacctgattctttacgaaaaatggttcgggtacgttttttgtttatcggaggttctgcgacgagagtatgcagaacggtaaacaggaacgaacaaaggcaggataccaccatcacggtgacaccctgccttttgtgttacaaggatattctgggggcgattgctgcgcacaaagcaccttaagcccctgtgtttgcttcggtcagcacaaaggtcagctccgctgtggcagcgcacttgccatccacataagcggatgccttcccgatgcccaccgggccgcgctgttccaccagctcacaatagagcgtaagaacatcccccggggtgacctgtttgcggaagcgggcatttttgatgccgccgaagagggccagtttgcctttgttttcgggaacgctcagcgccgccacggctccggtctgggccagtgcttccaggatcagcactcccggcatgaccggctggcccggaaagtgaccgcagaagaattcttcattgcgggaaacacacttgcggccaatggcccactgacccggctcgtagtccaggatacggtccacgagagcaaaggggtagcggtggggcagaagggctgcgatctgctcactgttcagggcgtttgcgttctcccgcacggtgcgcggttctgccatggctcagccctcccatctgcgcagggcgatgcaggcgttgtgcccgccaaagcccaggctgttgctcagtgcgtaggtcatggcctgtgcacggcctgcattgggcacatagtccagatcgcattccgggtcaggctgctcgtagtggatggtgggcggggcaaactggtctcgcagggccagtgccgtgaacacggcctcaatgccgcccgcaccgcccagcagatggccggtcatgctcttggtgctgaccacggtcagctgctttgcatgttcaccgaacacggcatggatggcagctgtctcgcaggcatcgttcatgtgggtgccggtgccgtgggcgttgatgtgatccacctgctccggggcaatgcctgcatcggccagcgtcagcttcatgcagtcgatggcacctgtgccgccgggagccggtgcagtaaaatggtaggcatcgcagttggcaccatagcccaccacctcggcgtagatatgcgcaccgcgtgcccgggcgtgctccagctcttccagaaccagcacaccgctgccctcgcccatcacgaagccgccgcggcgggcatcaaagggcaggctggcagcatccgggtcggtggcggtggaaagcgccttcatgctggtaaaaccgccgatgcccagcgggctgatgcagctttcggcaccgccgcagaccatggcagtctcgtaaccgtcccggatgcggtggaaggcatcgcccacagcattggtgccgccggcgcaggccgtgaccgggcaggtgcacatgcccttcaggccaaaacggatggccacctgtgccgccgccatgttggcaatggacataggcacaaagtaggggctgaccttctccatgcctttttcttccccgcgggtgtgctgctcctcgatggtgggcaggccgccaatgccgctggaaaggaccacaccgatgtttttggcctctgcttccgtgttcaggccgctgtcggcaatagcctcggctgcagcagccagtgccagcagggtgaagcgggccatcttgcgggcttcctttttgtccaccacggtctcggggtcaaagtttttcacttcaccggccagcttgcacttgaaatcggtggtgtcaaactgggtgatggggccaatgccgcaccggcctgcctttgcggcagcccagctgtcggcagcagtgttgcccagcgggttcacggtgcccagaccggtgatcacgactctgcgtttttccatagagaatttctccttttacattgccatgccgccgtccacacagagcacctgcccggtgagatagctgctttgttctgcggcaaaaaacgccaccgcgtttgccacgtcctccggctggcctgcgcggcctgccgggatgtcctttgccatttcggtgcggacagcctccggcagggcggcggtcatatcagtttcaataaaaccgggcgcaacagcgtttactgtcacattgcggctggccagctcccgggccaggcttttggtcaggccgatgagcccggccttgctggcggcgtaattcgtctggcctgcattgccccgcagggcaacgacgctgctcagattgatgatccggccccagcgctggcgcaccatccggcgggccgcttccttgcagcaaaggaacgcacccttgaggtttgcgtccagcacagcatcaaagtctgcttcggacatgcgcaggatcaggttgtcccgggtgatgcctgcattgttcacaaggatatccacccggccaaaggcgtttcctgcttcctcaaagagctttttgcagccctcggcggtggaaacatcggcctgcacggccacagcctgcgcgccttcagccctgcacagagacacggtctcggcagcggccgcttcgccgtggcagtagttgaccaccacatggcagccctgccgggcaagctgtacgcacacggcccggccgattccccggcttccgccggtcacaacggcggtacggatgatggtttcttcgttcattgttcttccttccatgcgttcagaacggtgtccagctgcgccggggtctccaccgacacacaagtcacaccgggcagggtctttttcacaaagccagagagcgcattgccggggccgacctccagaatgtgatccacacccagctcacccagacggtgcagggtgtcctccatgtagacactgctctgcacctgccggaccagcagggccgggatgctgtcgctctcgactttttcgcggcccaggcagttgaacagcaccggaacgctcatctcgccaaagggttcagcggcaaagcgctttgccagtgcatctccggcgggagccatcagacgggtgtggaacgggccgctcaccttgagcgggatgcatcggcgggcaccggcctgctttgcaagctctgcagccttgtccactgcggccttttcgccgccaatgaccagctggcccgggcaattgtagttgcagatctgcacacagcccagcgcggatgcctgctcacagcattctgcaagggggacccggtcgaggttcagcactgcggtcatgccgcagtcgatgccgctggccgcgtcggccatggctttgccgcggtaggctgccagctcaatggcctgcttggcggtgaatacaccggcggcttccagcgcggaatattcgcccagagagagaccggccacataggcaggcttgaccccctgctcggccagaacggcggatacgccgcaggcaaaagccaccatgcagggctgggtgtattcggtctgattcagaacgccgtccgggtcgtcgaaacagacgcggtgcagatcaaacggaaggtctgcagcgtcgaacgcggcacggaaagcggaagatgcttcgtaaaattctttgcccatgccggggtgctgggcaccctggccggcatacaaaacggcaagcttcattggttttgcctccattcggtcacaagttcatccatcagctcacggacagtgtacatccggtccagcctgcccacattggccccgcagaagaaaagtccttcctccaggttgcccttgaccgcttcgatcagtgcatgggtgatgcagtagggcaccttggcggggtcgcaggtcttcaggcagcgggcacagtgccggggtgggaagcgtctgccctccgccatggcctgcaccagcggcgtgttcagcgcccggcccggcattcccaccgggctgtggatgatgcgcacatcctcagaacctgcattcagcagaacgtccttgtacccctgggatgcatcgcactcgtaggtggtgataaagcgggtggcaagctgaacgcctgcggcacccagtctggtaaagtgagccatatcggccccggtgtacacgccgcccgccacaaacacggggatgctgtggccgaactgcgcctcatagggctttacctcggccagcacctccggcaggatctcgtccagcgtctggcagcttccggagaacaggtcctgctccgcaaagccgagatgaccgcctgccttgcagccctcaatgaccacaaaatcggcggtgcggccgaactccttggcccagcggcgcaggatgagctttgccgcccgcccgctggaaacgatgggcgcgatggcgacctccatcgtgttcacaaggccgggcagctccagcggcagaccagcaccggacaccacagcgtccacacccacttccacagcggtgcggatggcggcggcatagtcctgcgtggccaccattgcattgatggccaccataccggcaccgtttgcgatctgctttgctttccggatctcagcggtcagggcgcggtggttggcgctggccgggtcacggacagatcggaagagcggttcagcaggaatgccg

SEQ ID NO: 308 - DNA, 15882 bp, unidentified
  source 1..15882: mol_type = unassigned DNA
agctaccgcacctcgctcgccgtatcggcacttagaattatgcggtattgccttatgcttttttgctgtaatcgcgtgcgccgtaaatggcggtaccgatgcgcacaatggtggcaccctcgcggatggcatcggggtaatccccgctcatgcccatggaaaggatatccattttggcgttctcataatggcggtcagcagcttttgccagcagttcccgcatttgggcaaagaacgcgcgggtctcatccggggttgcagctgccggcgggatggccatcaggccgcgcaggcggatatgcggctgtgcggctgccatatccagcaggggccacaggctttcggcagaaacgccagacttgctctcttccccgccgatgttgatctcgatcaaaatttcctgggtcaggtttgcggcggcagcggcgcgctccaccttttgcagcaggtgctcgctatccacgctttcaatcaaagcagcacggcccaccactttgttgaccttgttggtctgcaaatggccgataaaatgccccggcttaccgcaataagcgttggcgtcggtcttttccaccagttcctgcacatggttttcgccaaacaggtcaatgggcagaacggcgctggcaatcacctcttccacggtgcgggtcttgcaggcggcgcacagcagaatatctgccgggtcgcggccggcttcacgggcggcggtggccatattttcacggatgcgggccacattttcggccatcattgtcagttgttcctgtgtcagcatggttcacatctcctggtaaacggcgcggctgccgccgatgtatttggggcgggtgcgggcgcagatgatgggcgcagcgccgatctgcttgatggtcaggcgcaccggcacggccacgcgctttaagtgcatgccaatcagcgtaccgccgatatcaattccggcagcggcacgcacttcctccaccagaaccggatgttcaaacgcctgccagcagttggttgcccagctgccgcccgcatggggctgcggcacggcgttcacctgttcataaccatacttttcggcagcttcctgctcgatgacaatggcgcgattcaggtgttcgcagcactgggccgccagatagacgccctgcgctttgagcaccggcagaatacccgccagcacagccgcggcggcttccatgctgctgtccttgccaatatgcccgccaacgatctcgctggaagagcagccgaccacaaaaatatccccggcgcgcaggtgtgcagccgccagcagttcttccgctgcctggcgtgcctgcgccgtaatggcggcgcaatccggtttttgaacggtgttttgttccataatctacccacctttttcatttactgatccggcattattataacacgggatgcaaggtttgtacattcttaaacggttctaaaccaatcttacccccatacaaaaacggtgcagcaaagccgcagcctgctgcaccgttttggggcactgctgaaaacaaacttattctcagcgcttgatatcgtaattcatgtccatcaggttgcggatggtggaaacatcatcggtgatgttggcatcgccatggatggtgtgcttgatggcggagcttgccaccgcaaagttgaccatatccattggcttgtagttgtgcagcatggcgtaaatcaggccgctggcaaatgcatcgccgccgcctacacggtccagaatattaaaggtaaacagcttgctttcaaaggtatggtcctcataccacataaaggctttcaggctgttctcagagccggaatgggcataacgcacatggcgggcaatgcacttgatgttggggtaacgctccacaaagcgctggaagatctcgtcctgctgttcatagctgggctgtaggggcacgccgtctttccagtcgccctgggcgtggtcggcatcgtctttccacaggtggtaaggctcaatgccaaacagaacatccacatagggcaggcacttggtgcagtagtcacgggcttcttcccaagtccacagggtggagcggaagttgccgtcaaagctgacggtcaggcccttttccttggcttttttcaggcaggccatcacaaaatcggcgcagttctggcccaaagccggggtaatgccggaaagatgcagccagtcaaagccgtccagcagggcgtccagatccactttggaaaggtcatactccgtaaaagcggagtgcttgcggtcgtaagtaaccttgctggggcggatgccgtaaccggtttccaggtaataggtgcccagacggtgggtcggggtttcctccggggtggaaaggatcatcggggtgcagtgcacatcattggagcgcagccagcgcaccgcacttttgcccaaagagttgttgggcaccacgctgaaaaacgtgctgtccacacccaggttggcaagagccagggcaatgttggcctcgctgcctccatagctggcttcaaagttggaagccatacggatcttttcatagttcggcggggtcaggcgcagcatgacctcaccaatcgtaataaatttagccgggctgtcgttatgcaggagcagggggttaaaatgttccataacatctacctctcttttatggccccacgggcaaaaccaggtcatggcccgccgcagagtttgttatgtcatatttattgtaccgtattttcgtcccggtttcaacgatttttacacaaactgcgctcatattttgcgttccttttcactgttgcacaaaaagggcggtaccgggcggcaaaaaacatcgcacacccatgattttttgctgcccggttcgaattgcattttaatgtcttttattgtataatagtagaaattgtgccctggcggcggctgccgcgcggggtgttgatacaagtgccgcacaaaacagcgttctgacgttttatgcgggccataaatctggagggagccaaacatggccgaaacaatgcaggtctccgcgcagcgcgcctggacccacctgaaaaaataccaaccgctgatccatgaacttgtcagccgcgatctgaaagtcaaataccgccgcagctttctgggttacatctggagcattttgaacccgctgctgatgatgctgctgcaaagcatcatcttttcgtacatgttccgcaacgatatcccaaacttcccgctttacctgatctgcggcaacaccctgtttacctttttcaatgagaccaccagcatgggcctgacttctgttatccagaacgccccgctgatcaaaaaggtgtacattcccaagttcatcttccccatcagccaggcggtttcccgctttgtcaccatgctgttcagctttggtgcggttctgctggtcatgatctttacccgtgccaccttctattggaccatctttttgagctggctgccgctggtgctgctcttctttttcagctgcgggctggggctgctgctttccgcgctggcggtgtatttccgtgatatgatgcacctgtacagtatccttaccatgggttggatgtacgccaccccgctgttctaccccatcaccgccctgccggaaaccctgcagaaactgatgaagctgaacccgctgtaccactacatcaacctgttccgcaacctgatgatgtacggcaacattcccggccccaacacctggattgcctgcattttttgtgccgttgcctctatggctattggcctgttggtgttccgcaagctgcaaaagaactttatcctgtatatctgacgtgaggtaacgtatggacgagattattaaagtcaatgacgtttccatgcgctttaaccttgcgcaggaaaaaactgagaccctgaaagaatacaccgtaaaactgctgacccataagctgttttttaacgaattttacgcactgaaacatgtttctttcagcatgaagcgcggcgaatccctggcgctgatcgggcgcaacggcagcggcaaaagcaccatgctgaaagtgatttccggcgtgatgtacccctccggcggcagcgttgccgtcaacggcgaaattgcccccatgatcgagctgggcgccggttttgacatggatctgaccgcgcgggaaaacattttcctgaacggcgcggtgcttggccacgaccgggactatatgatggcgcattttgaccgcatcattgaattttcggagctgaaagattttgtggatgttccggtcaaaaacttttccagcggcatgatcgctcgtttgggcttttccattgccactgaagtacaggccgacattctggtttgtgacgaagtgctggccgttggcgattttatgttccagcagaaatgccaccgccgcatggaagagatgctttccaacggcaccacgctgctgttcgtcagccatgatatcaaccaggtgcagcagctgtgccagcgctccatctggctggatcacggtgttctgcgcggggatgggccatcgcgtgaagtctgcgcggactatgtgcgcgctatggaggccggtgaaacctgatggaaaagctgctgacggtttcggttgccgcctataacggcgctgccacgctgcaaaaagcgctttcatcctgcctggtggcggatgaaagcctgcaggcgctgctggatgtgatcattattgatgatggctccaccgatggcaccgccgcgctggcgcaggcctttgtgcaggcacaccccggcagtttccggctggtgagcaaggtgaacggcgggtacggctccacgctgaataccgcggtagagctggcctccgggcggtactttcgcacgctggactgcgatgactggtttgacaccaatgctttgcagacccttttgcgccgcctgcaaaactgcacggcggatgcggtatacaccaactaccgcaccgtgcaggaaaacggcagcggaaaggcctttgatgtctgctgcaaatttgatacaaaccgtgtgtatgctgtgggtgaagtgcagcaggccacacctgatttgtgcatggagatgcacgcgctgaccctctgcaccaaaactctgcgcgccgcatggcgccctatgccggagcattgcagctacacggatatgggctatacgtttgttggcatggctgcggcgcagaccatctgctttgtgccggtggttctgtaccagtaccgcctggggcgggatggccagagcgtgagcatggccagctaccgcgcccacacgcaggattacatccgcgtagcgcgcattctgttggatgttgccgaaccgctggccgcacagcctgcccccgccgggcgggacctgctgctggtgcagcgggcgcgggatgtggcgcagtacctgattgagctgtacctgcgctttccccccgaccgtgaaaccggcctggccctgcgccggtatgacgagatgctgtgccagacttacccacacatcgctgccatgatgaccaacaaaaacacccgtctgctgcgggccgggcgttacctgccctaccgcacattgagcgcatgggcgcgcggaaaacaatccaacggcggcattttataatgctgtgccggatacttgaatactttgccggatatgataaggcaaaaagtgaaaggagaataccgtatgctgctgcaaaagctgctttggccccgcgtgggcatatgcaccgaggaccaactgtattaccgtatgaaagcccccagcttccgcgatgagggggatatcctgcgcattgagcagggcgaacgcgtctgctttgatacctactttaacagcgtcagcgcagacaaatggcgccgctacaccgccgcgcagaatttttcgctgcggctgaaactgagcggcaagctgcgcgttgtgctgtgcagccgccatttcatcaacagccagagcgtgcgcaccgtgctggccgaaaaagtagtgcaggcggattccgtgcaggaattctgcttcgattttcccaagggcgctgacggcatgctgttttttgagctgcaggccctgagcggcaatgccgcctattgcggcggcgcttatgagtgcgatgccgctgaaaaggatgtgcagcccgtcaaaatcggcgtggatatctgcaccttccgccgggagccgttcgttatgggcaacattgcccgcatgcgcagcgatattttggaaaacgccgccagcccgctgcacaaccacctggaagtgtttgtttccgataacggccagacgctggattacgataagctgaacagcgataccgtgcatgttgtgcccaacgccaatgtgggcggtgccggcggctttacccgcggcatgatcgagatcctgaaagccaacgaaaatggcgcaggcgttacccatgtactggtcatggatgatgacattgtgctggataccgatgtgctgctgcgcacctacaccctgctgagcctgcgcaagccggaatatgcggatgtatttgtcggcggtgccatgctgcggctggaccgccccaacattcaggtagaaaacggcgccgcctggaaccagggccagttgatcagccacaaagccaactttgatctgaccaaggttgacctgtgcgttgccaatgagctggaagaacgccatgagtataacgcctggtggtactgctgcatccccattgccgttgtgcggccggacaacctgcccatgcccatctttatccgcggcgatgacattgaatacggcctacgcaactgcaaacgcctggtcaccctgaacggcatctgcgtatggcatgagccgtttgagagcaagtattcttcctcgatgtactactacatcctgcgcaaccagtgcattgacaacagcatgcactgccccggctatgatgccaacgccctgaaagccgacctgcgcagccaggtgatgggcgaagtgaaccgctaccgctataagaatgctgacctgctgatccgcggcgtgcgcgactttttgaaaggcattgactggctggaacagaccgatgccgaagccctgcacaaagagattatggcatatggctacaaggcccagccggtggaccagctggatgttccgtttgattattcccgctacctgtacgccaccaaagaggaagaaaaaaacaagggcaagctgaaaaacctcaaggtcaagctgacccgcaacggctggctggtgccccccacccgcgaaaacaccgttgtgagcatgatgcacatgaccgcctacaatgcttaccgcgtgcagaaggtgctgaactatgattccaactcccagaaaggctttgtgaccgagcgcagcaaggaagaatacagccgttgcgtgcgcgagatgaaagcctgcatgaaagagatcgacgcccagtttgacgctgccgcccagagctaccgcgagcgctgcagcgaagtgcgcagtctggacttctggaaaaagtatctgaacctggacaagtaattttaccgggcctatccccggttttccctggaaaggaatcttacacttatggccaaaaaaaaggcaaattcgtttgttcttaccattgcgggcattactgctgccaccgtgatcggcgtggtcggggtcaagctgacccctgctccgcatgtgattttcagcctggctcccagcgcagaaccacaggctaccgctgagccggagcccatcagctgcgtgctggccggtaccgggcaggttgtggattttgcggatcccggcgcagaggaatatgtttccctgctggataccgacagccagagcctgaccgagcgctatgccctgcccgctttggagcggatgacccagtccgacaccgaaagcctgattgcccctttgcaggtcatccagcgcattcagaccctcggtattgaccctgccacctttgataccccggaggccaactggaaaaacctgtacaactctgtcatgacccggctggctcccctggccaccgccgaaaccgcccaggctgtgaattttaccggttccagcctggcagaactgaatgactttctgacagccaaccccggcagcacggtggaggtcatctcccctgctctggtgatggatgccaccctggtggtacccactggtacgatcctgcacggcaacggcgcagtgctgacccccggcaatgaaacgctggacaaagccattgttctggaccaggcggaaaataccgccgtgaccggctttgtcatcaacggcgggtgcaattacggtgtgtatgtcaagaattccagcagtttctatctggctgaccttgacatcagcaatgtttccctcaagggcctttgcgttatgggggagaacaccggctttgcactggtcaataacagcatccatgaaaaccagaatggtgccatcttcctgaacggcgagatcagcaatggcgtgatcgagggcaaccgcattgaaaataactctggtgcccgcaacctgaccgccgggctggtgctctgctccatgcccattgaggacattgagaccgcctacaatccgttcccggatgaaatgctgtacgatattttacagtctccccatcagctggttgtgcgcggcaacacggttgcgcagaaccattcctccggcatttattcggaaagcggctacctgaactattatgtagagaacacgatctacaagaacgaaaaagagggcatgtgcctggattacggctccttcggcaactacattaccggatgtgagatccgccagaacggcggccgcaaccgcatgagtgatgaggatctggaagctgactttattctggatcagggccgcatggcggatggttcctcccccgccaagctgcccggcatctcgctggataacaccgcctacaacaccatttacggcaacattgtgcgggacaattacggttccggcatcaaggctgtgcgctcggcgttcagcaacaccattctgtgcaaccagatcattgacaacaaccggggtgccagcgataccttccacttctttggtattgagctcagcactgacctgaacgcggacgaagccgtgcagggcctggatttcaccccctgctatgagaacatcattgcccgcaacaccatttccggcgggcattacgccggggtgtttatgggcgaagatgcgttcatgaatgatatttttgacaatacctttatggactgcactgactgggctatggaatccctgggtgaaaaatacaactctaccctgaacaatatggcaaacatgcccacccgcgggatcgaactttctaacggtcagggctgatgccgcgaggctgctacatgaaacaaacactgcaaaaccgtttcccgcgccggtggctgctgctggcttttgtgctgaactttgccattgccgcggctgcactgctgccctacatgatacgggacggcggcctgctgttggttgcggcggattttgacgcagaacagctctcctacaacatgctgtgcaacaacgccatcaaaagcggcgaggtgctgtggaactggtgcattgatattggttcggactttgtatcctcgttcagcttttacacccttggcagcccatttttctggctgagcttcctcttccctgccagcgcgtttccctatctggtcggctggatctatatgctcaaatatgctgttgccgggctgacctcgtttgcctacttccgccgcagtgccagcgagaaaagcgccctgcttggcagtgtgttgtatgcattttccggtttttcctgcatcaacgtggtgttctatcacttccatgatgtgattgccctgttcccgcttttgatgctggggctggacaaacgcatgcaggagggcaaaaaagctccgttcctgtttgccgttaccatcaacgcgctggtcaactattacttctttatcggggaagttttcttcctggtgttttactatattacgcggtatctttttggcggcgaggacgcacgccccggggcggatctgcgcaaaaatgcccgcaaaattccggcctgcatcctggaaggctgtctgggcgtcggcatggcgggggtactgttcatcccctccattgcggcggtgctcaataatccccgcgtatcggatcacatcagcttgagccaactgacctttgactggcccaattacctgcaaatgctgcgtgcgctcttcttcccggcggagaatatgttcaatttttccgctgtggtgcatgataactggtattccatcgcggcgtacctgcccttggcaggcgtctgcctggttctggcttatctgctgcgctggaagtgggactggctgcatgtgctgctggtggggctgttccttgtagcagccagcccggtcagcaacagtctgttcgtcatgttcaccagcgagccgtaccgccgctggtattacatgctggtgttcctgctggtactggccaccatcaaggtgctggaccatctgcaggactacccttggcgtgcgggctgcggtatttcggctgcagtcatcgccgctatcacgctgtatctgtacgtcaagcgcgataccatagtgtaccgcaaatactggctggttgtgttgacattgattgccatcggcggcgtggttctgctgtttgctgccctgggcggggtgcggcggctgcgcctgcgccgccccatggctgccctgacggcctgcactgctctggttgctgcactgaccaccggttttaccgtgggcacctatcagcgtgcctacacccagacgatcggcctgaccaccacagaaatttatggtgacgttatccacagcggcgacggcctgcctgatgccctgccctaccgctattatttctgggagccgtattccaaccgcggcatggcggcttacctgccggaccgtacctcctttttgagcacgctttccccctccatctttacactgtatgatgccctgggggacgagcgccacgccattacccccgccgggccggagggcaccaacgagctgctttccgttgggtattatatccgcaacaactccgactggccggatgaaatctacaccagtttttccaacggtcacgagcagatcaacgtctatcaggattcccatgccctgcccatcggcttctgctatgatacctacatgacccgcagtgagtttgacgagattgaccccgccgagcgcgcccactccatgttaaagacccttgtggtggcagacgaggacgaagccacggtttccaccatactgcgccactatgatgccgcgctggatggtaagatcagccaggaaaacaagtatgccgacatggacaagcgccgcgaagcctgcaccgatgtgtttgattatggcacagactatttttattccgaaatcacatccggcagcgagcagtacgcatttttcagtgttccctatgacaaggcgtggagcgccacggtcaatggcgaatctgcagagatcctgaacatcaacggcctgatggccgtcaaggtgaatgccggtaaaaactgtattcgtttccactattcccccaccccgctctggtgcgggatcggggtcagcgccattagcattctgctgacggcaatttacctgctggccgggcggcgcagcagaaaaagcaaaaaagaggtgctgtaaaccatgaaggctacccgcgaaaatccgatcctgtacatcgtgatcccctgctataacgagcaggaggttctgcccattaccagcaagctgtttttgaaaaagatcaccgacctggttgccgccggtaaaatcagcgatgacagccgcgtgctgtttgtcaacgatggctccaaggacaaaacctggtccatcatctgcgacctggccaagagcgacaagcactacatcggcatcagccagagccgcaaccgcggtcaccagaacgcagtgctggccggtttgatggaagccaaggacaagtgcgatatcaccatttccattgactgcgacggtcaggacgatatcaacgccatggacgccatggtagatgcctatgtgaacgatggctgcgaagttgtgtacggcgtgcgctccaagcgcgatacggataccttcttcaagcgctttacggcagaaagcttctacaagctgctgaacgccatgggggccgaggttgtttacaaccacgcggactaccgcctgatgagcgcccgcgtgctgcatgagttttccaatttcaaggaggtcaacctgttcctgcgcggcatggtgccgctggtgggctttaaatccaccagcgttgcttacgagcgccacgagcgcattgcgggtgaaagccactatcccttgtccaaaatgctgtcccttgcgtttgacggcatcaccagcctttccgtcaagcccatccggttcatcaccgggtttggcgttattgtggcgctcatcagctttatcggcgtgatctgggccattgtggaagcgctgctgggtgccaccgtatccggctgggccagcatgaccagcatcatctgctttgtttccggcgtacagctgatctgcctgggcgtgatcggcgagtacatcggcaagatctacatggaaaccaagcgccgcccccgctacatcatcagtgaccgtacgtgggatgaggatgagaagtaatcggctgggcagagttacgcctgtttgctttacctaatatagcaccaacaaaataaatttgtgccgcgcgttttgccccttgtatgggggtgggacgcgcggcttttttgttgtttcggaggtttccatgctcacggttgactcattttgcaggagagtatttgcgccgcggcccaccgacatgattctttattatttattcattattctttctcatcccccacccccggcccctctccttccataaaaaatttcccgatattttttgccttcccttattgacaaacgcccctgttggcagtattataatgttaacatatgagcaatcattcatatgataaaatgtttgataccgaggtgatactcccaatgcctgataccaaaaagttcccgcagcccgccacagcaccggatggcttagccaacgccctgcctgatgttccggtatgtgacccagactgccacggtgagccggatatcgttgccaggctacgcagcgatctgccggacgacgaggttctgtatgacctttcggaactgttccgtgtgtttggggataccacccgcatcaagatcctgtacgcgctgtttgagagtgagctgtgcgtaggcgatttggcccagctgctggatgtttcccaaagcgccgtcagccaccagctgcggctgctgaaagccagcaagctggtcaagttccggcgggacggaaaaacggtgttctattccctagatgatgatcatgtgcgcagcatgattgcgcttggcatggagcatgtggaggaataaaacgcccccaaatcttgttaccccttatttttcaaaaaatattgatcataaaaccaaaggagatattatcatgcagaagaaattcaaaatcgaagttgattgtgcaaactgcgccgccaaaattgaagatgccgttaaaaagctgcccggcgtgaacagcgcttccgtcagctttatggcccaaaagatggttctggatgtcgatgatgataagttcgatgccgtgctgaaggatgttgttaagaccgccaagcgtgttgagccggactttgagatcgagctgtaagctccttgcatcagcattttcggacggtttccaaccgcctgaaagtttcggaatccattccaagcggcggacatgtgccgacgcttggaataccttgcaagcaaaaaagcaggtccgagtgccgtccaggcatgagaacatgcttctttgcggcagggtggttccaaaggaggggtgcaggagcgtggcgcagccacactgcggcgaaccccacctttgtagcgtggagcttttgtgacacgctcagggcggtttccaaccgcccttatttttgccccttttttcctgacgaacacccaaaagagaggtcttatcttatgacgaagaagcagaaaaagacgctgaaacgtatcattatttcagcggtgctgtatctggccattattctggcttccaaactggtggctataccctggtatctggagctggtgctcttcctggtaccatacttcatcattggccacgatgtgctgcgcaaagctgtgctgggcattgttcacggcgaagtttttgacgaaaactttttgatggccgttgccactgtgggagcgctctgcctgggtgagttcagtgagagcgttgccgttatgctgttctaccagattggcgaactgttccagagttacgccgtcggcaaaagccgcaagagcatcagcgatttgatggatatccgccccgacagcgccaacctggaaactgccgatggcacggtaagtaccgttgatcccgacgatgtgcccatcggctctgtgctggtcgtgcgccccggcgagaaagttcccattgacggcgaggtcatttctggcgaaagcacgctgaacaccgccgcccttaccggcgaaagcaagcctcgctttgtgcatcccggcagcgagatcatcagcggctgcgtgaacggcgacggcctgctgaagctgcgcaccaccaagctgtacggtgaatccaccgttgccaagatcctggacatggtggaaaattccagcctgaaaaaggcccgcgctgaaaactttattaccaagtttgcccattattacacccccgccgtctgcatcggcgctttggtacttgccattttaccaccgctggtgctgggcggcggctggctgacctggatcagccgtgcgctcaccttcctggttatcagctgtccctgcgcgctggtcatcagcattcctctaagcttcttcggcggcattggcggcgcttcccgctgcggcatcctcatcaagggcggtaactatctggaagcacttgccaacacctccattgctgtatttgataaaaccggcaccctgaccaagggcgtttttgccgtcagtcaggtcagcccggccaacggctgcaccgaaaaagagttgctggaacaggctgctttggccgaaagcttttccagccatcccatcagcaagagtctgcgcgaagcctgcggcgagctggatgcccgccgtgcgaccgatgctcaggaaattgctggccacggtgtccgcactatggtggacggccatgtggtgctggcaggcaacgcccgcatgatggacgacagcaagattacctacaccaaaaataccggcaccggtactgtggtttatgtggcgcgtgacggccagttccttggctctgttctgatcgcggacgaagtgaaggaacactccaagcaggccattgccgccctgaaagcccagggcgtgcgtaccatcatgctgaccggcgacagtgaagccgttgccagcgcgatcagcggccagctggggctggatgaataccatgcccagctgctgcccgccgataaagtcaaccgcgtggaagagctgctggccaccaagggcaagaacgatatcctgacctttgccggtgatggcatcaacgacgcccccgtgttgatgcgcgccgatgtcggcatcgcgatgggtgccatgggaagtgacgctgctattgaggccgctgatgttgttctgatggatgacgacccggccaagatcagcctggctatgaagatttcccgcaagtgcatgcacattgtgtaccagaacattgtattcgccctttccgtcaaagccatcttcctgctgttgggagcctttggcattgccaatatgtggtgggccgtctttgccgacgttggcgttatgattcttgccgtgctgaacgccatgcgtatgctgattgttgaaaagaactaagcgagcgttttttccggatcttatcaaataacattaaggcaataccgcataattctaagtgccgatacggcgagcgaggtgcggca

SEQ ID NO: 309 - DNA, 15303 bp, unidentified
  source 1..15303: mol_type = unassigned DNA
atgttcaacaaacaccctaaaggtctgattgccgcatcttttgctaatttgggcgagcgtttcggcttttataccatgatggccattcttgtactttttctgcaagccaagttcggactggatggaaaagaggcaggtttgatctactcaacattttatttttctatttacattctagcattgataggtggtattattgccgacagaacccgtaattacaaaggtaccatctttgccggtattgttttgatggcggtaggttacttgatgctggccatcccgtctcctacaccggttgccaataagaccttgtttctggtgattacttgtgcagccttgtttgtcattgctttcggaaatggtcttttcaagggaaatcttcaagcgctcgtagggcagatgtacgacaatcctcagtactccagcatgcgcgattccggtttctccttattctatatgttcatcaatgtaggtgccatctttgccccgtttgccgcagtaggcgtgcgtaactggtggttgtccacattcggctacaattatgatgccgacctgcctgccctttgccacggacatctggcaggaacgctgactcccgaggctgtggacacttatagcgcattggcagccaaagccactatttccggaacacccgtaacggatatgacggtatttgccaatgaatatctgaacgtgttcaccactggtttccattatgcattcggtgtagctatcctggctatggttctctctttggtaattttcgtcatcaacagaaagaaattccccgatcccagcaagaaggttgctgcaaaagcgggcgatgccactgcagtggagatgaatgcacaagaggtaagacagcgcatgtatgcattgtttgccgtattcggtgtggtaattttcttctggttctcgttccatcagaatgggttgacactgacgtattttgccaaggaatatacagatttgaatttattcggcatggctatttcagctgagctgttccagtctttgaacccgattttcgttgtatctctgacaccggtcatcatggctgtctttgcagcacagcgtgccaagggtaaagagccttccactccgcggaagattgccatcggtatgggtattgctgccaccggcttccttataatggctatcggttcttatgtaagcaacttgccgatgcacaaggatataatcgctttgggtacctctccggtgaaggtgactccgctgttgctgatggttacctatctgatattgactgttgccgaattgtacatttctccgttgggcatttcattcgtgtccaaggtggctcctcccaaatatcagggtatcatgcagggcggttggctcggcgctactgccattggtaatcagttgctcgttatcggtgctatcctttacgaaagtattcctatctggatgacgtggacggtatttgtagtagcgtgctgcatttcgatgttcaccatgctgttcatgctgaaatggcttgaaaaggtggcgaagtaatcggaaacgaaagataaaactaaaggctgcgcaatgttcgtaatgaactgcgcagcctttagtttttggagggcttttaatgccggggctcagatttccagtcccatgatgtagtcattcatgtaatatccgtttcctatcgggaaatccccttcacggagtttccgcattcccatatgttcgtaaaactgcagtgccttgttgttacggttcacattcaattccatcagacaagggccgggatgcacttccttgatgtacttgatggcttcgcgaaagaggaaactgccgcaatgtgcaccctggtaataggggagcacataaatcttttgcaggtggaataaattttctccttgctgctgtacggacacatagcccgccgcttcacattcttcgtaggccaggaagtagacgtgaccttcctcttccatttgcttgcggatattgtccaatgaatacatccattccatcatgtagtcggtctgttcgggagtaaggatatccttatacgtgacagggaatatctgctgcgcaagtttctgaatcagtgcgcagtctgctgtcgttgcttttcttatggtaaacatatcggttgtatttatactgtttggggtgtaaagttaagccttttttgtgaaacaatcgttatctttgcagaccgttaccgaactaactaattttgattttaaaaattatggcatttacgagcaacattatgattgtccgccacagattactgaaggaactggtaaagctgtggaataacaacgaacttgtggataaaatagaccggctgcccatcgagctgagtccgaagaggtccaagcacgcgggacgctgctgtgtgcacaaagagcgcgcggtgtggaagtacaagtcattgccgcttctgggactcgatatggaggacgagacggatgagctgacccccttgtcggagtacgctgcccgtgcactggacagagcggaaaatggcaggccgaaagacaatatcatgtgtgtgattgacgaagcttgttcggcatgtgtgcagattaactacgagattacgaacctctgccgcggatgtacggcacgcagttgccaggtaaattgtcccaagaaggcagtgcacgtcaaggagagcgggcaggcatggattgaccatgatgcgtgtatcagttgcggcatctgccataagagttgtccctaccatgccattgtttatattcccgtaccttgtgaggaagcttgtcccgtgaaagccatcagtaaggatgagaaggggatagagcatattgacgaaagcaaatgtatctattgcggaaagtgtctcaatgcatgtccattcggagcaattttcgaaatatcgcaggtgttcgacgtgttgcacagaatccgcaagggtgagcaggtggtggctatcgtggctccgtccatcctggggcagttcaagacgactattgaacaagtatatggcgcattgaaacaggtcggttttacggatgtcatcgaggtggctcagggagcgatggataccgtcagcaacgaggcgcacgagctgattgagaagctggaggagggtcagaagtttatgacgacttcctgctgtccgtcttatatagagttggtgaacaagcatattcctgccatgaagccttacgtgtcgggcaccggttcgccgatgtattatgctgcccgcattgctaaagagaagtatccggatgcgaaggtggtcttcataggtccttgcgttgccaagcgcaaagaggcgcagcgcgacgaggcggtggactttatcatgactttcgaggaggtggcttccgtgcttgccgggctggatattcagatggagcaggcaaagccctattccatgagtttcacttccgtgcgcgaggcgcatggttttgcgcaggcaggaggcgtgatgggtgccgtgaaagcctatctgaaggaagaggcagataaaatcaatgccgtacaagtggctaatctggataagaaggctatcggtgcgttgcgtgcttacgccaagtcgggcaaggctccggggcaatttattgaagtgatggcttgcgagggtggttgtattaccgggccatgttcgcataatgaaataactgccggaaagcgccagctgacgcaggagttggcaaagagaaaagagacgtattagccctttgtccgtttatatgaagcatttgattgacaaattgcggagcaatcgcaggctggatgccgaagagtataaagccttgcttctttgtcgggacacagaacttgcagcctacctgcaggagcttgcccgggaagaagcgcttgcctgctttggcaataaaatcttcattcgcggactgattgagataaccaaccgttgccgcaataactgctactattgcggcatacggaaggagaaccggaacatagtccgttatgagctggcgcaggaggagattctttcgtgttgccatgaaggctatcggttgggtttccgtacctttgtgctgcaagggggcgaagcgccggcggtgaaggatgaggggatggtggagacagttgccgccatccggcaatccttcccggattgtgccattaccttatccttgggcgagaaatcgcgggaagcctacgaacgtttcttcctggcaggtgccaaccgctatctgttgcggcacgaaacctgcaacgaagggcattatcaccggcttcatcctgcggagatgtccctttcccatcggttgcaatgcttggactggctgaaagagataggctatcaagtgggaaccggaatcatggtgggcagtccttaccagacggtggaccatttggtagaagacattctcttcatcgaacggtttcagccggagatgataggcatgggaccttttcttccgcatcacgatactccgttttcctcttttccgccgggagatatggagttgacgttgaagttgctttctatcttccggttgatgcatcccgcggcactgatacctgctaccactgccctggccacacttgctccggacggacgggaacggggaatattggctggcgccaatgtcgtgatgcctaatctttcgccttctcatcagcgggcgaagtactccctctatgataacaaagcttctgcgggtgccgaagcggcagaaggtttgctaaaattggaggaacaactgaaagggataggctacgaggtatcaaaagagagaggagattatgagaatggagaattgaccgttgataattgataattttcaaatcttcattctttattttaattaccaattatcaatttacgaagtgtataacataaagtcaagacaagcggaagaattcatcaatcaccaggagatattggatacattggagtatgcgcaggcaaaccgcaacaaccgtccgctcatcgaaagtttgattgacaaggctgctttgtgccaggggctttcccatcgggaggcggccctgctgctggaatgtgacgagccggaactggtgcagcgcatctatcatctggcacgtgaaatcaaacggaaattctatggcaaccgcattgtgatgtttgccccgctttacctttccaactattgcgtgaacggttgcgtctattgcccgtatcatgccaagaaccgtaccatcccccgcaagaaactctcgcaagaggagatacgccgcgaggttatcgccttgcaggacatggggcataaacgcctggcgctggaagccggagaagaccctcgaaacaaccctatcgactatatcttagagtctatccgcaccatctacagcattcatcacaagaatggggccatccgccgggtgaatgtcaacatagccgccactacagtggagaactaccggctgctgaaggaggctggcatcggcacttatatcctttttcaggagacttacagcaaagagcattacgaagccttgcatcccacgggaccgaaaagtaattatgcctaccacaccgaagcgatggaccgtgctatggagggtggcatcgacgacgtaggtatcggcgtattgttcggtctgaacacctatcgttatgacttcgtaggactgctgatgcatgccgaacatctggaagctacctttggcgtgggtccgcataccatcagcgtgccgcgtatctgtccggcagatgatatttcgaccgaggattttcccgatgccatctcggatgagatgttctgccgtattgtggcggttacccgcattgcggtgccttatacgggaatgattatttccacccgtgagtcggaagccgtacgccgtcgggtgctcgaactgggcgtttcgcagataagcggcggttcgcgcaccagcgtgggaggctatgccgtgccggaagccaaagaggaagattcctcccaattcgatgtgagcgaccggcgcacgctggatgaagtggtgagttggctgctcgacctggggcatatccccagcttctgcaccgcctgctatcgcgagggacgtaccggagaccgcttcatgtcgctcgtcaagcgcggacagatagcaaactgctgccagcccaatgcactgatgacattaaaagaatatctggaggactatgcctcctccgaaaccaaggagaagggcatacagctgattcgtgaggagatggagcatatcccgaaccccaagatacgggcgatagccgaacgtaatcttcaggagataggggaggggaaaagagactttagattttagatttcggatttatgaataatacacctcgttccaaccgcctgcacattgccgtctttggacgacggaacagcggaaagtccagccttgtcaatgccttgaccgggcaagacacggcattggtatccgcaacgcccggcactactaccgatcccgtaaccaaagccatggaagtatatcctttgggcccgtgcctctttatcgatacccccggttttgatgacgacgaaggcgaactgggcggtatgcgcgtggagcgtaccttaaagacggtggagaaagcggacatcgccctcttgctttatgaagctgacggaacgctggaacagcaatggctaaagctactggctgcgcgcgaaatccccgtgatactgatactgaataaagccgattcccgtcaagacaccgcttccgtggtgcttcggattgaaaaggaatgcgggcaggctcccgttgtggtcagtgccaaagagggtaccggcattcaaggcattttcgatgctattctcgaaaagcttcccgagaattttggtgagcagactatcacgggcaattgggtaagtgaaggagatgtcgtcctgctggtgatgccccaggatatacaagcccccaaaggtcgtctcattcttccgcaagtgcagaccatccgcgaactgttggataaaaagtgcttagtgatgagctgcaccaccgacaagctgcaagcctccctgcaagcccttgcccgtccgcctaagctgataatcaccgattcacaagtattccccatcgtctatcaacaaaagcctgccgaaagtagtcttacttccttctcggttctttttgccggctacaaaggagatatcaatgccttcgtggagggagctgccgctatccatagcctgaccccccaatcgcgtgtactgatagccgaagcttgcacccacgccccgctgaccgaggacatcggtaccgtcaaaattccccgcctgctacgaaagcgcatcggcgaggaattgcagatagactttgtatctggaaatgactttcccaaagacttgtcccgatatgatttaattatccattgcggcgcttgcatgttcaaccggaagtacgttctcaatcgtatagcccatgcccgcgcacagcacatccccataaccaactacggagtagcaattgcgagtctgaccggtatattggataaaattgttatctatcggtaaatatccctttccctctctgttcacgttactgatgttatagagtagcgtgaactacttttcttgttaataatgtttaatatatggtactttgtaatgcaaggtactgatataatacatatatttgtgccatacaaggaacaacaatagaatgaataaggacactcattactctattgcgcagcaaaatagtaaatcgtaaattgtcaaatagtaaataccattatggatgtaaacaatgtaaagtcgcaaatgcgcaagggcatgcttgaatattgcatcatgctgctgcttcacaaagagccggcttatgcttcggatatcattcagaagttgaaagaagccagactgattgtggtggaaggtacactttatccgttgctcacccgtttgaagaacgacgaccttttggggtatgaatggattgagtctacacaaggtcctccccgtaaatattaccggttgacggaaaaaggagaagtctttctcggtgaactggaaacatcctggaaagagttgaacgatacggtgaatcacatcagcaattcttgaaatgcccacagagaatatgctgcattcgccgaatggtaaatagtaaatcgtaaatagtcaaattgtaaataaatagtgtgttatgaaaaagacattaactgtaaatttaggtggaaccgttttcaatattgatgatgacgcataccgtcttttggataattatctgagtaatctcaagatgcacttccgcaaggaagtcggtgccgacgagattgtagatgatattgaacgccgtatttccgaactctttgccgagaaattgtcggccggttcgcaagtaatcacgatagccgatgtggaagaggtgattgcccgcatgggaaagccggaagatatggaggcggaaggagagagtgctagtgccgattccggcagcacgagtgccgggggcggctatggtgccggtgcttggaacagcaataccgcttatggcactacacgccgtcgtctataccgcaatccggatgacaaaatgctgggtggtgtcatcagtggaatggctgcctacctgggatgggatgtaactttacttcgactgttactgcttgtcatcttgatttgtggggtagggacattgataccggtctatatcgtgtgttggctggttataccggaagcccgcacagcggccgagaagttgagtatgcgtggcgaggccgttacggtggagaatatcggaaagacggtgacggacggttttgagaaggttgccaatggggtgaatgattatatgaggtcggacaaaccccgtactttcttgcagaagttgggagatgcattggtgatgattgtcggctggttcttgaaaatctgtctggtgatatttgccattatctgcagtccggtattgtttgtatttggagtggtatttgtggcgttgttgtttgctgcgatagcggtggctgttggtggcggtgcggctctcatttcctttttcccgatggctgatgtggtactgcctacttctccgttgtctgccattgtgatgtacattgcaggaatcttgctggtaggaattcctttggtcagtcttgtatgggccatcttcagtcagatattcaaatggcagccgatgaattccggtttgaagtggacgctggttattctttggattgtaagtgcggcttgcttcggaatctgttttgcagtgcaaggggctactttcccggaattgggtatctttaacttctgagaatagtaatttcttttttaattgatatcgtgtttgtaggaatctgatttctataaacacgatattttttatttcaatgtaattatttgttatacagtggaatatttcgtttggaaaaggtgttttttaaacgttcgtttaatgaacgcaaagataacgtgtatttttgaatctcgcaaaatgtttaataaaaatattctataaatttctttttagtgagtataatactttgtcagtaagcctattgcattgtatttctctaacttcttccttttactaatttttaagtaatcttccctctttagttttcttaaatattgacgttcaaaaaacgaacgtctattgaacgctttttgcttgcaatagattcgtttacagcattttacctgacaggtaatgaatgactgcaaaaaatctgttgacaagaagggcataaagcttgtcgtattctacataaagtgtccgcaagtaattgaatttcaagtgtatgcaagaggttcaaagccccaggagaacacccttgtctgaacaaaagcataaaaatgggaatagagaaagaggtcgaaatctggtatgctatgcgtgccacctaccgcagagaaccagatgccatgcatctgctcaagaaagaaaatttgggctgtttcattcctatgcaatacaagatatgtataaaaaaagggaaaaaagtccgtgctctggttccggtcgttcataatctgctttttgtccatgcccgtccttccgatgtgcagcgtgtaaaatctcaagtcacttatctgcaatatatcaccgatacccgcagtgggcagaagattattgtcccagacggtcagatgcagcgtttcattgccgtatccggcacttacgatgatcatcttctttattttcaaccggatgaattgaacttgtccaaaggcaccaaagtccggattaccggcggtgaatttgaggggcaagagggtgtgtttctgaaggtgaaaggcgcacgtgaccgtcgcgtggttatcgaaatacaaggtgtcatagctgttgccatggccactatccatcccgatcttatagaagtaatcggctgaactttaatttttaattcttaattctataattgcttatgtctctttccgaagaagcaatcactcttcagcgtgctgcgcacgaactgatgtatttgggtatggacggcagtcccgtctatagcgatgacttgtcacggcggaacggtgaggtctaccgtcttaccatggctttataccggtcgggtgtaaaaggcactaccatcgaagagcaggcaaatgtctgtcttgcccttcttatgggttacagcgcctcttttgtggaccatggcgaaaagcagcagcatgtccaggaagtgctggactgttgttgggatgtgctcgacgcccttcccgcttccttactgaagctccgtctgcttaccgcctgctacggtgaagtgttcgacgagtctttggccgacgaaggccgttccatcatcgcctcctgggattccttatcacttactcccgaacagcaggaagcggttgatgaatttcagaatgtgacagacaatccctatccatgggaatatatcgatgaataaaacttttcatataatgcttaacaataaatccgtattgattaccggaggaacgggttccttcggaaagaagtttgtggaaaccattctccgtgattatccgcaagtaaagaaaattattatttactcccgcgatgagctgaagcaatttgagctgaaacagaaatatcccggtcataagtatccgcaactgcgtttctttatcggtgatgtccgtgacctcgaacgcctgacgcgggcttgcgaaggagtggacgtgattatccatgcagccgccatcaagcaggtggataccgctgaatacaatcccgaagagtgcatcaaaaccaatgtacacggtgcgcagaatgtgataaaggctgctcttgccaccggtgtacagcatgtggtggccctttctactgacaaggcttgtgcccccattaatctttatggcgccaccaagctcacttccgacaagctgtttactgccgccaacaatatcagcggttccaaggacatcaggttctccgtagtccgttatggcaatgtgatgggttcccgcggttccgtaatccctttctttatcaacaagcgtgacaacggggcgaaggaacttcccataaccgatatgcgcatgacccgtttcaacatttcactggaagccggtgtcgctttggtcatgtatgccatcggacatcacctgggtggtgaaatctttattcctaagattccttcctatcatatccaggacgtggctaccgccattgcacccaatctgccgcaggtggaagtgggcatccgtccgggagagaaactgcacgaggagatgattactgtaaccgatgctcttgatacaatcgatttgggcagatattatgtcattcttccttccgtatctttcaagcacagtcgcgaagagttcatcagacatcacaatgcagtacccgttcccgacggtttccactacagcagtgacaacaatacggagtgggagacagtagagactatgcgcgagaatataaagaaatacgttgaccctaatttcgaggtgaaatgataagcaagcctattccatacggtcgtcagcatatcacagatgaggacatccgggcagtcatcgataccctgaaaagcgattacctgacacaaggtcccaaaatcagggaatttgaaacgaaatttgccgaatatgtaggtgcacaatatgccgtagcggtgaacaatgctacttcggggcttcatcttgcagctaccgcactgaatgtaaagccgggtgacaaggtgattgtcactcccatgacctttgctgccagtgccaactgcattcgctattgtggcggcgaggtggtattctgtgatattgacaaggatacttacctcatggatatccgtaaactcgaagccatgcttaaagcttctcctcgcggtacttacaaaggtattgttccggttgattttgcaggctatcctttggatctggaagagttcagaaagcttgccgacgagtacggcttgtggattatcgaggatgcctgtcatgctcccggtggctatttcatgaacagtaaaggcaagaaacaacattgtggcaacggttgttttgccgactgtgccgtattctctttccatcccgtgaaacatatcgctacgggtgagggaggcatggtgaccaccaacagcaaggagctctatgacaagctttgtctttaccgtacgcatggcattacgaaagaccctgctttattgcacgagcatcatggtggctggtattacgagatgcaggagttaggctacaattaccgtctgactgattttcaggctgccttgggtatttctcagctggagcgtgcgaaagcaggtcttgaccgccgccatgaaatcgtgagacgctataatgaagcgttttccggaatagatggtatcaagactccgttcaatgctgccgatgtctatcatgcttatcacctttatatcattcaagtagctgaccgcttgggcctttataattatctgcacgagaacaatgtctatgcgcaggttcattatgctccgcttcatctgatgccttactatcagcagtggggaaataggaaaggcgatttacctatagtagaagagtattacgaacattgtctgagtcttccgatgtatcccacgctgacggacgaggaacaggagtatgtgattaaaaaggttatagaatttgtagcgaaatgaattgcgtaaacaagcttgttctcggtaccgtacagttcggacttgactatggaataaataatcagtttgggcaggtacaccaagatgaggtcgggcagatattgaggtgggcaaagaaaagcggaattaatacgtttgatacctcctctgcctatggaagtagtgagagcgttttaggaaggtctctttctgaaaataatcttcagtttcagattatttccaaatatccccagtctaaagaaaatgttgctaccgtattcgcttcttctatagagaagctccatcaacagaagttatatggttatcttgttcatcattttgagttctatcaatcccatcctcaattatgggaagagatgaagcaactcaaagcagagggaaaagtagaaaaaattggtttttcgctttatgatatcaatcaactgcaatatttgttagataatagagtagagtttgatattttacaatttccttataatctcttcgatcggcagttcgatgtttatctttctcaacttaagcagtctggggtagagatacatactcgttctgtatttttgcagggacttttttttaaggatctgggtagccttagtgggcagatggaaccattgaaaccttatttattgcagattagattctattgtgcagtgcattctatcaccattgaacaatgtgcattaagttttgtgcttcgaaacccctttattgatggtgtattgataggggttgataatataagtcagttgcagaacaatatcaatgtggccatctgtacgaaagaggttgaggagttggctaaacagataactgtgaaagaaacttatttgttgaatccttctaattggttataatatgaatgttttagactttttctctttggagaataaagtagccattgtcactggcggctacggttatttgggaaaagcttttgtacagtctcttaatgaagcaggggcaaaagttgttgtggccggtagagatgaacaaaagtttaaattggcttttcccattgtttccaatatctatttctgccctttggatatttcgaacacagagagcatcaaaaaatgctttgctgatgtgaataaaacatatggtagtattgatattttggtgaataatgcagtatatctgtccggtcaatatcctgaagaagttagtgacaaggatttggcttattcatttgatggtattataggtagtgtttacaagtgtatacgcgaagtaattccttatatgagagaacaaaagtctggaaatattgtgaacatcgcttctatgtacggtgtggtggttcctgactttaaggtttacgacggtgattgcaacccaaattttaatcctcctcaatacggagcctccaaagccggagtcattcaactgaccaaattctttggtgaatatctaataggtgataatattcgtgtaaatgccatttctccaggaccttttccttcgccttctgtacaaaagaatgaagagtttgtaagtcgtttggcaggtaaaaatccttcccggcgcattggcaatcctgaggatttaaaaggtgcattgctttttttggcatcagatgcatccaaatatgtagtgggacagaatattcaagtagatggagggtggacaatatggtgaatacactttgtattgtgcaagcgcgtttgacttcatcaagactgccagagaaggtattgatggagttgggaaacagtgggctttcaattctcgaacatgttaatatgcgtctcaataagtccttgaaaatagataaggttgtatttgctataccagacacacctttgaatgataaactggccgattttttggaaaataagaagatagaatattgtcgaggtagtgaaaatgatgttttagggcgcttctatcattgtgcagagaaatataaccctgaattgattgtcagggccacttgcgataatccgtgtgttgattggcatttggctgatgaaatgatagaaaactggggtgatgcggattatatgtattgtaaagaaactccattgggtacttctgtagaggtatttacaaagcatgctttaaatgaagcttatcaccatgctaaaacccctgaagaaagagagcatgtttgcccttacatagctcgtaatgaaaaaaatatttgcaaacaatatccttataataagcttagttatcgtttgactgttgatgaggaagccgattttttgctgatgaatgaaatctataagcagctttacaagaatgctcctattgagaataagatgatttatgaatacttggagaaacatcaagaactattggggattaatagtaaggtaaaacaaaagtttctctga

SEQ ID NO: 310 - DNA, 13017 bp, unidentified
  source 1..13017: mol_type = unassigned DNA
atgactttaaaaaagaacgatattgtaaaccttacaataacttcggcaactgccgagggcagcggagtcggaagaacagatgacggcattgccgtttttgtacagggttctgcaatcggtgacgaactcaaggtgcgtatattaaaggttaagaaaacctacgctttcggcaaaatcgaagaaattctcgttccgtccaaggcgagaattactcccgactgcgaaaactttatgaagtgcggcggttgcacatggcgacatatttcttatgaagaagaatgcaaaataaaacagcagagagttgaggatgccgtaacacgcatcggcggtcttgataatgttgttttcaagccgataatttcgtcggataatatcacaagataccgcaacaaggcgcagtatcctgtcggtcttgaccgtgacggaaatgttgtgacgggcttttattcattccacagccaccgcataatcaattgtaccgactgtattttacagcccgaaatttttgcaagggtaattgaaattacaaaagattttatcgcaaaaactaacacggaaatttatgatgaaacaacaggcaagggcagacttcgccacatttatatcagaatcggcgaggcttcgggcgagcttatggtgtgctatgttgtcaacgcaaacggtcttaaacaggaagatttactcgtgaaaatgctcaaatccgaacttccgcagttaaaaagtgtgattattaattctaacagagaaaaaaccaatgttgttctcggcagaaaaaacagaacaatctacggaagtgaccatattaccgacacactttgcggattgcagtttaaaatttcaccgttttcgttctggcagatcaacagaaaacaggctgaaaagctttacggcaaagccaaagaatatgcaaatcttaaatctgacgaaattctgcttgatttatactgcggaacgggtacaataggtcttacaatggcggattcctgtaaacagcttatcggtgcggagattgttgaagatgccgtgaaagatgcaaatgaaaatgcaaaagcaaacggcattgaaaatgcacgattcatctgcggagatgcctcagacgccgcatttcagcttgaaaaagagggtttaaaacccgactgcgtaatccttgacccaccgagaaaaggttgcggcgaagagcttgtaaagacaatttcaagaatgtcgccgagccgtgtagtctatgtatcctgtgacccggcaaccctcgcaagagatttaaaattcttcacagaaaacggctacacccccaaagaaatcaccccctgcgatatgttctccggaacctcccatgtagagagcgtggctctgttgactaaagtacaggagtaaaagtgtgaaaattattaaatttgaagaaatctatcgtgatgatatgatttttacggttttacaggcaaaagatgctttgggtagaaaacctactataaatcctgaccttcttgatattaaggcaaactatcttgattgcaatgatatgttttggcttgcaatagatgaaaatgacagggtagtcggatgtattggatgttcaagaattactgatacagatcaggcatttttgcataggctttatataaaaccgtcattaaaacgaaagggaatcggctcaaagttacttaatacggcagagttatggatgcgtgaaaacggtattgctgtttcaaaagtacatttggggacaccaaaagagcagtggtttgaatcttatgctttttatccgaaacacggatatatagaatatgaaccaaggtatatgatgaaggttctgtaattaatgaaagtcaaaagtaacatatttattatgattattgagtagtgcaacaaataaaatgaaatatgtttggggtttggggtacgatattgaattgacttatttaaaaagaaaaagtgacaccgatggtgatgctttttgatggaggtgcacaaaatggcaaagaagaaaaatgaaataagtattcgctcaagtgctgcggaatatctcacatatgttgcttctgtgggaaatcaggcagatagctttgaaatgcgttatgaggacgaaaatatatggctcacacagaaaatgatggcaacgctgtatgatgtttctgtgcctgcaatcaatcaacatctaaaaaaaatctttgaagacggcgaattagtcgaggattcagttattaagaaatacttaacaactgccgacgacgggaagaattatcaaacaaaacattataatcttcaggcaattattgcagttggatttaaagttaataatgaacgagcagttcgattccgtaaatgggcaggtcaaattgtaaaagattataccattcagggctggacaatggatgtagaccgtctgaagaagggcacgatgttcacagatgaatattttgaccgtcagttagaatacattcgtgaaattcgcctgtctgagcgaaaattctaccaaaaggttacagacctttatgcaacagctttcgactatgataaagatgcaaaaaccacaagactctttttcaaaactgtgcagaacaaaatgcactatgctacgcacagacatactgctgcggaactgattgttgaacgagcggatgcggaaaaggaacatatgggactaacctcttgggaaaatgctcctgatggtaaaatagtgaaaagcgatgtatctgtagcaaaaaactatcttactgaaaaagaattgtcttttttggaacgcattgtatcgctgtatctcgattatgcagagttacaagccgaacgtcatattcctatgagtatggaggattgggcgaaaagacttgacggtttcctcgaatttaacggtactgaaattctcacaggagcaggaaagataagtgcagagcaggcaaaacttcacgcagaaacggaatttgagaaatatcgcatcattcaggacagattgtttatgtctgactatgacagatatttacttgaactggaagaaaagatgaaagaagagtaaatggaaattttaatgttttgcgagaaattataaaagcgtctcattgcatgagtctgtttattgagatatgattggcttggaggtgatacattatggcaaatgaagataaaaaggattttaatgctatgcttatggatagcaaggatatgcctaaatttcaaataatcacagatgaaaagagtattaaaaaatatggtggagataaaatgtattttgcaccgccaatcgactatgacaaagtaatgaaaaaaattccgtatggtaaagtgattactgtcggaaaaatacgagaatactttgcagagttaagcagtgccgattttacagagcctatcacagccggaatttttgtttcaatagttgcatgggcgagttatcagcgcacagaggataaaaccccttattggagaacattaaaagcgaatggagaattaaatgcaaagtatcctggaggaattgaggcacaaaagaaaatgcttgaaactgagggacatactgtagtgcaaaaaggaaaaactaatatcaagtattatgttaaggattatgaaaaagcattatttacattgaaatagataatgcgaaaacttcagtttcacggacatatccccacaaacggcagaaccacgaaaaaggctgtggatgtattcccttgaaccaaaaatcagccaagaaattcatcgtattcagatgagccatgtagagagcgtggcattgattgaaaggaattaacaaaataatatagaaaaggaattaaaatgcaaaatactcttaaaattaaacgaacaaaaacagctttggcatttaatcttgcgattatcgcttgtgagattgccgcaataattatcgtgtttttcaaattaggctgctatccgcttgtatattacactgaggacagcaacctgtttgcacttgttgcctgtgcggttatggcaggctttcaggtgcgatatctcaaaagcggaaaagaaattccgcactcggttcaaatgttcaaatatatggcggcggctgtgctttcggtaacatttatcgtagttcttgccgtgctttccccgatgcgtggagagggcataaacggttggctctatatgctttttaacaaagacttcacctttttacatactttgtgtccgattcttacaattttatcgtttgtgctttttgaaaaagaacctcaccttaacacaaaatcagctttcacggctacaatccctacattaatatatgcgattctgcttattatacttaacatagtcggtgcatttgacggtccatacccgtttttgcgtgtgatgaatcaaccgttgtatatgtcatttgtttggttcatcgttatagtaggcggtgcgtttttccttgcactcttacttcaaaaacttaattcaacaggaaaaaaagtaaatagcagacagtaaacagatgaaaatttcagattggagtgatttttatgaaataccgcaagttggtggagaatgctaaaaagccaaacggcttttggggcaaaatgatgattaaggctatgaataaaggacattcaagcctcacctcatggggacttgaacatatgaatattgaacgcaccgcaactgtacttgacataggttgcggcggcggaaaaaccgttgaccgactttgctcaattgttgccaacggcaaggtttacggaatcgactattcagaactctcggtaaaatcctccgaaaaactcaattcaaaaaatatactctgcaacaaagcgaaaattcttcaggcatccgtatcagatatgccttttgatgacaatacattcgataatatcacggcagttgaaacctactacttctggcctgataaggaaaatgatgtgaaagaagttttccgtgttctcaaacagggcggaacggttatgctgctttttgaaatgctcagaacagacgatgatccgttcaagtgggaaaaggttgaaaatatgttgaatatcaagtcggtaactccgcaggaaatcagagccgtacttgaatctgcaggctttgaacacataaacacatacactaaggaaggtacaacatggctttgtgccacagcacaaaaaccgaaggatgatgaaaactaatgaaggctttgattacaggtgcaagttcgggcataggtaaagaaatcgcccgatatcttgcagaactcggttatgaccttattcttgtgtcacgctcaacagataagcttaacaagctgaaagaggaactttcaaatgtgaatgtcagggtaattacgcttgatttttcacgagaaagtgacagcctggatttgtatgagcatattaagaatgaaaatgaacagattgattttcttgtcaacaacgcaggctttggagcatacggaaaatttttggatgttccgcttgaaagagagcttgaactcattcacacaaatgtttcaacggttcacattctcacaaagctttttcttaaagatatggcggagagaaacagcggatatattctcaatgtaggttcagccgcaggatttcttgcaggcccgacatttgcaagctactatgcttcaaagaattatgttgtccgtcttactcaggcaattcatgaggaaatgcgtagggataataaaaatgtcaaggtttccgtactttgcccgggtcccgtaaaaaccaacttcaataatgttgcggatgtaaaattctgcataagaggacttgacccgaagtttgttgcaaggtatgccgttgacatgaccatgaagggcaaaatgattatcacacccggctttgaaatgaaagcggtgtcgtttttcagacattttgcacccgaaaaacttctcacaagaatttcttataatgtgcagatgaagaaaaacggtataaaataattatcatatagaaataggggaggtgacacattgagaataaaattcgttgacaaggcgataaaactttacaaaagaataacaggcagatttgaaccgataacaagcaaatgcgttcacgataatatttttgcaattgccggacagtcggcattctttattatattatcggctgtgccgctctcaatgttctttgtgtcacttttgcaaaacctgcacattccgattaattttgtttatcacggactcagcagtgtgttttcgtcaaaaattgccgatgacttaacatactttctgacctctgcctatgaaagtgctgtaggaatttctcttgtaacgcttgtagtcactctgtggtcggcggcacagggaatccatgcaatcacaaacggtcttaacagaatttatgatgcttacgaaaacagaaactggttctttttaagaataagagcaatgttctacacaattgcattgtttgtaattttgcttgcgtcacttgtacttattgtcctcggttcaacaattaacgatttcctttcaccgcatctaaaatcgttgccggacataatcggaataatctatcatctcagatatatacttatctttatgtttctcacggtattgtttgcgctgatttacaggaactttccgaacatctcacgcagcgagcataaggaatacggctttaagtcacagttgcccggtgcgtttctctgcacggtttcgtggtatgtgctttcgttcggtatttcggtttatgtgtcggatttcaacggattttccgtgtacggaggtcttacaagaattgccgttattatgatttggttttactttcttatggtttgtcttatggtttgtgcggaaattaattatgtctatcatgacaggataaaagtgtttaccgttgcaaaatttaaaagaaaggtaaaaaccaaaggttcagagcttaatcaaataagaaaagaaagaaaaaataataagtcaaataaaagtaaataaatcaaaataaaacacttccgttcggtgatactaccaatggaggtgttttttatgaaaagaaaattttctaaaaaggtgatttcaatattgctcgtatttgcaatgctcattggcggagcgtgcttttcatgcacaagtgcagcggcgtttgaccttgactatatcagcgaggacggaatgaagctcggttacagtataatcaagggctattccaaaatgtcgatgaaaaaaggtcagtacaaggacgggaaaattgccgtttactgtggacttgatgtgaataatctatatgttatgggttcgctcggttggttctatatgacaaacggtgttgatctcgaccgtgcaatgacggataacgattacgcaatggagatgattgcaaagcttgactcacaccttcaaggtgcaggcataacaaatgacagggcaaaagaaaagaaagccgagattttaaagaatgcaaagtatgtttatcaatgctttgacacattgggactttacattgttgatgttgataaaaacagagccgatgaactcatgaacgacagcggtattgattttgtgcttgacggcggttgcgttcccaaaaatatgaaagacctcaacattgacggaaaaacagatgaaaaggatgctgagcttattcagaagtatcttatcaaagacctcacctttgacgattatgacgaaaatcagtatgctctttttgtttgcgatatcaacggtgataaaacccccgatatccgtgatgcgacagaaatcctaaaaaagtgacaattgtcataatttgtgcaaagtgaatatgattttaactgcgacagctgcaattttagctgtcgcttttgatttgtgacagcaatgtgaaactttgaataattatttgtaatttctcttgacattcaaaatgaaggtgctataattactgatacaaattgttttgtatcgaactattctatatagaacaatatctcataagtgtgatttcggaggtgaaataatgtgtgatgacaaaagcgtaaaaagctgtaagtgcaacaaacgctttaatgattcaatcggtcacgaaatcaaggtgcttaatcaggttttgcagagaaagttaatctattccgccaaggataagggtgtggataagctgactcttatgcacggctggattattgcatatctctatgatcatcgtgatgaagatgtttatcaaaaagatattgaaaacgcattttcaattgcccgttcaaccgttacaagtattcttaaacttatggaaaagaaaaattacataacgagggagagcgttgaaagtgatgcaaggctcaaaaaacttgtcttgaccgaaacaggtattgaacttcattacaaaatcgaaaatatgataaccaaaaacgaaactttgcttgacagtctgctgacaaaagaagaaaagaaacaatttctttttcttataaataaaattctcagcggacttgaaaatgcaaattaaaacggaaggagataagtatgataaaaactttggcaaaaaatatcaaaggtttcgtcaaagaatccgttctgactccgttctttatgatactcgaagtaattgttgaaacaattattccgtttcttatgtcatcaatgattgacgacggtatcaacaagggcgatatgcagcacatattcataacgggcggttatatgggtgcacttgcactcacgggcttgtttgcaggtatgatgggcggtatctacggtgcaaaagcttcggcaggctttgcaagaaacctcagacgctcaatgtttgcaaatatccagtcattctcgtttgccaacattgaccgttactcaaccgcaggacttgttacacgtatgacaacggatgtaacaaatcttcagaatgcatatcagatgcttttaagaatgtgtttcagagcgcctgtatcgctcatctgtgcaatggcaatgacattcatcatcaatgcaaggcttgcctgtatttatctcattgcaacaattttactttctgttgttcttgcctttattatgaaggcaacatacaagtatttcagtcaggtttttgaaaagtacgatgaactcaacgcaagcgttcaggaaaatgtaacttcaatcagagttgtaaaggctttcgttcgtgaaaaacacgaagttggcaagttccgcaaggcagccgacaatgtttacagactttttgttaaggctgaaaatgccatggtaacagtatcaccgattatgatggttacttcatacgcatcaatcatccttgtaagctggtttggcgcaaatatgatcgtaagcagtgagcttacaacaggtgaacttacaagtatgctcacatattgtatgaacattcttatgaatcttcttatggtggcaatggtgtttgtaatgctcacaatgagccttgcaagcggcaagcgtgttgcaggtgtgcttaatgaaaaatcaacgcttgcaaatcccgaaaaccctgtttacgaggttaaggacggaagcattgagtttgacaatgtttcattctcatacaacacaaaagccgaaaaaccgattctcaacgatatcaacctaaaaatcaaatcaggcgaaacaatcggtattatcggcggtacgggttcttcaaaaacaagccttgtaaaccttattgcaagactttatgatgtaaccgaaggttctgttaaggtcggtggaaaagatgttcgtgactatgatatcgaaactctgcgtgacaaggtttcggttgtgctccagtcgaatgttcttttcagcggtacaatccttgacaacctcagatggggcaacgaaaatgctacagaggaagaatgcgtcaatgcctgcaagcttgcctgtgcagatgcgtttatcgaaagcttccccgataagtacaacacaaaaatcgaacagggcggtactaatgtttcgggcggtcagaaacagcgtctttgcattgcaagagctttgctgaaaaatccgaaaattcttattcttgatgattcgacaagtgcagttgataccgcaacagacgcaagtatccgcaaggcattcagcgagaatatccccgatactacaaagcttattatttcacagcgtgtatcaagcgtttcacacgcagacaagattattgtaatggatgacggtgagataagcgcagtgggtactcacgaagaacttatcaaaaacagtccgatttacaatgaaatttatgttgcccagacaagcggcaacggtgattttgatgcgaaaggagagctgtaattatgccgggaccaatgggaagaagaaaccgaggacctgcacaaaaggttgaaaattcaggtcaggttcttaaaagactattcggtattatcttcaaaaaatataaatttcagatgattattgttttcgtctgcatcctcatcagcgtacttgcaaatgttcagggttcattgtttattcagaatcttattgacgattacatcactccgatgattcagagcggcagccgtgacttcggaccgatgctcggagcaattttaagagttgcaatcttctatgcaatcggtgcggcgtcggcgtttatctacgcaaaaattatggtttatgtaacacagggtacaatgcgtgatttgcgttgtcagatatttgaacatatggaaagccttccgataaaatactttgacacacaccctcacggcgatatcatgagcgtttacacaaacgatattgacaccctccgtcagatgatcagccagagtattcctcagcttttcaacagcggaattacaatcatagccgttcttgtcagtatgtttacactcagtgttcctcttacaattcttacacttgtaatggttggcttaatgctttttgtaacaaaacagcttgcgtcacgaagcggaaggttttttgcaaaacagcaggcagacctcggtgcgactaacggttacattgaggaaatgatgaacggtcagaaggttgtaaaagtatttaaccatgaaaaaaagagcattgaagaattcaatgagcttaatgacaggcttttcaacagttcatacaatgcaaacaagtttgcaaatatccttatgccgattaacgcacaaatcggtaacatcagctatgtactttgtgcaatcgtaggctgtatctttgctctcaacaatttcctcggatttacaatcggtaaactcgtaagcttcctcacatttaacaagagctttacccagcctatcaatcaggtcagccagcagtttaactcaattgttatggcgcttgcaggtgcagaccgtatctttaaacttcttgacgaagagcctgaggttgatgacggatatgtaacacttgttaatgtacgcaaagagggcgacaggcttgttgaaactgagaaaaaaacaggtatgtgggcttggaagtatactcacagcataacaggcgaaacagagtatcgtgaactcaagggtgcgcttgttatggacgatgttgacttcggttatacagatgataaaatcgttcttcacaatattgatttgtacgcagaacccggtcagaagattgcgtttgtcggttcaacaggtgcaggcaaaacaacaatcacaaaccttattaaccgattctatgatattcaggacggtaaaatccgttatgacggaatcaatatcaacaaaatcaaaaaaggcgaccttcgccgttcactcggtatagttttacaggatacgcacctgtttacggataccgtaatggaaaatatccgttacggcagacttgacgcaacagacgaagaggttatcgcagcggcaaagcttgccaacgcagacagctttatcagaaaacttcctgacggctacaacaccctgctcaaaggtgacggtggcaatctcagtcagggacagcgccagatgcttgcgattgcaagagccgctgttgcagatccgcccgcacttatccttgatgaggctacaagttcaattgatacccgtaccgaaaagatggttcaggacagcatggataagcttatgcacggcagaacaacctttgttattgcccacagactttcaacaatcaagaattcagattgtattatggttcttgaaaagggcagaatcatcgagcgtggttcacacgaacggcttcttgaacaaaagggcagatactatcagctttatacaggcaaaaccgcataatgataatcgaaaggggagagtcgcaaaggctctcctttttctgtccttgaaatattgacttgtttattgtacaataagactcggaattgtgaggtgttaaaaattaattcaaaattaatattaaagcttactgcattgtttgcggtaatctgccttgcactttgttcgtgttcaatcaatatcaatgtgaacggttccgattcggaaagcaaaacaactgtttcagaaatcggaacattatcggttcattaccttgatgtcggacagggtgacagcatatttattgaactgccaaatcaaaagtgtatgctgattgatgcaggcgaaaatatgtacggcaaaagtattaccgaatatatcaataatctcggatacacaaatattgattatctcgttgcaactcaccctcatgccgaccatatcggttcaatggcttatgttgtaaagcataataatatcggcgaaatctatatgcctaaggttacaaccacaaccaagacctatgagaatctgctcacggcaattgcagacaagggacttaaagtcaagtcagccaaagcgggtatgaatattattgatggcaacgatttcagcataaatattcttgctcccgtaacaattgacgaggataatctgaacaattgctctgtaattctaaaaataacttataaaaacgacagctttctgttcctcggggatgccgaaaagaaagagcttgaaactgttacggcagatatgagagcagaagttcttaaagtaggtcatcacggaagcagaacttcaacaacaaaagcgttgcttgaaaaggtaaatccaaaatatgcggttatttcactcggcaaggataacagctacggacatccgcacaaaagcacattaaagttgcttgatgaattcggagttgaaacatacagaaccgatgaaaacggaacagttgtcatttcaaccgagggttcaggtgtgacaatcaaaacgcgacaaacttcaatgaaaagggatgaataa
